United States Patent Application Publication US 2008/0114160 A1 - sequence listing, part 49

SEQ ID NO: 14299 - DNA, 1345 bp, Oryza sativa
gggctggggcggccgctggacgcggccaagaacgcggcggcgaggtaccgggaggccgtggggctgcaggtggaggcgttctggaggcgcaactacatgctgctcgtcggcgccggggcggtcgtcgtctgcatcgcgctgtggagggtcatgttcggcatcgccagcaccttcgtcgggctctccgagggcatggccaagtacggcttcctcgccctcgccaccgccatggtggcgttcgccgtgagtgcgctcctccctttctcgctttagctgctatgaactataacaagctatgatagaatgcgcatgcggtgattggtgaatatattctacatcattgtggtatgaatgtttttgtaccttatgactgtctaatgcttaattgtatgcaccgcttctcgaattctggaacttcatcttgatgtttatatcaagcaatacattttttgctgatcatatgaaccgccagcatacctcaatgtagcacttaccatgctaaatatgtcgacactttattatcctgaaatatgccactttgtctgaactaccacccgccttgagcttaaacctcgggttaccaacttaccattagtctattagttttattataaacttaactttggttcacctgagaaccagattcactatttatgatcatagttttgattgaagaattgttacgcggaaatgctttaatcatacaggaaacacaagtacaacctaaaaccttgaaagatgatactctaataaaaaaaatcaaatgatttctagttgatcatgcaccaaagtactaggtaggtgtgctttcaatattacccttgtcttaatgttcttttccgatccgtgtaacatgaacaatattgacttgtggtagactggtatattattttatctaccgaggtgtagcaacaatatggattgcagagaagtatgaagtgaactgtagagatcttgctaacttggaaattatcagaagtctagtttatggtgaacattagagctttatgccactttccatgatcaactttctgtagaggaaacaatgactaactttttttgtttgcctttaagttgtcttatcattttaaatgctcataacacggtgctaccgtcaatctaatatttttagtgcaactttgcttgacagatgcctaagttttgggaggagcaactgatttgtattgtctatttttgttatagggcatgtacacacgctcaagattcaccataaatcctgataaggtttatagaatagcaatgacaaagctcaacacatctgctgcaatccttgaagtcatgggtgcacccttagccggtactgatgtcagagcatatgtcatgt

SEQ ID NO: 14300 - DNA, 651 bp, Oryza sativa
atttaattgggtaattgatccatttaaatcaattaaatcaaataaattccaaggctcattatgctaggaattcatgtgtattcattcttttatgggatatcaatgggatgaagagttttgagaattaatccatttgattagggaattggtaacttatatcaattagtcctaattgatggatggttgatggttgtgtagtggaggatggttcatggctagttgatgacaattagttgctctattccttttcctattccatgagtcttactcttcatcttccattcctcttataaaatgagaatggatttgatctcccgcaagaatagtgagacacactttcatccatttcccaacgctgttgctgctacggtaatcccatcccgacgagtgtgtgcacacgcgttgggagagtaggcctccgaaaccacgcgctgctgcgacgtttgcacggacgggcgggcgatcaggtttttggggagcgcaacgcgcgactactcactgttcgtcaacatctacttcaccttcaccaatatgtatgaacactggagacaacggcaacactggatacaagaagaaggaggctcccgtcaacaccaacggaggcaatactacctcaaactccagcggaggaccattcttggggtataacct

SEQ ID NO: 14301 - DNA, 665 bp, Oryza sativa
atatctttgtcatgatgtttatgattgatttagttatcatcactgaccttgtacatttcctttgttcaattggttgcttgaatctgttacatttatagttttgaagatacctgaacaatgaagccacctttggagaggaaccctaccaagaagcgccactcgtggtggtgggacagtcacattagccctaagaactctaaatggcttgcagaaaatcttgaaggtgagctgaaacttttacagggaaaataatgagattgcattgtcttagtactcctactgttatgcgttttttttgtggagatactactcatatcaatgcatgtccaggtacagtaccatttaccaatgtttactgcactgagatgaacataaatgagcaataaaccagtggaagtacatcatcaatttacttatttacttaagtcaaatgctcttgacgcactcatggtatctgatggtactgtagcattaactgattgtacatcaaactaatgagcaggatggggtagttgagtaaatggattcatgaatataactagagatgtagtagacattcttgattgttcattgttcgtatattcgtgcttccatagacaagtaacagaaatgatgcacatattttctttattataaattgtcagtgaagtaaaagtaatactgct

SEQ ID NO: 14302 - DNA, 673 bp, Oryza sativa
tcatgcgagtttcttcatagttttcttaatcaactgttcgtgattgatggctgtgtttaatgacatcaatacccatactcattaattttcttatgtggggaagagtgctggcgtattggagccccatgtgctaaagaaagttagccccgaggaggacaggagtaatttcggcacggttaccatggcagacattgatcgaaccatgaagaaatattctgataacctattgcatgcactggaaggtgtaagttcaaggctttcgcagctggagggtagtacacaccatcttgaaaattctgttgacgatttgaagatatcaatcggcaactataatggcagcactgatggaaaactaaggcagctcgagaacatgctgagggaggtatgcttctctctccctttctctctgacaatgtttatacaaagcaactgaggccatattgaaataagtgtattttatgtaaaggggaaacatcatatcttctcctgttgcacatataatagtacctttctatttattagcttctaccccccatatattatgaatgatatagctaaaaacgatcaaagatcttggtattcattaaatctgtgactcatcaaaccctcgtggtggcatagatgagtagtctacctggataacttttgcctatctgacttatttgtatatgcc

SEQ ID NO: 14303 - DNA, 5320 bp, Oryza sativa
ttagttcctggaaaaatagttagaagtttgaaaaaagttgaaagtttgggaaaaaaattgaaaacttatgtgtgtaaaaaagttttggatgtgatgtgatgtgataaaaagttgaaagtttaaggcagttaggttgaactaaggccccatttgaatcaaagaaaaaaccataggaattctagagaattttatcctatgggaaataattctatagagtcatttgaaaaaaggattgtttcctatcaatttctttgaaattcctatggaatgaaccttactagagcaattttggaggaaaataagcatgaggtcttacctcatgttatcctcttcatgtgtctgaggttcctgtgtttttcctgtgcgctaattaaacgacagtttgaagactttcctgtgttttaaaatcccatacgaatccaataagtgtgatatttaatttctatgttttttctattactcttttttctcaatcctgcgtggtctatgttgcattgacaaaccgcgttctcgcgtcgggccacgagccggccacgtactcctaccgagtacgcgtaccgaccgccacgctatgggccccacactttatccagtctgcaaccgtgtcatgcatgtttatatatgggatttatagtctgttgattgttttacagagaaattggattaatcggcgatcagcagcgctctcgtacgatctttgactggggcaccggggataacgacggttttaaattatctgcaccgtatccggccgggtcggcgtcaagtggtcggtgtgcattatcaagtgctatcttgccgcggtgttttggtgtcagtattcagcaaggtttacgttagcgtatatacctgacaattaacctgattgatctcctggagcaagcagcgcaggatagatggccacgtaagacaggcgccgttgaaaagttcctccatcttccactgttggtttcagttgggcttcttcggctgtgtttagttgttgaaaaaagttaaaagtttgggaaaagttagaagtttgaaaaaaaagttgaaagtttatgtgtgtaggaaagttttagatgtgatggaaagttgaaagtttagggtagttaggggtgaactaaacacggccttcgtttcccaactgccaataaccaactcaggttagagcaagtatagccaactactaactccaaattatttatagtcaatctaatagcttattcatatagtagttacatataaacatttagtactccctccgtccctaaatatttagcgccgttgacttttttaaatatgtttgatcattcatcttattaaaaaaattaagtaattattaattgttttcatataatttgattcattgttaaatatactactactcaagtttttaataatatttataaaagtttttgaataaggcgaagatcaaacacgtttaaaaaagtcaacgacgggatggagagagtacatcatataatatatggtttcatctcttataggcatataacgtattgaaatccgtactgtagctggttatgggccctactgtagctgactatgggcctgttcggctacatgtgctatggctgcggcctgcggcgcagccagcaccaacagtgctgcacacacatggtgcagccgcaaccagcttgccgagcaagccctataaatatgtagcctaattttcttttctctcttcccttctctgattcacatatgcttacaattgatttgtactcgttattaaaaaactaaaaaaaaaagaaaaaaaaatctcggtggtgggcccacgtggcccacgggctggggttccagaatcgtggaggacgaggagggctcttctggaaatccctggacagctttgctgccgcggccggtggagttggtcgctcctgcccaaaaccaggaggattaggaggggtttacaggttaatttaatcgattcacacgcgattagaggatgggttaccgaggcacgccgactattgtggagccacaccgcgcgccctcgcgccgccacgtgctcctcccgggttgacgtggcacaagaggctcgtccgagtaggcacctcccaaaattttggtatgatcagtacagtttgaagtttgacttggccagtttagtcaattctagtatcctcttacggcaaaatactaggaaaccagacaattttctgaacgaccgtttgcaatttacagcaatccaacgacgacaggagagaaggcgatctgatgttttcgcaggggaaattatcaggaatattaattaccatgataagtacaatatgatcatgatagtgtccactgtagaatccatcggcgacactacaaaatctctgtcattaattacgagaatgctacggtatcgtcggctagtaatttgctgaaaacaatccattgatgcatgtataatcaccaaatggaaatggacccctggattactgatgctgtactttttcgtcagggaaagaaggaatctgatctgaagaagataattagcggataaaactttacttgcaggattaactcatgaaaggacgcgaattttactgtgtaattataaaaaaaaaattaccaccggaaggttcgccatagcccatacagcatcgaaaaggaaacggaaagatacaggggcattccatggctatcaaaggacagtaagagaaataaactgacaaaaaatataatttaatttataaaaggaatgagttgttgtggctcccacacaaaaacctctataaattgggcgcaaattagcctcccatctcttcagcaaagccccaggcttagcaaaacacaagcaaaccaaagcttccatctcttcttccagttcaaagatctccaagcctccaggaaactcaaggccagcctcgccatggcgcccaacctcagcaaggccaaggacgacctgatcggcgacgtggtcgccgtcgacgggctgatcaagccgccgcggttcacgctcaagggcaaggacctcgccgtggacggccacccgttcctcctcgacgtgccggccaacatccgcctcaccccggcgtccaccctcgtgcccaactccgacgtccccgccgccgccgccggcagcttcctcggcttcgacgcgccggcggccaaggaccgccacgtggtgcccatcggtaagctccgcgacacgaggttcatgagcatcttccgtttcaaggtgtggtggacgacccactgggtgggtacaaacggcagggacgtggagaacgagacccagatgatgatcctagaccagtcggggacgaagtcctcgccgaccggccctcggccctacgtcctcctcctcccgatcgtcgaggggcccttccgggcctgcctcgagtccgggaaggcggaggactacgtgcacatggtcctcgagagcgggtcgtccacagtcaggggctccgtgttccggagcgctgtgtacctgcacgcgggggacgacccgtttgacctggtcaaggacgccatgagggtggtccgtgcccacctcggcacgttccgcctcatggaggagaagacgccgccgccgatcgtcgacaagttcgggtggtgcacgtgggacgcgttctacctcaaggtgcacccggagggggtgtgggagggcgtgcggcggctcgccgacggcgggtgcccgccggggctggtgctgatcgacgacggctggcagtcgatctgccacgacgacgacgacctgggcagcggcgccgaggggatgaaccgcacgtcggccggcgagcagatgccgtgcaggctgatcaagttccaggagaactacaagttcagggagtacaagggcggcatgggcggcttcgtgagggagatgaaggcggcgttcccgacggtggagcaggtgtacgtgtggcacgcgctgtgcgggtactggggcggcctccgccccggcgcgccgggcttgccgccggcgaaggtcgtcgcgccgaggctctcgccgggcttgcagcgcaccatggaggacctcgccgtcgacaagatcgtcaacaacggcgtcgggctcgtcgacccgcgccgcgcgcgggagctctacgaggggctccactcccacctccaggcctccggcatcgacggtgtcaaggtcgacgtcatccatgtaagtctcccaactacttttgtgcactccgtttactactagatcgtgtagaggagctcaaagcggcggtgcacgtggcgaggcagagcaaagcttgttcgtgttctcgaggtttcctgattaaccggatgaaacgggaagctgctagtttgtgatattcttgttctacctaagatggattttgttagtaaaatttggtcttgattgtattaagtaatatgcataatagtcatcacatgattgatatctcgtcactgctcgtaacttcagccttttagcatgtcaggtaaagatcgctttttatgcctgaaattgcatcatttttcagtcttcgattcctgaaaatgattggattgcaaatttagtacggtcatgaattcttatttcagctattaaaatctgcacgtcaattcattaggtagcccttttctactgtcgatagtcagcgacctgaagagcagggaaatccacatacatttgacatctcgacaccacgttttccatctcgcagcaccacacatcaatccacttggaaccagaaaaaaacattttttttcgtcattatttattttattgatctttaattagtacatgaaagacacgtagattttgacagaattggacgggaggggaacagtaagaaacatcaattaaggtggttaggaattaatcattaggcacgacaaagcggaacgattacgatcaattaattatttagtttaaaaatcttaaaaataattaggctgtgtttagttcagcgcaaagtttggattttggttaaaatcaaagataatgcgactgaaagattttggttaaaatcggagataatgcgactgaaagattgtgtgttgttgcagctgctggagatggtgtgcgaggagtacggcggtcgggtggagctcgcgaaggcctacttcgctgggctgacggagtcggtgcggcgccacttcaacggcaacggcgtgatcgcgagcatggagcactgcaacgacttcatgctgctgggcacggaggcggtggcgctgggccgcgtcggcgacgacttctggtgcaccgacccctccggcgaccccgacggcaccttctggctgcagggctgccacatggtgcactgcgcctacaactctctgtggatgggcgccttcatccacccggactgggacatgttccagtccacccacccctgcgccgccttccacgccgcctcccgcgccg

SEQ ID NO: 14304 - DNA, 1166 bp, Oryza sativa
tgaggatgatggcattgcctacacattgcaccagagagttcttgagcttgaggatgagctcaacaccgtgaaccagaaactgcacgacgcaaatgaaaaacttgaggttctggaagagaagagcttgaggtgccattgtgattctaaagaaaatggaaacggtgctgatcaaagtgcaataaatgagaagctacagtcttcacaagaggagattaacaatatcaaaaacagccttgaagttttgtcggaagagcactctaggctgttgggacagaacaagaaactggaggctgaaattgtcaatctgaaggaagaaattgcttcagatagacagcaatatgaagagaagctctctcgtagtgatgctgaaattgacaagtgcaggcaagaacttgctgatgcttctgagaagttgctgcaagagaagttgagcaacagttcggtgacagctgagctgcaagaaacgattgaaagcatcaggatcaaacttgaagaagtttctgaggagaaattacttgttgagaacaagtttaagcagctggaggaagcaaactctgaagctgaaaagtacaaccaagaactgtcacatgctaccgagaagctttcagaggagaagttcagacacgaggctgagattcttgcattgaatcaggccattgaaaatctgaaatccaaactggagagcattgctaaagagaaatcgttgcttaaatcatggtttgctgacctagagcaagtcgtggagcgaggaatgagaattttccccgaatagccggaattccgtcagaaaaaatcatagcttgcatttagcgaattagaacttttttttcttcttctaatacaccatgatacacacttgagaagtcctaccatgcatcagcattgtacttttcctgtctgattcttttccttgctgaggcgatgcatggtggtgatgtgctgattgcctgcgagtcttttgcgcggaacgtatttccctcggcaataaaatggttctaaatccatgtaacttgtatatgagcaagcaaaagcgatcatggttgctagaatagtgctttagcacagaccaaagtacaaggatacagtcttatactaatatgctttatccagtgacatgtcagattataatccgctcaagccaataccctgttctgtttagctcatca

SEQ ID NO: 14305 - DNA, 1542 bp, Oryza sativa
aaattatcagtgagcccattgatactcaaaccgagaaaattatcagtgaccccattgaagcgcaaagtgagaaaattatcagtgagcccattgatgctcaaaccgagaaaattatcagtgagcccattgaagcgcaaagtgagaaaattatcagtgagcccattgatactcaaaccgagaaaattatcagtgaccccattgatactcaaagtgagaaaattatcagtgagcccattgatactcaaaccgaggaaattatcagtgaccccattgatactcaaagtgagatgttggataattttcaagatgacactggaagggaaatgcacaccagggaggtcctttcccatgttatttttgaaacccatgctggtgagacaaacattaccattggtaagagtgaggagatttcacagtttgtcactgtaaaaacatgccaagattgttctgatgcaaattcacctgtttatgaaactgcaggtttgtcaagtgaaatgcatgacatctcttcaattacttctgctcaagatgcatgccaagagaaagtggtcattgtcagcagctatgagactgtggagacctcatataatgtgcctgatattttggttgacaaagtttgtcatgctgttggtaacccactggatgattctttacagcccaaagagcagtcgggagtctccattgaggaaatagaacatgtaagttttgaggacaaaccactgtcatattatggtgcttccagcaatattgaagacatgactaagctgggtattcaagaccaacaggtgccagtctttgaggattccggttcccaaaactcccaagaatttgttccagacaaggatatttgtgtggatactgttgttaatgatcgtagtgcccatatagtaaatgatttagcttgcaatcatgattttgtttttcctgctgcttcttccagtgttgaagagatatcaaattatgtgcctgataatcatcttcatgatgtaacaaaggacttcattgtggaaaataaaacatgcaatggagagcttaacatttcccttgtccaaacgtcaacaacgggagatgagaccacagaatgcatttctccatcagctaatattcctaataaagtagaactgcaaggttcacagattatttctgatctttctagtttgagaaaggttgaagcagaaagcaccacactagaagatactgaaagcagatctagttctgctagtggagtcgaaattaagcttgtgcctgaggctatatacgagccaagggaagaagcagaagcagttgtttcattctcagagttcgtagaagaaattcaatttcagtttagtgacagtgaaagctttgctgatcgaaagaccacagatgatgctgcatctactaaagaggcaggtgcagtagaacatgatgaatctgattgtgacacagaacaacagggagggaataatacaggtcttggaaataacctggaaaactgttctgattcatcaaggcctgagactatccctgttcctattccaggaagtgagtttcactcagatg

SEQ ID NO: 14306 - DNA, 5327 bp, Oryza sativa
tattatagagaaaagttaacaatagctccaacattttggaaaattttctttgaatctatctcttatttaacttttgtgtttttcctttagtctatttaaaatattgtttctattttttcttgtgttttatattttttctgttctgcacttgttttctagtaaaaatcccatgtttttcttgttactccgtgttctcaattatatgtttcgaaggatcaaagaatctttagataaaccttttttaggaatggcccctcggatcggtatcagagccattggcatcaacaaatagcgagtcattatcatagtgaagtagaacctctgtcctatggatggttgactatgtggtcagacagttcagttagagcgccagtggcgttgagatggaggtccgtcctttaatataataatctaggatcagaggacttcatcgtttcgtttattgacggaataagcgaaacagtatatttgcaaacgaaaaataatttataaataagaaataagtatatttgtacgtataagaaataagttgtcaaaagtttatttataaaataaacttttatagaagattcaaatgcgcaaatattgccagcatttttgagccctgaactatctgggtttccctaacttgacatatattctcttttggaacagacaataagttttatatagctgtagaaacgaaaaggatgtgacaatctctgcccaaaatgtctcgtgtgtgtgcatgcgcgttctccctgttcccgacagggtgagagcagcatagtcactgcttgcaaacaccaatcaataattctactgcccaaacataaaaccaagccaaagattcgccaagatgttgtacagaattattcacaggtacattcaactgtacacatggccggatgatatttacaatgtcggacagtttcgttgtaccggtgggtatctgtaggatcgatgtgcacaccggcttaaaaatgttaaatttgttcgaatttagaaaataaagtaagattcacgtaaatctgttgaaatttgaaatttccaacgtataagattggaccttttcaaaagtggattttctatatagtaacaattcgacggaaaattgagggagaaatctatcgagtttttaacggttggatccgcgctgagatccatgttcaccgttggatggcgcatgtggggactcatcccgtgattggtaggatctcgtgggcgtactttcgtactggattaccgtgggttttgtatatttagaaaattgagagaaaaatatatcaacatttaaaattttggatgcgttcatattcatcctcaccgttggatggtgcacctggagactcatcccatgattcggaggatcttgtgagtgtgctttcccactggattatcataggttctgtatatgagtatattttccatccttgagaaggtatcatgaggcaccaatctaatctaatcgttgatttagcaggggtatgatcggactaacaaaaagaggtgtcctttcttcgtcgtccatgcccatccagcgtcgtcgtcgccaatcgaggccaccgccgccgtcgtgcatccagtcggtcaccggccgccgccgtcgcctatccagcccgctgtcatcgtcgccgttgttgccgtcgcccatccaattggccgcctgccgccgccgccgtcgtgcatctagccggccgcccgcgtcgcgcgtccagccgccatgcatccagccacccccgccgccgccaccgccgcgcgtccgtccgccctccaccgtccccctcgagcttgccgcgtctagccccctccagccgccgcgcatcccgccgccgcgcgtccgtctgctcgccgccgtccccctcgagcccaccgcgtccagccccatccagccgccgccgctgccatcacgcgtccaagcgcccgccgccgtccccctcaagccagccgccacgccgccgctgtgctctctcgacgttttttctttctatcgtgaaacagtaaaggacagaaataccctcccacccatagcaccacttcaatgaggaggtgcaggaccatgaggtacggacgatttctgaccgttggatgatgccagatcaatggtcaggatttggtactgcacaacctaaaggacagtaaaaaatctctttatatatagttgtacgtaacttgcagctaaattatattgtaattatatactatttacattacaatggtattataattatattgtagttatatttggtataattttaaaaaactttatgtttatcagctcctttttttaaaaaaatatccagattgtgtaccagataattttatgtttcaccaaagcaagtttatctagccatcgtttctctctcgttgagcaggcccgcacggcgcggcgccactcgcgcctcccacctgccacgtaagccgcagactaacggcgttcggccgtcaactcctcacggacagggatcagcgacagcgagcgtggagctacataacgccgtcgtcgtcgtcgccgtcgccgctcgctcgcgctgcgcggcgcggtgacgtgacgagctccgatttgtcggccgcggacgaacaccttgtcgtcgcaactcgcaagtacatataaacctcactgtcacacccacacttgccgctgctgtctgcagtagctcacctacttccaccttagctcaccctctccaccgtcgcagcgacatcgacggcgagctcgagctcgagctctggctggttcttgttggcaagctagctagctagctcagctctcgccatgggcaagtacctcaggagcagctgcaagcagcagcagcagccgtcgtcgccggccgccgtggcgagcgtcgccgccgcggcggtgtcgtcgtactcgtacctgacgctgcggagcgggcggcgcgtgccggcggcggcggcggcggcgggaggcagcgcctgcaggcggcgtcaccgccgcggaggacgccgcgggtgcgccaagaacggcgccgggagcgcgcgcgcgtgcggggcgaggtcgccgacgtcctcggcgtcgtccgggcagcggcggaggtgtgaggcggtggagtgctctcacggcggtgggcgggcggagctctcgcggtcgccgccgctggggaattccgtcgtcgtcgtctccggtgacgtcgtcagtggagaaaggtttgggtttaaaaacttatataatcatgtcaatttgacgccctctcctgtcatcctgtgtagtcactaataagcacaaatcttatatttcaaaattaaaccatacgtaagtcgaaaattttattttacaaaaggtaattcgtgacaattttttttctagcttagtaattaattacactgtcagtctgtcacacactcacactcacactaattaactcttgcttctactctctccaattcagaaagtctttgaagccaaattcttgttcccgcgaagtggcggcggaacacgccggcgagcacaagcacaaccctgcagccgccgcggcggccggccgccggccaccgctgtcgccgccggaagcggagatcgaggcgttcttcgccgccgcggagctcgccgagcgccggcgattcgcagagaagtacgtatacacacacacataatcactcatctctctctagcttgcaagcttaaagctaagctaaatcaagctaattagttaattaattaatctgcttaatttgcaaactaattacactgcgagctgccggttttgcaggtacaattacgacattgccctcgaccgcccgttgcaaggccgctacgagtgggagccagtgagcacgtgaaagggaggggtagaagtgtcaactcaactcacacccatgtctgcaactcacaagtgatgcaaagctagcttaatcatcagcagctaattatctgggagaggctggggatcgagttagtgaccttgtttctcctgctaattctcaattagggaattaattaattactcctcaatcctcatctccacctgttgtcagttggatctcactaccatatatatctcagctctgtcaattaatcttttgtatagttggtaggaaataatcaaggataatccaggtgatttggaggatgcttctgatgagctcccctcttgctaattactaatatgtatcttccacataatttcgcctaatttactgtttattactacttattaagccccttcaaaaataagtatttcatccgtttcacaaggtaagactttctagcattgtacacatttatttatatattaatgaatttagacatatgtatgtatttagattcattaatatctatatgtatatgtgcaatgctagattgtcttatattgtgaaacggagagagtaattgactttttcttacctatattctgatgatatgtagtagagttgatatttaattacacgtaccctagtgaggttagaaacagtagttggttgttggagtgaactgaaaatgcagacagtgccaaattttgatgtggccaaggatgtcactgacatgtgaaggcagttttggcctgaaagaagagcatgcaaaagtcagatcgagtacgtattcgagtgtaatttgttgttttgcaaaaatttgtgcgaggcttctttgcctgatatgcacgcatgacgatcacaaaatggctgcatgtacgtatgtatatacgtacaagcaaacacttgcacaggcatgtacgtatgtatatgtagctttgctgggtttgtattgaccttttgtgagtaaattcacatgaagcctttcaaattctctctctctctaacttttgttttcgttatagccctttctttttattctctctctattccatccagcacctgttgttgtaggagttaggctttatttgagtgagaaaaaagctattttcctatatggtcatatggaaaagattcaaaagtacatttatgctatattttcctagatggaaaaagcttcaaaagttcatttatgctattttcctagatggaaaagattcaaaagtacatttatgcaaggaggacctctaaaaggagaattaattccatgcttttccactcctctctagccccaatttgcttttggtcctaaaagaaaactctagactgctttcttttcataacctagccatgcatctatatatgcactggatttcatcttataattactctcttttttttacataattcatcttttactttgcttccctattttcctatgaattaagcagaaaatgtggatatacaaccctttcttacgcaataattaagtcaaagtgaggattaaacactttcggttcggtgaaccgatagttatatattatcgttcacccataattattttaaaattttcagac

SEQ ID NO: 14307 - DNA, 14394 bp, Oryza sativa
  unsure (1)..(14394): unsure at all n locations
gagccgtcttcccttctgtttttgtttgctgtatctgagggagaagatgtgatggtagattgtgtgagaattaggggtttctctctaagggtaggttctagatttgcaggatgagttgggcgtaaatctcaagtgtgaggtttttggtggcgaaatttcaactatagatctataaattttggatggggttcctcgagaggtttttggcctgtatatagctagctctagcgagatgtgatgtgcgacttgctgtagcgagatgcgtgctgtcttttcatgtgtaactggtgttaatgatgctgatcctgctgctatgtactgtagttggggtcaactgcgatcgggttgaagaccaaggatggtgttgtccttgctgtagagaaacgtgtgacctcgccactgctggtaattgcatcttatcctatttcttctatcaggctggtgcaattgttcaatagcacctatgattgctcactgcattttgacaatttagttcaagatttgactgaatttatctagctaatgtttgaattatcgatttcttaccagttcaggcaagataaatcttatccttaggtagacctgtattcttacatgattccatcaggatgatcctgtaaaacatggatgttgctggtgttgttcctcatgatcttgctgctttcatttttcacaactacatgctttttgtaatctccaacaaacaaaaagatgtagattagataatgctgtttagagtaattctgatggagtctcaatcttgttgaattttatgatttaataatatgatcagtttttctggcatgtgttatttttatttatgcaaatgccaacaaaacaaggacattcagtcaaacaaacacagaaatccaagtatttcacatgtcaaagcctggaacctaatggttcatggatatttttatttaaaaataaacaaggaatatattgcaactgaactctgaagtgctcatataggagttctttttcggttaatgcataaacaattcttttctttcagcaaatagcccagtttgtttttcttgtacgtcagctttatgggttgtgacaatctgacaatttattatatcttactctctgcgtactgtagtactttgtatgtcagtgctgttgttttttttgtttaaatgatatcatgtagaagtttttttacaccctataggcctattgcccatatatgtgttatgttaattaagaagttacgtaatacctctgcataatttgtaaaagttaactacttgattctgacagaacttgatgttagactcccatttcactcccaagtttctagtttttgtgtgtgatgccactcaagttatcttttctatgattatgcaggaaccaagcagtgtggagaaaatcatggaaattgacgagcacataggctgtgccatgagtggccttattgctgatgctagaacattggttgagcatgctcgtgttgaaacccaggtacgttcttatgcaattttctacatgttttacatattatggtcattgtatgttaatttcacctaatgtgtttataatcagaatcataggttctcatatggggagccaatgacagtagaatctactacacaagctatctgtgacttagctctgcgttttggtgaaggtgatgaagagtcgatggtgagtctcatttgcatgaaaacaaatattttgtgaaggatcaagattcaaaaattaattagcaggggagcccttttttcacttttgcattttgataaataggattaacaccataactttgcatcagtgtgttatctttggaggaaactacgcatctagaaattttgggtgtttcaaataatcccatgatggccactaatactgaaaattatgaatagataggctgtaaattaatcattttttctgcattttgttttgtcttttattatgtgactattgtcttattaaggcttagtggacatatgaattagttttctaaggagtaattgctaaaatacctgactataacaattttgcttcaccccactgggccactgcaagttactttgctgcattcttttcacccttttgtcgacatttcttgttgccaagcttaaactaatatacttgtttgttttgtgcagtcacgaccatttggtgtctctctccttattgctggtcatgatgagaatggacccagcttgtaagtatttatccctttttaccaaaggaatttccatacattagcgatatctagatacctcttctgtggttctgccctatgcgaccatttgttcccacttcccagatcgcatgaactaacctttatcgctccaagttattttgagtatttgtcgaggaaataactctataacaaaatggtcaggacaatagccattttcattcatcttgttttgttccattgctcttaaattaagttgatgtgagtatcatcaaatttaactttgatggtttctagaatagctagttatttttcgcttgaagattcaacaagtttttcaaaactcagccacagtcggcatttgaaaacctggtatatcaaagaagagttgtccaaatgttgcccatatgaggttctatagactatatacattgatacttttatttccagtttcttcataaggagcagtgtnatgtcatttttttcctgaatccagataagtgataggtattatgtatttcattgtagctgaggttctttattagtggtaagtagtggtaatgctgccatcatggcatctctatccagagacaggctcatttttcccgtcatgattgctttacaaggccaactagactctccttgtaccaatctgtggatgaattcctatgttttgcaggtactacactgacccatcaggaacctttggcagtgcaatgccaaggcaattggatcaggtcctgaagcacctgatagcttgttacaggagcagtacaataaggtattaactgttaaactaatcacagttgtgaagaacaatatcaaataatgatggactataaggaggtgttaaactaatcacagttgtgaagaacaagatcaaataatgatagaatataaggaggtgcaaaccttacaaggcactttggtttgagtgccacatcaacatgaaaactttcccaatataatcttaagaggactatgttttgtgcgagccatagtaatagaactatttaacaaggttgaatccaaatctaaagttgcagtcagacctatatggctatatgacatatggcatcaaactgatcaaagccaactacagttgctttcatgacagctgagaactgaagccttaattaatttctctatccaggtagcgcccaaataaatcagttactacacctgatcaaccaaccaccaacaaacagtgtgcacgagccgccagccagaaatggaagtcccaagtctatgatccctaagaacactaactacaaagcccctgcccacgtatatacatcaggcaaaaaatcccacaatcagatgcgacgacgaacagggggatgaacacacacacacacttcaggcagaatcgcaggcaaaatcaacgatgaacttggaaggaacagggggatgaacacacgtatgcggatacccaccccacgttacacacacatcaggcagaatcacaggcaaaatcaacgatgaacttggaagggtagggtctgcgcttgtcctgacgaggccaggccctctcacgcctcccggagtgcgcgtcgtcgaggactccgacggtggcgccaccatgatttgggttcttgctgatcggcccccccaggtactcgaagctcatctcgtcgccggcgtgggctcgcctcgccgccgctcggtggggtggatttgggggaaacgggagagagagagagaccaatgcgatgcgtgtgtgcgctcctcggttgaatggatttcactttttgaggtttttcctgccattaaaaaaagatggtgcctacctctttgccacaaaaaagtttgagcctccctctatgccatcgtccaactttatcgcgtcctccacaccaactttattgcgccctccacaccattccgtcactattctgtttggttttaactgtttagcagctctgacatatgggcccgagcaggaaaaatgttgctcttgccctttcactctctcttctctctcgattcccctctctccatggcatccgcgtctgcgtcactcccagccggcacccagccgagcgtggccgagctgctggacgcccgcgccgccacgccggcctccccttccctcgtcaccgccgtctccgccgagtcgagcggacagcgccaccggccacccctccaactggcgcccgaccacctcctttgcccagcggcgacggcggcgaggtggaacggcgcgccggcggtcgttagcgcggccttctccgtgtcgtctccgccgctcctgcatctcacccatgtctgcatgccaatggcagcttgtgagcttcacacagacacacactgtggtcaggagctccgatacctcggccatggccgccccggtctcatctcgattcactatctggttcacggcgagtaatccctgcacctctcagtgaacacaagaaatgttaatcagttcactaatctaatcactcctgctaattgctgtagctaattatttcttgatcttagttgcagatatatcgagagagagagagagattgcctgaagagcgttgcagaggttggtgacctctccggagccgcggagccgcagcgcggtgctgacgagctcaagcacggcgaggggggagctcgcgtcgtcggggtcaaggatggggaggaagaggctgccctggatgtcgtagatgagcgcatagctaatgcgggcgtactcgccgctgccgtagcactgcacgttgggcgtccactccagcgtccccgtgtcaaacgccctagcgggaagcccctgcttgtcggcggcggcggcgccgccgacggggaagacgcacgtgagggagacggtcctgtactggaacaggcggtggcactgcgacgccaggacgaacggctgcccccgcgtggcaagcacgcgccgggcgccatccctcaccggcgcccacacctggaccatccacccgccacctttgccggccagtgaaaaaaaaaccgccaccccaccttactcattataaattttacaaattaccacttgagcttcttaatattaaaaacaatcaaatctaaatgacaggcacataaaataaagttaaataaagttaaggctacaggaataacatgtttcatgaacaaatatttttatttgttttagaccatattataatatactgtctccttctctaaatatatgacgttggttagttcaattttgaactaacttacatcatacaaaaagacatggagggagtatatttttatctgtagcaaagcacggacatttagctagtcaagacaaaatctctacacataaataaaaagaatattggtatacatttagctgtgcaggaactatctagatatttctatgttatttacaatgtctttgcaattcattgaattgtctacttgtatgtccatgcattttcttgttcattagatgtcggatatgcattcgatatgcaagatttaagaatcataattattttttttaaaaaaagttaaaatcttatcataaatatgcgtgcaattggctgcacatagctggtatgcaatttataggttcaaccatggttgtgtccaaaacaattaagaggtcaaatgtcacactaaaactcaatgaaagtggacagataaatctacgaatttaagttatcatttagcagatccacccatgcatcagatcgaagcagagatgatcgatcgcggcgtttcttcatccaagcgcagccgagtagccgatcgatccgttgcactagtcagcgtgcttcgtcccttggtcgatttcaggcgacggtgccagctgctaattaattgctactcccttcctgctatcggtgccacgccatgctgatggcgacgaagccgacgatgcactattttctgggatagatactactttttccacttttttttcaaacaactatactccttttccatcgatgataaaagtagtatcataacatactgcttttgttttgaatatatatatactatcttttttttcggggcaatatgtatacatcaatttcatcaagtatacttcattttatggttcggtatatataccattcggtgaaaccaagtgatatacatatatactattttcttaattatttaataagtaccactcggtgaagtagtatgtacttcatcaattattttgctaataatctaataaaaggtacatgcatacataccttctatcgacgatggatactgcaattaaatagtatataccgcttcaatgagggtttcagtatatgctggatacttttaaaaaacagtacatactcattaaccgattgatttagtatatactgaatactaaaaaaaacagtacatacttcttaaccgagtgagttagtatatactggatacatgataaaaacagtacatacacctaattaaccgatcgagtatatactggatacttgaaaacactctacatactcctagtaccatgtactgaaaaattagtatatactactagtttttgaaaagagtacatacttcgatctactaactaaataagaaaataatatatcttaaattttgaatatggccattaattcctcacggaccgttgtgcatgcatgcaaagaattgaaaagaaaaacaaaagaataccagccgcatatgcagaattttgaaaataaaatgaacattaccttttttttgtttctaactcaactatccattatcaactaatggatatccaacaaaaaagagggagtacatacacctgggtgtacaaaacagtcgtcctataaatattggcttatctggatacatatggttattcaacaaccaagcctactcagctgcatacatggacatcatcatataggtggttgatagctacagatagatagtcgacagttaattaagtaaactaacagtagatcactaagctaagtgataaaacgtcaccctacatgctcagttggaggcaaggttaaatccctcatcaataattagatcggtcatctcggcgtcatccagaaagataccctcagctttggagacggcgactctcatctccaggttgttgtcgacgacggcgtagccgcccttgccatggcggacgcgccgtatgatcgcctggcactccgcgagcttgtcctcgcgcttcttgttgtacctgtccatctcccgcacgctcttcctgagcaacttctccgcctccgacgggttcgggtcgccgccgccgccgccgtccttgaggaggtcggcgacgtggggcagctccctccgctccagggagaggatcttgtcgaccagcttcttcgacagcgcgagcttcccgcgcgggaccaggatcgcctcctcgccgtcgaccggcaccagcgtaccgccgcttcgctttgagcctctcgccgccatagctttgtcggcggcgaactgctccacgcaatgggcggcggtgcagggcatcaacgcgatcttctcgccggcatcctccgccgccgccgccgccagcgcgacgacgcaacgcttgaggtaagcccgcctgtcggccatcggtggatggatgatttcgcgggaaatctcgatgattttgcagctaaaaattggggaattcgaaaccctaacgattcgaggatgtgtggggggaagacgaagggtgtggtttatcaaggcggaggcggatcctggccgtccgtttccaaagccgaatccttctttctctgctagtttcatcgcggccgtccgtctccgaagtcgaatccctcctcggaacgggccagatgaggcagcccctacgtgagattatgtgggctgcaaactgggccaggcccaataggggaaccagcaacgaaaagcgaaggaactcgtcacagtcgtctcttctactactactactattttggagaagttgggatggttttcccaaattttcttttgctttttcgatctaaactatcgatgtgtttatttgaactagcaaaatacatgtatgttgttacggaattaaaaatgacatcagcatgatgtagagatgaaatctattttaaattttagagcttaattttacaattaattagaggtttttgctcaccaaaatttccctcaatttattgttaacttgcaaggatgatcatggttgaaagctccagggtctacccgtgactttcattgttctaccatacattttagtttggacgagggatggacggtgggcctacatgtcagaattttggaagttggtggtgggtggtgccatggtggcagattcaacactcgctaccaccactaccttttaaaaatgataatagattttgatgcttgaatgggcaacagcagaagcagcagcgggcacatattggggagattcagaaaatgcacctgcgcgatctgatgcatgatgttgagcgctgcaaagcaatgacagtgtaagggttgaattttctctgctgttgcattgcatgtgttggtttctgctttcgtttctcatgttcttgttggttgacagggagtatgaaggcatacatgtggattgctcgaggcaagatgacctcactctacctgcccctgcagcaagccgttgattgaatcactgatgtacaagctgccagatccatgagggaagatgaacagcggagggatggaggaggaagacaatgggcagtttggtccaaaattttagaaagtgtgttgaaagagtaagtacactggtggagaagatgtttttactcccggttcgtaacctgtagacccggtttttcaaccgggactaaagatcagatagtgatctttagtcccgggtgcaaaaaccgggagtaaaaatccatactaaagagactagatccgattgctactttattcttttcttttcttcattgtttttaatatattgattcactctatcctatcccaaaatcccaaatcaatcatccccgaatagtctccaaattctcaaatcgatatctccaaatacatcacaaaatcttaaaaaaattacatcacaacttctacaaaattcatcacatattcacatcacacacaaatctcaaatccaaatcacagattctacaaaaaaaaagaatagaaaaagacgaacagccaccggcgctacgcccgcggccgccggcgtgccgcccgccgccgcgccgcgccggccggccagccctccgcgcctcgccgttgcagagagagatggggaggagggagaagggaggagggagaggaggagaggagggaggagggagaggaagagataagggtgtgactgtgtgaggagaggagttaaagaagaggaggagattgtatccgatccgcgtgcatccactctacttatatcgttcttttttcccggttggtgttaacaaccgaggctataagtagatctttagtcccggttggtaacatcaaccgggagtaaagcttatatcgatcttttttcccggttggtgttaacaaccgagactataaatagatatttagtcccggttggtaacatcaaccagtactaaatataaaaaaaatacctctgagctttcaaacctggactaaagatgtttttagtcccggtttttaatacaaccgggactattgtgacatctggtcgactgaccaaagatggtttctccacaagtggtagtggcatacatcgaataacgttataattatagtggcacgagttcaaataggtgaatagtatgtgtatctttcaaaattatgaaaataataatggcatggatccaattaactctttctattttgtgtctaggttaccacaccagtataggtgggacaaattcaacgtgccacatgagcaaataccaaatagccaagggaattgttttgctcgattttaatagttgaatatgtcgatatacccgactttgcggttgaaggatacgaataatatccgaattatatttgattgaggaagtcaaactacaccttttcctttcgtggctgattcccctattgggcctggcccagttggaagccgttttctcatgttgggccctacctcagctgtccccatggataagagggattcgacttcggagacggacgggcgcgatcatatagaagtatggaacttagtatggttcaggttttgtaaaccaattgttgctgataaatcatcgaaatctcccaagaattcatcgaaatctcccgagaaatcatccatccatcctctacgttcccgatccaccgatggacctggacctggaccgcaagcaaatcaagcgttgcgtcgtcgccttcctgccgccgccggaggaggaggatgccggtgaggagatccgtgtggtgccgtgccctgccgctgctgcggaggaggagaggcggcgatcttccaagaggaaggggaagaggtgcgcctccaatggaagcaagcctgcggggacgctggtgccggccgacggcgaggagatgatcctcgtcccgcccgggaagctcgcgctgtccaagaatctggtcgacaagatcctctccctggagaggatggagctgccccacgtcgccgacatcgtcgacgacggcaacccgaacccgtcagaggcggacaaggcgctcaggaggtgcgtgctcgacctggacagggacaacaagaggcaccaggacaagctcgccgcgtgccaggcgatcatacggagcgttcgccatggcaagggctacgccgtcgtcgacaaccgcctcgacttcagggtcgccgtgtgcagggccgagggcgtcttcctgctcccctgccatgtcgccgatcttatccccgtgggatttgatcttgtctccaattgagtactccctccatcataaaatttttatagcaatcttataacggatgttctactacaacaaatcctagtatattcagattcgttgtactggatggatacattctaggacaataaatcggttgccatattttgagacggagagataaaggtattttgggtgaacgtgacatattctaagacaataaagctagacaaattctcttaccagatttattgtactaatgtgacatatgcacctaaaatttcttataattttcacaatgaatgcaactaaatgtatttccatttactagtacatggtcttcttaagtaccacgatttgttaacataacatggcacccatgacaaacaatgggaagaaatcccacatcatgaagtaaacaaacacttttggccctgttttttttctccaataaaaattagattaaattttagatacttgtggcacgcttttcaaattgttaaacagtgcgtttcgtgtaaaactttatatatgaaagttgttctaaaatataagattaatccatttatcaagtttgtaataattaaaactcaatagatcatacgttattaccatatcgttttgcgtgacacttaatcttcatctccaggagatttaaacatcatcagtactgtcttaggcttgatagaaaatatactacttcctcctttgtgttccttcgatccaaagtgtaaacatttttatatgttttcacataattaagaaattagcactagtaaaaaactatcacaggtgccggttaggaactatgatcggcaccaacattagcaacctgtattaaaaataaaaccggcatctataggtttgcacaagcaaaaaaaaaaagaaaaaaagaaaaaaaagagccggctcgaatcgagccggaactcacaatcatcgtcactgcgccatgccccacatcgagttgtttgaaatccccaattccccacatatcacagattacagatcgaaacatattcaacaaccaaatcatccacaaatcacataaacatataaaaatttctacaaatcataaaaaaaaatccctcgggcactgccgcctgccaccgccgcccatcgcctcccctcccaccggatctgatggagggaaatgtgcggccagcgccgttgccgtccccgaggtccgctgtctcccctccagtcggatctagcagaggggagggcgcgaccaccgtctggcagtccctgaggtccaccacctctcctccagccggatccggccgaggggagggtgctcatgttgccacaggccacccgcccgcattgccgccacctcgtcctattgctcccgccgaaactaggaaaaatagaataggaattgaatgagaaaaggtagagaaagcttctagaagtgatagtgaagaggaacatgagagagtaagggagggatagagattgacgaggttcaaccgaaccaagtcgccgccgtcgtggctgaagctgtcgatgcctgatcttctgttcgatacctccctaggattggtgccttttcttatatatgatgtaccatggacttgcttgagagcttgctcttgggttgcctcatgggctgggccaatcgatcatcaggaagcttagtgggttcttaatgctacagtgtccagattatcttcaatcttgttcgatttccctttaagtgagctgcactatcacgctgctgattttcattactttcatgctaaatgaataatgcaataagaaattacgaactgggagaactactgagatcatcagaactaatttactactccctccgtcccaatatgcaacaacctaggatgggattagaccattagaccatcctaggacttcgaagtcctaggatgggtccagattcaaagtcctaggatgggtcccatcctaggttgctatatattgggacggagagagtaaaacattatctatagcaagtgttaccttacatgtaattcaaaggctgacatcgtttgaaggagtaccgcactaaaacagtgacactttggaatgccccaaatgtgcattcccattcatttataaaagaggtagttgtaacggagtgtgagggtggttgcaagtaagataatttttttataaaaaaatatgtggtgattaacagtataaatactacttagagaattgccaagatgcccgaaattcatcccaaaattctgtttttaagattcctaattatgtaaaagttgactcaataataaaaagtggaaccgtcctaaaatactaaacagaaaaaaaaatcgttattgggggccgatgcgacacgttttctcactaatagggagcgagaagaacaaggaagatgattttagtttctgggaagctggctatgagaaccatggaagccaactttttttactttaaaaacactgcagagccacccccacaaacctacatgtgccacaacttaatagcgataacgttggccacccaaacttttactccctccatcccactaggtgcacttgagaggagaaaaatgagagagattaaatgagagatgatatgaaacaggaggataattgagggtaagacgaagataaattagataaatttaaatggaatgtgattgatgtggtaagcactatgataaagctatatttatttcagaaaaaactattaaatatagaattgcacgaattgtacttagtggaacgaaggtactccctccgtcccaatatgtaacgatccgaaggtactcctaccatcctaatatataataatctagaataagattaaacccatcctagaactatgaatctgaacacaagacatacaccttatgtttgggacgtaggaagtagcaatgattagcaatgataagaactgtacacacataaaaaagtacgaaacagaggaatattggatcctggtattaagttattactacatccgttccaaaataagtgcagtcgtgggaatccgtgtccaacgtttgaccgtctgtcttatttgaaaaatttatgagaaaattaaaaaaacttagttgcataaagtactatatatgttttatcatataataacaataaaaatattaatcgtaaaaaaattttaaataagacgaacggtcaaacgtaaactgcacttattttagaacggaggaaggaggtgggacggaggaagtaatatatttagtcggctgacgtaaacaagtcgaatcgctttgctagtttcatcgcgaccgtcccctgtcgcccaaaccggccaactgaggaaggtccgacctgacacaacacaacgaattcgaattgggtcagggcgtcaggccaattggccaaacatgagacggaaagcgaactaacttgagacgcccgcttggcggcactaccagttattttctatatgtatactcctactttatattgtatcaaaaataaactatggttgggaagaaaccgaagatcaagatgactgtcgaaatgttgcaaccaaatcttggaaaggattgtcgttctctttttgatagtacatggtctcaacactgctgaaaacaagcaaatg

SEQ ID NO: 14308 - DNA, 1829 bp, Oryza sativa
gagaatctaaacccttttttaacgctgtctgtctccccttttatttggatccagtgaatgtgtgtgtttacctcacgatggatgtaccctgactgcgacacacatttggtcattttgggggaaacttgggagtactctgttgctggacacatgttattgctactcttcataactgtactgggtagcttaatgtcagaataacactaccttcttcttctgctgctgctcctgtaatgagcttccagcttgccagcagcttcagcagagcctgatcgaaatgccttgcagtgccaaaacgttatttacctgcagaaacaggaagtgatatcgacacatgaattcggttgggcctcgtcttcggccaacctggctagaaatttcatcagttcatagaagcaacgttcagttggcctttggaatcgaccatacttatcaccaacaataataataaataataaagtagataaaactcagctaacacgaaaagcatagtgcctacacttcacttctgaaaattcaggaactactcttcttatgaactatgaaggaaagaaaggagaaataaatatatggatgcaatatatggccagcatcgagcaccccaggccagcatttcgggatttggataaaacagttctcttcaatatgccaggctttcaaatgtcaagctgttataggatgtaaaaactgctcaaggcacgcacacataaaaatagcaattagctattgcagaaaccaccaatacttacgagaactcttggtcatagcctcataggtcacttggaacaatacagactatcagagtcgatgggatctgggaacagatggtaggataacagatagcaccctggaaggctggaacaatatcatggcacctttcatgtaaggaaatgcacagaaagagcgctataaaagtaagaggagcaagaatgccatggtattactattgtttcaaagtggaaaagtagtagtataattcttgtttcgaaacataattattcacaaaagcttggtacattctaattatgaccagcaataaggagcgactcccatgtcccaagcggtcttactgcatagatcattataatttcaaatgacaaacctagagcgccgataattcagttaacaaattgtctcatgaaaccttttggcattatcaaaaccatgaatagatttgacatcatccaagaaaagtgatcatggttttcaagtagtcacctaataccaaacccttccttcaaaacaggtttgtgctagggataacgaagtaacggacatggagcaaaagaagtctaatcacaaaagaagcctgtgataacgacaacagactggctccggaacaggttttaatcacaagcactacacctcatcagtgaaatgggcggggatagggacggcttttccaccaacttgtctcacatcttgctgatatgtccttgctgtcttcagcttggtctgcaggttctcccaggacttcgttagcttttttttgccagctccagcctcaataagatgatatctctgatagcggttttgcgcaatctcttcataaaacttgacaagttttgtgttcctctcagttaccagcgggtcattgctgatgcagtccttgggtatttcaaagacgacttgttcattaaactgttttagagagaaacaaaagcacgttaaagcaaataattaccagcaggaaaacataagaacaaaatacggttccagtaaatcttgattgacaacagtagatcagtcttagttacaaatatcaggtgataccgctagcattcttcctagttagcacacaaacacaagaccaattagaacatgtccca

SEQ ID NO: 14309 - DNA, 2221 bp, Oryza sativa
gccttcaattccattcgaacgaaacgaggagaagagagaggagagaggagagagaggggtttgtgtggctgcgagtgggccccatgtcgacgtcggcggcggcgtcggcggcggcggagcagcagcaggaggagggggagcacgggccgttccccatcgagcagctgcaggtactggctcgtcgtaaccctagcggagttcttgtgctgtgtcttctcttcttccgccccaaatggggggttttccaagggcgggtgtttcttggggattctgatccgcgtagtggtggggtggggggaggggggaatcgtgatgggttcttggagatttggtgtgtggtttaggttcttgcggtgttgtgggagattcttggtggaagaaccctaggttcttggaatcttggttcggtttcttgcccctggatggcgtcaaggtcgcgtctttcttggaattatcgccatttgtatgtgaaattgggacgggtttttcctggtatttttgttgtgtttgggcggattaggtgtttccgtggattcttgccggggaaagtgaaaccctatgttcctgattcgccccttctcccaaatgtgtcaagattcaagaacgagcatttcttggaatttccttttgtgtttgcggcttacgaaagaggggatattctcccagttctgtattgaagctggctatttagtttcttttttttttgcccttttttaggtataggaaacataatctttattaggggcatctaggtattcatggttcgttcttccccaaaatggattaaggttaggcttttctgaaatctgtgcagtttattgtggcgcggtcatgattcgtataagtccaaagagggggattcttgattaggcttttggggaggcgtttcttgggagttcataacttgccttttctccctgtatttggcagtaagacgatttttaattcactgtttagggcatgtgaagccagcatttaaaatgctaattctctcaatttgccatcatattttaaccgtaggctgtcctgtggattcttgtgttttcacttttggaacttgtttgcaaatcggtctggtggtaggctgtagcagcttgtattaattaatttattaattcctgaaagcctattatacgtatgatgtttcaggttgttcctttatgaataacatgtaaaaaaaagaggaaatcgttgtttgatcatagtactgttaatatggtaaataagttaagaatggatgcactcctattccttagtgatatactattttctttgcaatacaagtgacctgctgtacaaataatatctcatgatatttctcctcatcaatgatgcctagtagaattaaccattcttaatggtagttgcaattgcaagaataagaagtgccattatttcttgtattgttgtatgttcagtacttcagtgccatctaaaaagcttctgaggtgtagctagtgacaagctagtgtctgtttctatgtaaaaattatcatagtgatcgctcttctatcattaactcttgtgtgtaatttgtggttaaggcatctggaattgctgctctggatgtgaaaaagctcaaggattctggtctgtacacagtggagtctgtggcctatactccaaggaaagaccttttgcaaatcaaaggaattagtgaagccaaagttgacaagatagttgaagcaggcaagtaattatgaggctcagtacgactttgtatttcacactgcaaagttcctaactgtctaaaattttacagcatcgaagctagtcccattgggatttacaagtgcgagccaacttcatgcacaaaggctggagattattcaagttacaactggatctagagagcttgataagattttggatggtattgaactgttaactttcatggttttctttaatttcttcagaaatgtactgcttgtgatcattgagcaattctattttgaccaaacaggggggatagaaactggctctatcacagagatttatggtgaattccgatcagggaagactcagctgtgccacacgctgtgtgtcacatgtcaggtgacagcttattgatccaactcttatttcattgcgcacctgaatcctgttggtaagctaaattatgttaatgattgatattgcagcttccattggaccaaggtggtggtgaagggaaggctttgtacattgatgcagagggaacattcagaccacaaaggctgct

SEQ ID NO: 14310 - DNA, 1106 bp, Oryza sativa
atccttgcgcaggggccatgctaatcttctctgtatcgttccaattttatcggatgtcaccgaagtgacggcctggctgcagcgcgcgcggttataagctgcttatcttttctgttggctttcgatgtggtattaaacttgccccacagcgcgcccacggaaaccatcggatcaccatcccacggacccaagtagcaagctccacccgcgcgagcgtgcatgggccacctgcaccttctggtgcggcccaatgagctaacggcccattggtatacctgtttcggcccacaaacaagtccttgtggaaatgtggagctttcctctgtaactttgaaatcctgaattcttcgatttttttttatccccaatgactctatgagaattggaatctccattcaagtgtccagttctgtgtttgggatggtttttcgccctaagttccgtttattttccattggagcaattgaattattcttctgggatagtgattatcccagttccaggttggttcatcattcatcaaattgacaacacaacaacattctaaaatatattttatcttttattttttttaaagcatgagctgctatttcacttaatcagtaggcatgtaccaagcaatccaaaaggcagtgagtagagcaacagaaataataaagcactcatgtacatatgcgcagttcctgagcaatagtaacatattatacttcattactttatctacaaaaatatctcgcattttattcaatggatagcaggtatctcaaattttcaccagcatccatcaaacaatgttctctcatagtatacactggtcagctatatgcatcagggtactccagttgaacatttttacaattttgagcgccgtatgcattttatcggattgaaagtgccatgctgacgagcaatagaatttatatgcctcccgtttattgatgcagaaggcttgaagtcccagccttctacgttcttggggacgcatacatcgtaaagcatctgacccaacactccatgggggttgttaatgctttccacactgggcatgttgaacaactccggtttcggctcttcgttgctgctttcatgatactccatggaactcg

SEQ ID NO: 14311 - DNA, 650 bp, Oryza sativa
gaggagtgggaacttcttctaacgaacgcagccaacttgtgcaaacatatgtggcaaggaggaatggtcatcttcttgagatctaaaggattccacgaagacaggataattcgcttatcatcaggattattcttgatcttgtcaatcacatccattagctgatcgaagacttgaacagtatagtcagcatgcatgctagttatctgttacatacagaaatagttagtcattaatcctgagagatccagatggagagcacatcaataagtacatagggaggagagaaaaacttactcagcaccaaagtatcaccattgaaatccataaactggacctaaatcaccttcctccctatgtgctaaatcaacactagaatgcagtaaaaattttgccaaatggatcagagcacaagaatcaagaacaccaatatccattctttctttctcaaatagtgtggaaccaagataaatacctgtcaagatactctctcgaagcatttttccatcccaaatatgaatgcctttttcttgtaaaacctaaaatgatgtatcatcgttcgtaccaaagtgataatctaccatggaagctcatgtgaagaaattaaagtataataatattcacttctgcctcgtgtgctagctgcaattaat

SEQ ID NO: 14312 - DNA, 942 bp, Oryza sativa
gtattggcatgtaagaacgtgaattaggaacatgaaagaagtcaggattaacaggttcgattgggtttctcagtaatggaccttgttgtggaagcatgagccatgatgtttccaccgatgggtttgatctgcggcccagcaaacatggcagaaccatccacttgtgccactacttgattagtgataaccacagccactccaaactacagtgagtaagcaaaccaaatttaggatattgaaacatgccagagtaaggactatggtctatggttattctgctgatataagtaccatgtttcctttaaagaaagacaatagaaaagaactaacctcatctgctaatttctgaaggctcctcagaaacttagccatgtgcatttgcctcgctgagagctcccctcgacctgagaaatcagttctgtacaaagctgtcgcgctgtctacaatcatgagagcaaacctgcacatgtgaagattcaaataagaactatggaggaacacctaattcaatattatgttaggtacttgtctgaagaacaaccataactaaaaatcaatgaaatatgtatcagttattttcccatgtttaaataaggattttgtgcaaacagaatcaaacatatgttgaccttgaaagaaaataacaagcaccacataacaaaatttagctcgaatccactcatcataatagaagcatctgtaatcatgagccattactttgggcatcctaccattccaagttgcttgaagtgtaaactcagtactatagcaatagacagcaatggagtactgaagttcacttctgttttgatggaagagatgcgtgcaacttagtctgtcatacgggccaaaaaggttactacagaaactaaggtttgttggcattacataatcacttagattcataaggacaagtactatcaacttagtttcctactgctg

SEQ ID NO: 14313 - DNA, 661 bp, Oryza sativa
aggagctcgtctgataactgcaaatgaatgtcaaagaacatcagagagcataatattaaagaaaatacattggagtctgcaggagatagtttcagctttcaaccaagtaataaccaaactgtaagcatttatcaaattgttggtaaatagggagagtgggcaggagatagtttcagctttcaaccaattaataaccaaactgtaagcagttatcagacgtaggggggcactcactgctcaccttctctgtaaagtgatggaaatagcccatcaggagatatcacaacagggccatcaggaagagcttttccatcctgaaatccataatcacatgttcatatgagatgaaatagatgggaatctagagtagtttaagattatctttatgtgtggctttccaaacacatacaaccaattctgctagttcattggacataaaagcttacaaagacgagaccaatcctatggttctatgcactagggcatatacatatcaataatggaaggcataaggatagaactaaactaaacctgcttaaggttgaaaagaaactgccttgtcaggtgagcttgtgaaatagcacgcgcactcaagaaaagcaactgatatccattttcctgcagaaatggaaggcaacaagaacaagctcaagtcaataac

SEQ ID NO: 14314 - DNA, 4206 bp, Oryza sativa
actatatcagcaactcttaagagtttacaattaacacacctacaaccaccaaaagtcaggagcatttctcattaaattttcctagaagtggattattagtatatgcatggggtaattcaatatgaaacaaagattcaggagaaccagataaaaagaaaaccatcagtatttacctgaagctcctgtaatttattaacacgatttgacacaaaactcccatagccttttgaagaaatttctcctgactcaaaatgtcctataatatccacaaggtgcggccttatactctttggaataatctcatcaaaaagatatgccctttctgatgtatctgctgcaggatcataaggtggaatgttccgtacagttggttcttgactttcattagcacccacactggtatcagcattcccaaggtcaaggtccataaaagcagaaggatcattcctttgttcatttaatgactgccacttaatatcctgcaaggaatatatagcatgaatcaaactcatgactgtatccaaacaagcaagcacaatcatgtcatggtctgctgcttcgttatgcacttaagatgggtgtaaagtgaagaaattgaggtgatgtatccgttaagcaactcttgatgaaaaaagtatgggtatgtaatgtagaaaatgcaacagtataagcatccacggtccaaaaaaaaaacagattttagttttaaaccacctgtgtacagatccataaaatcattccttttattacatgaaaaaaagggggaaacaaaatttctctagatggttagatgtgcaaaactaatctaccagaagtcgtatatcatctgaatttctgggcctgcaaaatcttctgatctgtaaatgtgcccagaccctttatcctataaacatattatctttaaaaagtataacaaacctaatcaacttttgagtttaaactgcaccgtgcatgcaactttatacaccacgttatcaaatataggaaacagaaagatagtaaacccggggcataaacataccttggccttgtctttctgggttccaaacgccttggtaatatcctgtaccttcaagtcagcatctcctgctgatgatactgcctcccctactgccccagagtgctgcgaatgcgccagtttctgcacttcaaggtgcggatctagcctaagaatctgttagcaaatacaaatatccagagcaaaattacatatcctcatgccgtatgaacaacataggttcttcactttgaaatgcaaataattaattaatcacaatggtaaaccaacaaatctatatttccttagcaagtgctcaaacttcataaactatcttaatatatatcattatgccacatcattggaattggtaacaccaaggaaagagctagcagcttcacagctacagtgctcaagtccattgttcaattgccactcaattgcgccgctgtatgtaatgtcacaagtagaacaacaatttctactcaacactaacacatttcttgcccattggagccagcatgtcatcaaaacaaaaactgcttaaaacactatactgtgacaggacctatcacccatttcgttccaattagtgacaacagttatcagatggatcaaagcttgggtggaaatggaatggtgctcaccttgttggcggcgatggggacgaccttgagggtgccggaggccttgtcgaggacaccgagcgcgtagccagtgagctgcggcagcacggcctcgccggcgtagctccgcccgacgaagtccggccctccgccgccaccagtggcggcgccgaccacgagctcgatgcgggatgggtgcttcgtgtggcggaacagcctcgtgcggggggcctctctacccttcctgccgccgccggcggccagggggtcgtagccggtcgggaagtaggcgacgacgggggctgcgcccgcggcggcggcgccggtgagggaggcgtccacggtgacatggacgacttcccgcttcttctcggggacattggtgtcttcctgcttcttggagtgcttcttctccttcttcttgggggaggcagcggccatggtggcatcgatggcttcccgcttcttcttggagtgcttctccttcttcttgggggagggggaggcggcggcggcgagggagtcgtcgacggtggcattgctgtcctccggcttcttggagtgcttcttcttcctcttggggaggaggcggcgggctggtggtccgccattggagacggctctagggcttttcgaggtcgccaattgtctagggttcttgaggttcttgtagcggagggaaaggggattggatatatgcatccaagtcctcctatagttttgtatttacattttggattattttccacgttttctgcacatttttttttgttctttcctaattcctactaccaattgttgtattagtagcaaagtttaggtccatcttatcagatgatgaattgtattccctctattttttaagattaacaaatcgttttaagtccatcttatcagatgatgaattgtagtccctccatttgcgcaaaaaaaaaaaagattaacaagtcgttttgattttggttaaaatcaatctacttactcttagtttaaccaagtttatagaaaaaaagtagtacttcaataaaactaatttggtgctgtagatattataatatatttgtctacaaacttaatcaaatttagagtagcttaactttgactaaagtcaaaacgacttataatctgatataggttgtatttcacactattgtcaggatatccacaaaacttggtgcttggtttatttacctcccaaaaagatctaaatagaaaaggtagagaattagtaaaaacctatcgaattttggagtttcgcggtaaattactcgaatttactaattgagcatagatacacacatcttcttcatgtacagtacttgtagtgttaccagagaatagggaaaattataacgaggcacatttgcaaatgcattattaaactgctaacttgtacaaattatacaatgtaaacacaactacatagttaaaaaaaaagagaactgaaatcttatgagaagtgacgtgagttgcagggcaacatcctacacagatttcccctccattcagtcactcaagtcagtatattacacatattcagttgcaggcttgcagctcatgttggacaacaacagattgactaattgagtaacaaggaactaattaacactgcttctgccgactcattggtcatacaggttgtaagtttttctattatgatcctatgtacagtgtcagcctcgcaagaatttatgtcaggagcatccacatgacaccaaccagcgattggtctgcataaacaagtttgtgtcaaacacacatgacgacataaaactcatgcaagaaagtgaaagaactactggacagcagatatagatgaaaagtacctcagggtgcttttgttcaacatggaagccatttctcatggccgctgctgcgtgccagagaccttgtacagcatagcgtgcactgcggctatacctcaaatatcaacagcaggtaacggcattttccagtaattccaagtattgtagtcctcctgaagtaaggaagaatttccatcaggtcaaggagcattgacaatatggtaaacatacttcgattggcagaacaatactctgtttacaggagtgctgatatatgtgcattatagaacatgacaaacctgctcagatgacgttgatatcggagggaacatcccattgacaagagcatggagggatgtgtatgattttgtatctactcgacgattcaccgcaacttcaccctgcacaaaatttacacacattttctaaatgccatctccaatatgttcactggctgggcctgatccaattatgcagatagagaaactttgttggatgtaggaagggaccatctgtctaagtgatctgttaccttgggatttataataaaaattttgcccataggaatcccaaccttgaggtaactaagctcatctgtatctctatttccaaatccagcatagaatggatttgagtcaggaggaaatagtgctttgatagcctgtgtgaaacaggtgaatcaagacttggtacgaattatttcatgagcgcaatgaagagcaagcaattattcaatgtatgttcatatatttatctttgtgttgctgagtactgaccc

SEQ ID NO: 14315 - DNA, 1469 bp, Oryza sativa
  unsure (1)..(1469): unsure at all n locations
ttgtaagtatatttggcatgtaaaaactataccaacaaaattatacttcaatgtattttcatataatgttggttctgttttaattaacaaaatagctagtagtcaaagtttatatgtcttgaccttttgacttcataatacgccttataaaaagaaatggaggttactttcttgaaaggatctgaaacctatgccttttcatcctaatctaggcatgacatgtttccagattttgaagcatcggctttaatgcaatatgatgtatcccatcaaggcaatcttacaaactgaagaaanaaaatactgcatgaatgcaaagattgcttggacgttagcaatgcattgtggcaacaagatactgagataatactatccacggcattcatgcaaggcaaaagctagatatcttcaatgtaaattctggtaggcaagatgagaaaaaaaaagggttaaaaaatgtcatcaatacataaacaatattctgcctttgtgacagcaactccaggtgacaaggggaaacaaaaacaaggcaaaagccatattccacatgtttcagtaattcggaaggctgggctgagcatgcataaactcaggcccaacttcgaacaatcttttcctatcacacccacattcagataaggctaaagatccttctgagatgatcagaaccttcgtcgctttctccttgtagcttcttttgggaacttgaggggagctggaagtgtcattacagaggatttaaatgcaccggccgacgaagatttgcatcccagctggtcataatatggtttaatcatctggcgggtcattttcaggtcttcacatatatccttagggtcggatctgaagtcatcagcgtagagcgtgagtacgagaatgtagttgatcagaagctcgtgtttctctgttgacaaggcgctagatcctggttccgtaaacattagcaccatcttacgatatacatactgtgggatcactggtccactggtagcctggttttcctttctgtgccgcttggacatggagctgttccgtgccagcagggataggagatgtgtgatgtaggacagtatccaagcaagcctctccttatcttcaccctaaagcatataaaacatacacatattgcatttagagcatatggaataaaagaaacaactctacaaacacagtttttagttgagttcagtatgacataagttaaacagatggctgccattgtctcgagagcaatctgagtaaatatcttaataaagaggggaaaacatgcaaatcaggattgttctacatggcatcattgcaattgagtgtctgccatccaattctaggtagaaacagtttgctcacatcacagcaaaaactctgtaactgtcaactacaatatttcagcaaataaattctttttgcactgactaaaggaagatccgagtcaattaatagctacttccctgtatgcttgagtgcttgac

SEQ ID NO: 14316 - DNA, 698 bp, Oryza sativa
ggtcaccgccagtgggttggtggcaggtggaccgaaggcggatgttcgtaatgtgggcgtcttgctcggatgctccactagttctgtatttctccatcactatctggacggatgttgtcaaggtgggcatcttgcttggatgttttgacacataatcccacaattcactcttgtcgatgccacagtgtgagaagagtgcccagatgatggtgataaactccatgttggacctgagatgcttggcatggacttgtgcatcggagctaggtgaaagatgcacaagcaagcgagcccacaccttggctaggatctcccactgcttctttttgtcttcatcgtggagcttcttggctagccttgcaccttctcgcaatatctggctaccctcctcttctgtgcctggaagatacgcctcctccaactgggatggtattgtcgcgatgagcttgtcatagatgctcttgagtgaggtacaaccatggagcatctgacgagcacactgaattgtttgttggaagtccttcttgataacccaaatgctcccgggcagcaggtcaggctttgcgaccagcaggtacgcacagtaccgcgacaaccaattcgctaccatgtaggtctcccataggtcaccatccagcaacttatccacaaggtatcctctgtaaggattgcgcctacggcgatagcatgacaaggca

SEQ ID NO: 14317 - DNA, 520 bp, Oryza sativa
cgcccaaacttgtcaaggtgccaagctagaaagtcttcttcctggcggggagaaagacaaatcgataagattaactcagtgtctatgttcaggaagcacctcctgatctgtgcaacatcccaggtaccatcttgccctattaaatcagagacccatttcagtctgcaatttcctctcatcgtcactggtcttctcgagtgatcccgaggaatccaagggtctctccacatgcgtatagactgaccattaccgaccctccaaattatccccttcttcagtaactccaacccatagatgatagcccgccaggtcggggaagaaagcatactatattattattgtgtgttcaatggtacttcttttctagataatgagtgttcaattgtacttacagctcaagtaaactcttccatgcttggtgaagctccctcttttggaagcatgatagcaccgaattttgacttgtacacactataatctttcatttcatggagccgcatcactggtttgctgaccgcag

SEQ ID NO: 14318 - DNA, 4962 bp, Oryza sativa
cagattgctaacccgacacgtggtggacaaggatgaccgatttgtgaccggtctgacactggtcatgttgtcagcagacagccatgttcccacgtcgcgcttgcttccgacagaagtggaggtaggtatgggccgtcccatcagaaggtcattcggacggcaaccatacaaatctccgtccatttatgaagagaagggaagtcaagttggaaaaaagataggataagtccccacacacaaaagagagatggtgcatgtggtatccccttgagatataaaaggaggaccttgcccacttagagagggggacgactctgggaatactggagcaggagaggaaaaaaggaagaagagggtttctagagtaagggcgctcgggctctcgagctctttgtagcttcttcatacacagatccaccaaaacacaggagtagggtattacgcttctcagcggcccgaacctgtatacatcgcccgtgtcttgtgtgtttccattctcgcgaactttctgtcatcttaggagcttagaacctcacccagggcccccggccgaaccggcaaaggggggcctgcgcggtctcccggtgaggagcctcacgctccgtcactgttgtttttgcaattgattttatttgaacccttttctgaaacaactaagggagtgcttctcaaacgacacgggtgagacagtgcgtctcgtccggtcggagtatgtgcaatgtatcagtcttttgaattgattaagattggctcccggccaacagctttcaaacgaccacccaggcctggctgatcccatcagccgcagattttccaaacatcaaacccattccacaacagcaaatttcacaaggcagtagtcaaacaaaactacgctaggaatcacctcacatccgcccatgaccgtgggcacggctgttcgaacagttttaacaacctctgcagagggggtacactttacccacacgacattactaacccggatcatccagttcgtgcagaacggccacgactagagaccttaaggctttcatgacaaggcatttcgaaagccgacacaggttcgccatatgccaacgagaggggtcccagaccaacaccagattaggtcccagaccatactgtgccaggaagcccaggggtcctccccgacaccaccctggcgaatccacatgtcgcttagcatcatggctctcccgataagctagttactcagccaggggtgtcccattccacccatgtggttgtacttgtcttatgttcggatgaaattccaaggaaacggtccttaagtgcaagagcgggaaaccgtacacccggtatgttccccggtccgcggttttggaaattcatttagttcgcaagcaccgacccaggtgtcgggttttccaagtcttttgtaaaacccaagttttacccaagatgtttctcagattttaagtttgaaggcgaccgtcgatacccgtgcagagtgcacgattaccgaggcgcgactaggtgggtacaagggagcatggtataataattacaatgggagggtcaaatgcaacaaattaggtaggtctgccaatctgccttgcagacgggacaagcagattaagtgcgatcctatcaatgcataatatttttcaagcaacgtaattaagttcaaatataggctcaagatgttcaaaggtggcttgcctcgctcgagatcttgagcttgatcctcgaaatcctcgcactgcgggtcttcgggctccgaaactacacgcgaaacgggacaactcagcaaacggcgaaaataaagccctattattgacctctaagcgtgccattagatagatctcgagatttgaggaattttggaagttgaacggagtcaaacggacttacggttgggaagatattgaatttctaagattattggatttttggtctaaaggaaaaggatttatttaaatcctttttgaaaaagaaaagaaaagaaaagaaggagggagggaaattagactttcctcgggcggctagggcgcgacctgagagaaaggggcggctcggccgagcttaatgggccggccggcccaagaaggcggcccaaggcacgcgcgcgggcggggaggggagagagagagccggtgggccaggtccatcccgcgtggtcccgggtgggacccgcttgtcggcgactcggctcaccgtgagcgaggtgcatgcggggcgtgctagggtttggggagggaggcgcggcgcatgcgcgcggttcgcggaggacgcggtgcggcgggcccacgtgcaaactcacggctcgcggtggaccgcgcgcacgagggggtggagggaagcggcggaccggggtctacttgacccggtcgcggccgaggtggcgccgacgtggcgcctacgtggctgccacgcgggccggtgggaggtagacgacgacgccggccgaaacggacggcggacgacagcggcgagcggcggagcgaaccatggcgatacaggcgaaggcgagcatatcgggatgttgcacaggacgaggggagacgagccaacggctcggatttgccgggggatgctcgacggcggtggattgcggcggcggcaaccggcggagagaaaagggggaaacggcgatgaggtcacgaggggccgattcccggatacgcggatacgggaacccatcccttgcgccggattaggaggaaacgcatcgagggaggccggcgacgagaggcgcttctgagctcgggcggcgacagcggcgagcacacgacgagcgacggcagcagtcggggcggcgccggctagctacgtgggggctacacatgctactaccgaaaactaaggggaggagatggattgaggagggagaacggggagatgcactaccgagatgaggcggggcgctgtgacgagaggccgacggcacgggagtgatctctccggcctcgggccggggaagtggaagaaggcgagcgcccggagtccccttccgcgtccacgaatgcaccggctctcccggtgcttggcgatgaacggcggaggcgagacagaggggtggcaatggcgcggtggcggcgagcgaaatgggaggaggaatcgatgggagggcgccttggtttataggacgacgatgtcggtttggaaaccgaccttgggcggtcaaggcgcgagctggcgctcggcgctcgcggccaaaacggcgacagaggcggatgacgccggcggggaggggaaaaggaaaaagaagggagaaagggggcttgccccttgccactttgggaaaaggaggaggggatgggggcgacgcggcagagggaggaggagctctgcctccatcccttggaggctagcgcggggagaggcggggccgaggcgatgacgacggcgatgacggccgggcggtttggagcggagcgacgacacgggcggcaggcgcgagcaggtgcggcaggcgctgacggcggcggcgactgaccggtcggccaccatggcgcgcgcgcgcaggaagcaacaggcggcgcggcgatttgggcggcgttggcgggaaacggcagcgagggcggagggcgctcggctcggcgcggctcacgcgcatgcgtgcgcagcgcacgggcagagcgggggagagggagagagagagagagagagagagccggggagggaggggaagatgggccgagagggattcggcccatcgaacccgagggaggcgaaaaagacttttgcggagggatttgatttgggaaggatttggattcgggattgaactcgacgatagatcagggatttgagatctgagatggtacggacactagacaacaagcaaagaaacggatttcgcaaatagggtttttaagagatagttttcccgctaggcgccacgacggaacgggcgctacatagttttatgatacttaacctaaatatgtagttttatgataaatttagtgttaaatctataattataattttaagtacacaatcttaaatttctagtgttgtgatagtttagtcaaagtattaatagttttatgaaatttactctaaataaacaagttagatatgcctatatcaactatatttatattttctagtaactaacttattttttaaaaataaaaaagcagttcaggtttctggcttgtaggccggtacactatagtattctattcccctctctgatcaaaatataaatattttttgattgaagtaaatgtctattgaattttttgacatattttagaagagaaaaaaaaggaaaagcaccgacatattgatggattaaatggtgactgaggtaatatcttttttacttttattttttcccgaatctcaaaatcccttatatttgtagacaaataaagagatgttaggggttacctaatttatattagtattaagtgttttaaaattcttttaagttaaagccctactccgtatcaagtacttcctctatcccattttcctccatcccattttaagtgcaaccataagttttcacgttcaactttgattgttcgtcttatttaaatattttttttataattagtattttgttgttatgagatgataaaacatgaataatactttacttgtgacttatgtttttaaattttttttaaaaaattataaataagacggatggttaaagttagacgcggtaaaccatggctacacttagaatgggaccgaggtagtatcaaacgtcctgtataggacaagacaccttgatattgatgtccattggcatcaacgataatagtatgtccatatcggagtccttaaaaaaatatacattctggaagcctttaagaatcgattagtgctgagatcaaccaacctacaaattaaagcatagactttgccaacatatagctaaccaaattaatgccacaagcttagttagagatgaaaatcgatcgaattttggcttgttgcaaatgtaacgaacaaggtaataaatagcgtatagcgggt

SEQ ID NO: 14319 - DNA, 16199 bp, Oryza sativa
gacagtctcttacaagttgatactcctcctgtagtgagaagaaaatatatatgaagctttcaccaacatgggtcaaaattttcctacactattttattttcggcaatatagctctaggctaaactgtaatgagcaaagtgcgtacaacaaaggaagaaagcagaaaactataccaggctcagttgaccctcgcatcttctctcgatcagctgtcaatgaaaacatattttttttaatactaagacattggcagcaacagataaattgttgagcagaagggacatagagttccattacctgaagaaccttgtatgtgcagccttttgggcctccagagaatgaggcaaacacaacaggtacaggtctaaccttcagttcctggataccaaagacaaattcagcggatttcagtatttcaccgattaacaatcaaatacattggcatgtaagtatgatccacatggaaataaactaaggccaagttgaaagagtatccaacttgtaggagtgtgcatcctcttaaacaattatacctaatgactgaccttaactagttctgcaagcaccctatcagcaagcatggcagccttatcagggaaaaacctgcacaaaacaccaaatcaaatggtatgatcagttcaactcatatatttcacctagattaaatatctattttcataggttttccaagaacaagcaacatgatatctcccctggctatccggcatacgccagttcatccaatttgccgatctagaattcttgaacagaaatatagtcctacacacgactaactgattacacaggagaacgaattttgctgtcctcctattccaatcctgagaactgaacaaaactaaaattctaaaaagcttctggaattaatcaaaacagtccaattaatcaaacaccctaaaatttacactcatcaactccaaggagtcggtgccaggtgttcaagaacacttggaaccagaatcaagacaaaaatataatctacttccttgcacgcctgtacaatatcatagtactatcatctaaatcattctcccacatccacgcgccactcaccgacccccaagaaccaccaaaaatccatgaaacaaacaaaaaaaaaacaaaacaaatccacaaccatgcgaaattgccaagatgcagaaagagaggaagagagagagagacgcacagggtgaggaactcggagtggcagacgaggcacgcccacccgagcgccgcgtacagctccacgtacgcccgcacctgccgctcctggctcgacagccacgcgaacatcaccaccaccccgccgccgccgccgctcggccgccggccgccgccccagtactgccgcccccacatccctccacctccagaacaatctagaaccttctctccacccccgccgcgctctctcctccgcttcttgaattgggggaagacgaagagggggagaaggtgggtgtgttggtgtttgttggggtggaatttttggggggcgtgtggcgattaaaagagggcgtggtgtggttggactgtgcgagtatagggtaaaaacgctacggggcacccaggaagttaccacgatgtagtagtgtagtaataatccagtaataataataggtgaaagtgacaggttggatgggagtaaaccccatgacaaacccaggtggtccgtagaaaaaaacttaaatggatattgtttgatgtagagtcacacaaaagaaattgtattttttttaatattgtttgatgttgagaacacttgtactacaagctatgggttatccgttatagtcggagtttttatactgcgaaaaaggtagaaacatgatactacggatttaagtgtataattacttataagagaattgagaatattcatcgtataatgtaattacttataagagagaagagaattgagaatatgtatcgtataatgataattgaacgccgctgcaagctgcaacaacaatagcaatagctgtcgaacacacccaacaatagcattccaatattattttatagaacttttgttggataggattaataattatacgagtacgtatcaccagcaaggatgccatctttatcatccaagtcaaggaaatataggattaccaaagcatattcgatgacagtccaaggatcagataactcatgtgagttaattaggataagcttaaatagtaattagaaatgttaaaacttgatatactcctccatgtgtgcaaaatccctcggagatgagattcaaatgttgaacaatggcaaaaaagtcaaaaggaaaatcattgttgaacgagaccttgcaaagctgatgttgcgttgaataacactaattaatttagacgaatgaacgacgagtctgatgcaataatccactagttcttgctatattaaattagaactaatcacatgcattacgtgctcatgtacgccacgtaaacctgcactacgatcgaaaattgctgtacgtctcaaaagtctcgaaaggattgagatcgagatagaccatccacgacgacagcatcttcgaaaaaagcttaatttatcaacttggagctaattaaagatctacgtcatgtatgaccaatgcaaatggattggatggtgaaatattctaagcaacatttttttaacactacacttattaaccatatatactccatctgtgttttaatagagaatgccgtcgacttcttatcaacgtttgatcattcgttttatctaaaatctttgtacaaatataaaaaatacttatgtgagcttaaaaaacatttaatgataaatcaagtcataataaaataaattttaattatataaatttttttaataaaacgaatgatcacgttagtacttagtagtatgaaagggtatgtgtttttaattagttatcgcgctttatcgtactaaaagttgagctcgttttgctttttttttttctttcaagatttctgatgcacatagcacgtatagtcgaatgcaataatctggcatatatgtggccattaatggacgcattattgaaaagttacatatggtgtggccactaaaataaagtacgcacacgcatgcatatagcttggcaagcaatacactcttgagacaaatgcttagttggtcttaaaattaaaagtaaatttcaaagaaccacaaatatttttgatcaaactataaaagctacatatttaagattgtcacaaaactacagattttgtacgaaatctatcaaagaactatagatttattatacaagtttagtaataaagttatcagaaaattataggtttggtaaacaaaatatcataaaactatagttttagcgccaatttaatctcaacacttgggtgtttataacttaaatataacattagtactatggatttaaaccatataatatgtagttttctgataactttattattaaattgtagtttgtcacgccccgaactagtcccgagcggaactagctcgtgacgctccaaattaacctgttaaccgataccagtcccaggaaaacagtgctggtatcacaggaagacagaatatcacagcaacagaggtctctttattatagagtaggagtacagtcatgttgggctgcggacagaacccgagctcacaactgcattacaaaaggggaacggaagccagacttggaccaaacatcacaggcgcgacttgggaactaggccgaaatcctaaaactcatcgtagccggcttgctcctggaagaactcctcgtcagtgggatccgcttcatcttcttcagcaactggggggattatttatatagagcaagggtgagtacggaagtactcagcaagccatgggaaataagtgtttaatgcaggcttcaagaaagactgtttgtcggtgacatgggaccgggagtactatgacttgaggcttgggcaggagcaatcacccacgtggcctgaccccctcgggggggtcgggcccgagggtgatatggccgcccccctctttgtctccccgaggggtcggaccactcccgtttcggccccgagggctgaggcgccccgaccccttgtgggttttgcgccgcgtgtatgggttaggtgagcacagcggggctcacctaaccgtatttattgcggtttagacgagcgcgtcacgccacgcagtgcagcgtgctcgtctatccggtctgtgactggtcacagaccgatcagatcgtgggttaggtggcgacaggcggtctgacgcacgcctcgccccatcccgtcaggatgagagcctccgagcactcgtccctagccggagccggcgtgttagctcctgaagatggcacgttggccccggtcagatatatgccaggcttcatcctaaccattacaagcaagatattgtatgaagaagggcgaacatgcagattgctaaactgacacgtggtggacaagaatgaccgatttgtgaccggtctgacactggtcatgttgtcagcagacagccatgttcccacgtcgcgcttgcttccgacagaagtggaggtaggtatgggccgtcccatcagaaggtcattcggatggcaaccatacaaatctccgtccatttatgaagagaagggaagtcaagttggaaaaaaagataggataagtccccacacacaaaagagagatggtgcatgtggtatccccttgagatataaaaggaggaccttgcccacttagagagggggacgactctgggaatactggagcaggagaggaaaaaaggaagaagagggtttctagagtaagggcgctcgggctctcgagctctttgtagcttcttcatacacagatccaccaaaacacaggagtagggtattacgcttctcagcggcccgaacctgtatacatcgcccgtgtcttgtgtgtttccattctcgcgaactttccgtcatcttaggagcttagaacctcacccagggcccccggccgaaccggcaaaggggggcctgcgcggtctcccggtgaggagccccacgctccgtcatctggcgcgccaggtagggggctctgcgtgtgtttttctaagctctcgcattctttcgtgtgcgccaagcttttcctgtttagcccaatggccgaacaagcaaaggcgcacaacctctctccgagtgttagcggtgacgacggggagccgaacccacgccgtcgatctcgtactccaccgccccctccacgccaaagtcctaggcgggaggaggcgctcgagagggtcgaaggatccgcgacttcgacatccacgggtgatggagaagggcggtgagatggggagcgtcgcctcctcgtctacggcgacggcagcacgccccagggcgcgctccaagctgcgggcgcgctcctacgtcacccgcccgtcgtccctgacccggagtctccagcccaacgttggctggacgacgtggccaacttggtcatgacggcacggcagcgcctaggtgctggtgggcggtcctccgccaccaagacctctggcgctgctactaccggctccgtgtcgtcaaggcggagggcgcggcgagcggcggctattgctcgccattcggctgccactccctcgtcagcgcctccgacccgggaagatctgcgtggggggccagatgcccgcatcggcatcgagcgccggcgtaatggccgacgtgaagcccacgcaacggagggcgcctcctcgtccagagtgtcacctcaacacggacgcggggatcagccctccgtgcccccggttggtggtgtcggctatagagcctttgtggcgagccttcggaacgtccgttggcccccaaggttccggcccaccatcgccgaaaaatatgacgggagcgtcaaccccgccgagtttctccaggtctacacgaccgggatcgaggccgccgggggtgacgacagggtcatggcgaatttctttcccatggccctgaagggacaggcgcggggttggctaatgaacttgccacccgcgtccgtccactcttgggaggatttgtgccaacagttcaccatgaactttcaaggcacatatccgcgcctaggtgaggaagcggacttgcacgcagtacaacgaagggatgatgagtcacttcgctcgtacattcagcggttctgtcaagtccgcaacaccataccatgcatccctgcacacgcagtgatctacgcgttcagggggggtgtgcggcacaaccgcatgctcgaaaagatcgcctccaaggagccccagactaccgcggagctttttcagctcgcggaccgagtggctcgtaaggaggaggcatggacctggaactcctccggttccggtgtggcagcttcggccgcccccggatccgctgctcggacagggcggcgtgacaggaggaggaagaagaggtcagcccattccgacgacgagggtcatgtcctcgccgtcgagggcgcttcgcgggccacccgaaaggggaggcctgcgagcgacaaaaagaaggaggccggcgctcccagcagggagcgcccaaccggcaagtggtgtaccgtccacaacacctcccttcacgacctcgcggactgccgcgcagtcaaaagtttggctgagcggacgaggaagtgggaggaggagaggaggcaggaacgccgagagggcaagtccctggcggttccttccggcaatcggcgaagtgaggccaagcagaaggcccccgccgaggacatcgatgacggcgatgatgacctaggtttccaagagcctggggccaccattgccactgtcgatgggggagcgtgtgctcacgtttctcgccggagcctcaaggccatgaagcgagagcttcaggccgcggcccctactcatgaggcgacgcgccgggcgcggtggtcggaggttgtcctcaccttcgaccagaccgaccacccaccgtgcgttgcccggggagggcagatcgcaatggtggtttcccccactgtttgcaacgtgaagctggggcgtgtcctcattgatggaggagcagccctcaacatcctttcccccgcagcctttgacgccatcaaggccccggggatggtgctccggccgtcccagccaattatcggagtgacgccggagcacacttggccgctaggtcatatcgacctcccggtcaccttcggtggatccgccaacttccgcacggagcgggtgaactttgatgtggcggacctcagtctgccctacaacgcggtcctagggaggcccgcgttggtgaagttcatggcggcggtccattacgcctacctccagatgaagatgtcgggccccggtggccccatctctgtccatggcgacctcaaagtcgcgctcgcttgtatggagcagcgcgcggaccacctcgccgccacgtccaagcccgagggtggcgacgagaggcttggcacctccgtccccgccgccccgaggcagcggatgatcacatgcgacgaggtcccggtcaaggaggttgccctgggcgacggcccgtccaagaccacacggatcggtggtcttctggatggcaaataggaagacgcgctcgtctctttcctgcgggcaaacgctgacgtcttcgcatggagaccggcggatatgcccggggtccccagggaggtgattgagcaccgtctcgccgtgcggccgggcgcaaggccggtccggtagaaagtgcggcggcaggccccggaacgtcaagccttcatccgcgaggaggtggcgcgacttctggaggccggattcatccgcgaggtcatccatccagagtggctggtgaacccggtggtcgttcccaaggcgaacggcaagcttcggatgtgcatcgactacaccgaccttaacaaggcatgtcctaaggacccttaccccctgcctcgcatagatcagattgtcgactccaccgcggggtgcgaccttttgtgttttctagatgcatactctggttaccatcagattcgcatggctagggaggatgaggaaaaaactgcgttcattacccccataggaacttattgttatacgacaatgcccttcgggttaaagaatgcaggtcctacttttcaacgtactactcgaatttctttgggtagccaaataggacgtaatgttgaggcttatgtcgatgacttggttgtaaagacgcgcaaccaagagtccttactctcggatctagcggaaacttttgagagtctccgctccgctcgcataaagctgaaccccgataagtgcgtgttcggtgtacctgcgggcaagcttctcgggttcttggtctctgcccgaggcatcgaggccaaccccgagaagatacgagctatagagcggatgcgcccccccagcaaacttagggatgtgcaatgcgtcaccggttgcatggccgccctaagtcggttcatatcgaggctgggagagaaggcgctacccttattcaagctcctcaaacgctccgggccgtttacttggacggaggaagctgaacgtgcccttactcagttgaaggcgtatctcagctctcccccagttctggtcgccccggagccaaatgaacccttgctactctacttagcggcgaccccacaagtggttagtgcggcgttggttgtggagcgcgatgaggacaatcctcatttcgcgcatcctcaccctgtgctggcttggcccgggagagagcagggaggagaggcccccgagccgaacggtggcccaaggcccccaacgaccggagctggccctctgcccgcttgtcagacggtgccaggtgcccccgacccccaggatggcccgagggccactgcgggaaggccgcacctatcgccctctgaccccaaggctaaccctgtgccgactcgacccaggagagagcagggagaagaggcccccgagccgaacggtggcctaaggcccctgacgaccggagttggccctttgcccgcttgtccgacgacgccaggagcccccgacccctaggacggccccgaggccactgtgggaaggccgcccctgtcgtcctccgaccccgaggtcgtcggcacagaagacgagtacgccccgcgaggccgcttggacgaagagcgcccagggatgcggcccctagcgaagaggatcggccccaccaaaaggtgcagcggcccgtctactttgttagtgaggccctccgggacgccaagacccgataccctcaggcccagaagatgctttacgctattctgatggcttcgaggaaactgcgccattatttccaggcgcatcgggtcacggtggttacgtcttaccccctcgcccaaatcttgcataatcgagagggtactggacgagtggtgaaatgggcaatcgaactttctgagttcgatttgcactttgagccacgccacgctatcaagagccaggccctcgccgattttgtggcagagtggaccccggctcccgagcccgtctcagtccccgaggccagctcgggcccctcgcagctgcctcacaccgcccactgggtgatgcagttcgacggctccctgtctcttcagggcgccggtgcgggggtcacgttgacctcgccgagcggagacgtcctcagatacctggttcgccttgactttcgggcgaccaataatatggcagagtacgagggactccttgcgggactcagggtggcagctggactggggatccgccgcctcctggtgttatgcgactcccagctggtcgttaaccaggtctgtaaggagtaccggtgctctgacccgcagatggacgcttacgtgcgccaggtacggcgtatggagcgccattttgacgggatagagcttcggcacgtgcccagacgggataacacgatagccgacgaactctcacggctcgcttcctcgcgagcccagaccccaccgggcgcctttgaagaaaggcttgcccagccgtcggcgcgacccgaccccttaggggagacggacgtgcctgaccggcccccgaggcccgtcggagtccaggcctcgggacccgaggggagcgctcctagctcccttagattgattgcttggatcgctgagatccaagcatacctcacagataagactctacccgaggaccgcgaagggagtgaacgcgtccagcgcatctccaaacgctacgtgctggtagaagggaccctctatcggcgcgcggctaatggaatcctcctgaagtgcattcctcgggaacaaggcgtcgagcttctcgccgacatccatgaaggcgaatgcggagcccactccgcctcgcgcaccttggttggcaaagcctttcgtcaaggtttctattggccgacagctctcaatgatgcggtcgacctggtccggcgatgcagagcgtgtcaattccacgccaagcaaattcatcagccggcccaggccctgcagatcataccactttcatggccatttgctgtctgggggctcgatatcctgggaccgtttaggcgggccccgagcgggtttgagtatctgtatgtcgcgatcgacaagttcattaagtggcccgaggcttatccggtcgtcaagatcgataagcactccgcacttaaattcattaagggcatcacagcccggtttggagtgcctaaccgtattattacggataacggcacccaattcactagtgaacttttcggcgattactgcgaagacatgggcatcaagctctgcttcgcctcccccgctcaccccagaagcaatggccaagtggagcgcgccaatgcagaaatcctcagaggccttaaaaccaagaccttcaacatcctcaagaagcacggcgattcgtggatcgaggagttgccagcggtgctctgggcgaaccgaaccacaccaagccgagcaaccggggaaacgcctttcttcctcgtctacggcgtggaagcggttctcccatctgagctcaccctgaggtcccctcgggccaccatgtactgcgaggctgatcaagatcagcttcgcagagatgacctcgactacttggaagagcgaaggcggcgcgcggccctccgagccgcacgctaccagcagagcctgcggcgctaccatcagcgccacgtccgggcccgatcactctgcgtcgacgacctcgtcctacgccgcgtccaaacgcgtgctggattgagcaagctctcaccaatgtgggagggtccgtatcgagtgatcggcgtcccccggccgggctccgttcggctggccacgggcgacggcacagagctgcctaacccgtggaacatcgaacaccttcgtcgcttctacccctaagggggatcgggtgtcaggtttcgggctcgggccaaccccgcacccccctcgggtgtgcagggttggccgggggctaccacatatgcatatttttatttctcttatatctgtatttcaataaaagctttttcgatttcctaaaggctgtatctgtgctgttgtttccttttgaagaatcttgacttgaaataggttactcgtgctcaatcctgccctcgggggctcgggtcagctaaaatcgccaaaaggggcccagaaccgagccgtgcctcggggcgtggtgaactccgggggggaatcggcaaaaacccacaatcgggtcacccataaccctcggtcaccatgctcccggcctggccagtctcgacatgtggatctccccaggcactagccccgacccgcgccttttgaggactgggacctgggcacgagcccttagtcaagctaagacacaaaaggaccacggtacagatcatcctcatctcatacacatagcaaaatgaaattgacacaaaaatttctttattttaattgcagattaagttaatctataaaaaaggaggcccgaaggcctcggaagaaagaaaagaagaaaaatttaaagattggcgggggcctgggggctcactccgatgcacccgggtcgccagcctcgtcgccactgtcgcccacaccgccgtcatcgccctcctcgtcggagttgagggcgaacgcgagccgaggggccgaaccctcgaagctgtggacgatatggtcggcggcgtcccggacctgcgcgcgcgcgccatcctcggtcccgggagggaactcgtccagcgctgtccagggggagaagtcgggatccctggcctggtaactcgccagtacgagctccaccgctcctcgggcgaggtccctcgaggatgacttaatcgtcctctcgagctcctcggggagccgttgaagagtcccggccatctccgagaggcgctgggcgaggcccccctggttggcggcgtacttcgcagtccgcccgccccagaggcccgcctgccggccggcgcggtctagacgggagacggcgtctcgaagcatgccgggccctacctcgcctgccaagcgaagggcctcgacctccccggcggacgagtctagcgcgccctgcagatcggcgatggtgtgttcggcagctgcgaggcgggcgactaagtcactttcgcccgcagccgccccgccgctgcgcgccctcgcgtccaattcccttgcctgcgcctcgagttcagcggcccgctggttcagtgcggccctctcggcgcgggcaccttccagattacggcgcgcttgttcctctagcgcagcctcacggagggacgcgctctccgccagccttttcgccgcgacctcagcctcctcgagggctcgctcccgctcgatgagtgcatcttcgcggaggcggagtgtggactcctcttcggcacaggcggcttcgtgcgccgtcagtgtgacctcccgaatggcaacggcggcctcacggtccgccagatccttcaccatgacgcaggaacgctcttccagcgccatggcacgggcctcgagggtttcttcacgctgccgggatgccgcctcggtctccgccgcccgctgttctcgggcagcggcagcgtcaaggaccccccgggcggtgtcgagcttcttccctagctccgcctcccagctcccgtattgaaggcggagggcgtcctgcgcctcgttcatcacggtagtggcgatgagggcagccccccgctcctcctccacctccttggcgatctcccccagcaccttctgacgggcttcgagctctgagacgtgccggcggtgtgccttgcggcccacctccaccatggcctccactgagcgtcgcccctcttcgacacgcgcccatgtggcgtcgagctccgcccgctctgcttgcagggcctccatctgggcacttaacccgtccaacaccgtggtgtttgcgacggccaaggccttcagaaggggatctgcgctcagtggggcagcggaaggcgtgggggagagccgcctcggtgaggatgccgcgcggctcggcccgccaatggacgcgccggactcggggatgtcccccggacctggttggtcccgagcgtcgcccgagggagtgggccccagcgatgcgcccgcgacctcgtcgcgagctgcctcggaagtcgtcgccgcctcgtcctggtgaaatctgacctcctcccgagcggcttcttcagcttggcgagctcggacggccacctgggcagcttcctcggcttcccgaaggcgatccgcggcttcttgccggtcagtatcgcgggttgcctcggaggacatcgtcgcctcggcctggcggagtctggcctcctcccgagcggcttcctcagcatggcgagcccgggcggcctcccgggcggcctcctcggcttcccgtaggcgatccgcggcttctcgccggtcagattcccgcctccgggcctctgcggccgccggatcctcggcctcagactggccggacttggaatggcgggagggacgcgacgggatctcgctgaaacagaagaaagaccagaagataaacaagatgggtgaatgaaaactcgcgttgagaggatgaatacagccacgatgggcgtgggacgaacctgcgaggggatcggttaaacgaccaccttggaggggaaataaggtttccccgggatggttctgtccctcccatcttgcggagccgcttcttctttcgctccccctcgggctgcgacgtcggcgtggtcccctccgggcgcctgctgttggcacgcgccgccccgccccctcggggaggagatgggggaggggttcctccctgcttcctcttccccgggcgtcggcagggcggctgctccccgggcccccgtcgcggggcccagaagcacgaccccctcccggggtagattgttcccccctgcggctcccgcccgcgccatcgtggcctcgaggagcccgctcctccgacgccccgaccgcctgcatgatggtcaggatggaggcgcggtctggatcgctgcagagagggaggattccttggggaatgagtgatgcctccacggagctgagattcagcacccgttggaccactatcttgaagtcctcaggagcccagtcccatctgaccccctggtgggtcctcatgtagtcttcggacccggtgtactcccaggcgccccgggcgcgccgctggagcggcgcaatccggcgacgaaggtagtcgccgtacaccatggcccctgtgagcccctgggatcgcaggcccgccaggcggtcgaggacggcgtcatagccatctcccagatctaccggcgcccgcaagctggatgcctgcgccgggggctggctcggaggtcggctcggaggtcggaggcgcgcctcgtcggcgaggggggtgtagaaccagtcgctcttccagtcatcccacttcttgcggaggacgcaggggatgtagcggttcagcaccggcccccgcggctggaagtagcagccaccaaccaccgacggcggcgacactgactgtacggtgaagaaccaccggaacagccgaagggatgggcgcaccccgatgaacatctcgcacaggtgcgcgaagatggccaatgtcattaccgcgttgggggtgaggtgcgccatctggagatcgaaaaactccagaacatccatgaagaaagaagaaaatggcggaaccagccctgccattgcaaaagggaggaagaagacggaccgccccgggtagtctggcgccgggcgtccctcgcccagcgtgactatctcccggccggaggcagattccggcatgaagcggcgcggcagcccggcctgcctctcgctcacgatgcgggaaggcggcagcacgctaccatcgagcagagcggagccccgtgccatgatgccgggagaagagatgtttgagagcgagcgcgtgtggcgaaggtagggcacaggaaagaaggagttagggcgcaagcggcgaagacaaggggaataatggcgagaggaaggaagcaaatcttttcctcggtgtctttatacccttgccaacgctgtgcccggctcctcgcttctcgcgcccactatctcgctccctcgtttctcgcgcccacgcttccactaatcccattcgcccgcttgcggcgcatgaggtggatatgcggctgtggcagtcgagatggaacatatcgtgcgcgcgttaattgcgctcaccgaccgaagcgccatcaccatatctccaggcaaaacgaaccggctcgtcccgattcgcgtgctactcgagtaatgtggcagccttgaagaggccgttcattattgacagtcgagttaccgttgccagagtgcgtgatttgcgaccgttgggtttctgcccaactgtggagaccggtcccacctgtcaccaggcttttggaagtggcgtcacgcccgaccgcttccctcgaggagggcgatcgccctggcataacgccgggggctactgtcggtgacatgggaccgggagtactatgacttgaggcttgggcaggagcaatcacccacgtggcctgaccccctcgggggggtcgggcccgagggtgatatggccgcccccctctttgtctccccgaggggtcggaccactcccgtttcggccccgagggctgaggcgccccgaccccttgtgggttttgcgccgcgtgtatgggttaggtgagcccagcggggctcacctaaccgtatttattgtggtttagacgagcgcgtcacgccatgcagtgcagcgcgctcgtctatccggtctgtgactggtcacagaccgatcagatcgtgggttaggtggcgacaggcggtctgacgcacgcctcgccccatcccgtcaggatgagagctccgagcactcgtccctagccggagccggcgtgttagctcctgaagatggcacgttgg

SEQ ID NO: 14320 - DNA, 2681 bp, Oryza sativa
  unsure (1)..(2681): unsure at all n locations
cccacgatataaggaattttcagtgtttgtcttgtaacgtttgaccactcgttttattcaaaatttttttgcaaatataaaaaacgaaaagttgtgtttaaaatactgtagataataaagtaagtcacaaataaaataattaataattttaaaaaattttgaataagacgaatggtcaaacgttataagcaaaaaaatcaaaatcccttatattatgggacggagggagtaagaaaaaaaaagattttaaaaatatatgcaaaagaaagctgcagatatcttcgggcccaagaaagcccaattaagcagcttagctcagctctatcgcattccaggcctgttaacatcctatcgcgttctttgcgtccacaattgctcaaattttcagcccaagaaaaccagaaaaattcccaacaagttttcaagcgatcaaaactaattcaccgacattcaacgtgaagaattataaactttcaactgcaagtttccaacgtggaaattatctggagtatccactggactccggccctgtctagttatgaaactaatcaaatttctccagattaaaattttcagcaaatttgccgtgtacatatatatatatatatatatatatatatatatatatatatattatatatatatatatatatatatatatatatatatatatatatatatatacagtgttaaccgcgtaatcancgcgggtcnaccatgttagttgaattaattatctattgatcattactgcatttcagagattatgttgatgtcgaaaacaacaaatttaatttcgtcgcaaagagttattaagtaattatgtatgattttatagggttgggttcttgacgccggtggcgaacctgattggcacggtgagagggcccaagtatgacggctcgttcttgcacgacaagatcaagagccttacccacgatgtgaccattgccgacacagtcaccaacatcgtcgtgccagcatttgatgtcaagtatctgcaacccatcatcttctccacctacgaggccaagaacgagcccctcaagaacgcccacctctccgacatctgcatcagcacgtnagcggcgcccacttacttcctcgcgcacttcttcaagaccaccagcccctccggcgagtctcgagagttccaccttattgatcgcggtgtcgctgcaaacaacccgataccgagcatatatcatttagtatgagaaatttaattcttttaagaggtatcaaaatttacatcagaaggtatgatacctcctaatatcttcttaatcaccataaaatcactcgtttagtatatataccttcaatctcaaaaggcaacatatcaattgtgcacattgttggtaccatcttgaacacaactttgaccatttgttgagtgctcgtgcgtgcagacaatggtagccatgtctatgatcagcaaggaggtgttgcgcgagaaccaggacttcaaattgggtaagccagcagattacaggcactacttggtgatctcgatcgggacgggaacggcgacgatggcggagaagtacaccgcaccggcatgcgcgaaatggggtgtactccggtggctctacgacagcggcttcaccccactcatcgacatcttcagccatgcaagtgcagacatggtcgacatccatgcctccgttctcttccagtctctctcctgcgagaagagctacctccgcatttaggtgactaccatggtttgaaattttggtttgaaatttcggcccccactggcaagcacaaatttccatgaaatttttggattatttttcaaatatttgtgcatttggtaaaaaattttcgaaattcaatcaaaatatgttcaaaattcaaataattttggtaaaaaaaacccggaaatcatgagattttcaaattttcggcaaccacggtggcaaccaaaattgcaaaccctagtgactactccctccctatgtttcatgttataagttgctttgattttttttctaatcaaatttctttagatttgatcaagtttatagaaaaatataataatattttcaatacaaaatagatatattatcataatatattcagcgtaatatttaataaaactaattttgtgttgtaaatgttgctaattgttcctataaatttggttaaatctatagaagtttgactacgaaaaaaatcaaaaacaacttataaaatataacacggaggaagtattagctattaagttgcatatgcacccaactattatcggtctacttgtatcattacattaatatacttctaacaccagtaaaaattaacctagctactaaccgaccaactagttcacccaaaagcttctatgttttcaccttctcgtagtcgtgacactaaaattgagtgttcgtgtatataggacgattcgctggtggggcacacgtcgtcggtggatatcgcgacggaggagaacatggaggcactgatcgggatcggcaaggaccttctgaagaagccagtggcgagggtgaacatagacactggagtacacgagcccgtcgatggcgagggcaccaacgaggaggcactcgctcgcttcgctaagaagctctcagaggagagaaggctacgcagaaacagcctcagttcctcttgagctgagctaaagctaagttagctagctagctcagttctagcta

SEQ ID NO: 14321 - DNA, 800 bp, Oryza sativa
aacagagccttagtgtagtgtctctattttgctttattaaagtctgagaataattgactttctgcaggacattttttacttgataatataatataatgcatactcattgcaatgttaatgttttgagtcttttgctctctctctctctctctagtctctgaattacagcaaaatgatatacaagtattttcttgtggatgcaacaaacatagtttcttgcttacaacaattctctccttccagttttatgtcgagtgtggggagctatcatgccagatgtatcaactctctgttgatatgggacttggtggtgttcttttctcctgaaaatgaagataaatatgaagattaagttttttacgtaaaatgaagtggtattaatatatgattgattgagttttaattattacaaacttaaaaatagattaatatggtattttagagcaactttcatatataaagtttttgcaccaaacacaccgtttagtagttttgaaagcgtgccacgaaaatcttaatcttcatccaacttttgttggagaaaagaagaggactttgaaggtgttccattcaacattgcatcacattctcttccgacgtacggagtacatgattgttcatgtttgcggcatgttaccttgtacactgttatgtgactctgtataatcccaaaggtctaaccttgttgagttatattgctcagacataactcaagctggttggttatgatcctcaccagatagaaatgaaaatggcaatatagtggtattcctctagcattcacactcgtttcgtgtttc

SEQ ID NO: 14322 - DNA, 656 bp, Oryza sativa
  unsure (1)..(656): unsure at all n locations
cgtctcccatcacctcctcgacccgccgcctcagctccgccgcgcgcagcacgccgtcgccgccgtccacctccgcgcgcacgccgacgcgcagtcgcgctcgacgagccgcgcgttcatctgctggtccgacatccgcgggacgcccaccatgggcacgcccgacgcgatgctctccagcaccgagttncaccgcagtgcgtgacgaagcaccccaccgccgcgtgcgacagcacgcgcacctggtcgcaccactccaccaccacgccgttcctgcgcgccgccgccgccgccgtcgcgtcgcccgtctccgccacggcggccttgttgtccttccgcaccacgcagaggtacggcctcccgctctcctcgaggccatggagcagctcgtcgacctgccccttcgccatgacggttaagctcccgaacgcgacgtacaccaccgagccggccggcttggtgtcgagccactccatgtacttggcgtcgttctgcttgaacagcgcggcgtcgtcgccggacgggagcaccgggccgatggggagcacgtcgtacgccccaacggcggcgagcgtgtccgcctcgagttcttggaacacgttgacgagcacggtggccttgggtgtctccctgtcgagggcgtcgaacaggtcgcg

SEQ ID NO: 14323 - DNA, 617 bp, Oryza sativa
ttgatctgaactactacaccaaagttcaggactacactgaaatcagtttcattggaggtgatgttgatgaacatcctgcgagtgagtgtaaacctgacatcaggaggacaacagctcaagcaaatgactgcagggtgacaaccaaatgggttggctttgatcggatattgaagtcaaacaaccagaaatccgacagcattaaccttgatcatctacctccatactcctttgaaactcaagccgtttgggtacagattcctgtgtcagtaaggacgactatggagcagatggaatatcagctctgtggtggtgtacacgctgcttctcatgcgcttctaagtataatacctctgcacatgatgtgcagtggttctgatctaggaacacaatgtgcagagcctcaagaaaattctgaaactgcagacagaattctgatgtacgacaaacatcccggtggcatcggcttagcatcacaggccaagctgctctttggtgagcttctggttgctgctttagagcttgtttcatcatgcagctgcaccaactctgatgggtgtccaaattgcatccaatcatttgcatgcagtgattacaatagggatttggacaaggggagc

SEQ ID NO: 14324 - DNA, 2503 bp, Oryza sativa
ttccctccaaatcagaaacatgagatgtgggttaaatttggattataaggtgttggctgttcagaacgtaagtttcatcactgtattcagctgcaaacataagatgaaagctactttttttttttgacgcaaaaggtagagagactctaccttgtttccattgtattaatggtggtcataaaagtgacaaagccagtggctggcaagagattatacaggggggggaacagagaggaaggataaagagaaagaaagataaaaaaagaaggaaaggagaagaaaaggaagaagaaagaacaaaacacaggaataaaaataaaaataaaaatacaggaataaaaaggaaacctagctaagcttgtctgcccaagtgttgaggtgttcgcgaaggctaggctttaagcgatgaacccataattggagactttctctgattcgatgcaggatgtatgcaacgcttgtttccgtgagcttgaagatcagctggttgcgtgctttccagagaccgtgcgaacaagcagcaaagcatgcaggccatcccggtttctggtgttctggcaaggtgtccaggattgattccacaaaatcttgtatgttagagctgcgcacggctgtctcatataggttgagcttcttccagacttcccctgctaatttgcaacgaagaatgatgtgatttgatgtttcaatagctgggcaggtcatacagtgtgggttggaatcccattttttaagaaccctgtttgcattggtgttgagcctgtctcggaacgctaaccacaaaaagatcctgcaagtgttggggatagccttgttccagataagtgttgccggctgccaaaggatgccatgataagtcaacaagttgtagtttgctgatgttgtgatatctgtggaaccaagcagcagtgttcttttgtcggggacattctgttgtatgtgctgttccaacaatatatccatgagggactgtaactcggtttgagcccgggaagagagaaccgggtgtagaacaattgtccaggtaccgttagtgtgttgggaggagactgtacagttgatatttgttgcgtaggaagctagtgtcggatatatgaggttgaatcgtcctgctgctgtccagtggtctcgccaaaactgcactagctggccgttcccaatcgttaccttagtggaggcaataactggctcgataacggaacagactgtcttccaaatcggtgtttctgttggttttgctttaatagggatctcatttgccatgtgttgcgtgcgcaaccattgaaaacatggttctgatgagtctgataacaacttgcctcctatcctcataagtagagccatgttgtgagctctcaagtcacggatctacgctactactcttttcatatcagaatgtagcaatctaggatgtgacttgtcctaacataatgaatctggacatgcctcatattatgtttgacggaggtactagccaatatttgtgtttgaagtcattaaaagtttgattgtactatgtaatcatcagatatcagggatctaaaagtccacttttttttaattggatgtagtagcacctttcatgatgtagggggatcattctatcatctactactagggagtcgattctaatccctcgaggggatatcccctcgtatatctttttcttctaaattcaatgcaaatagttgtgaaaaattatgaaaaaaaattgacaatgtagagtataatgatacctattactccaccaaaagtcaagttcaaattcgatctacacatcaagaaacaaaaaagacaaatttagatataaacattacgctactatttatacgttgaatttgtcttttttatatctcgacgtgtgagttgagtctgaacttaagattttgtagagttgtatatatgtgttgcatgaatattgtcaaaatttttcagaatttttcataaccgtttaaatgatttttaagcaaacgagggaacatccctcaagggattagaatagtttccctctactactatcctctttttccattttccccccttcctttttccctcatttttcatgaatcatgttgcaatcagatggttgtagtactctcctactggtagtagccaggtccccctgacctaaacactgaacagtgaactcatgtggagcagagcctcagactgcttgctcctgtacttaactgtctcttcctttttacaaagcagagtagctcaacagttttgagcagccatgctcgtgaactgtcctgcctatatggaactcggatcagtatgccagttgtgtgtgtcatatgaagttggtccatcagtccatctggtttggcttttcaggtggctcagacatcagagcctgcctgactccaaacagtatgtgaaaattttcaagtgaatagcctgtttttttttcttttcattaatggttttcatgtgaatgatttagtggtaattatccaagggtgcacacaaatgtattgtaactatggggtgcaggaat

SEQ ID NO: 14325 - DNA, 2321 bp, Oryza sativa
aggtcctcatccactagacctcttaaaactactaatcttttttcctcgttttagccattcaagcattaatattccttcgtttctctctgcattaataaagggtatggtagtttttttagcctatatctttataactttctaaaacaacatattttttttggatagagggagtgcggaaatagtactccaccatttagtatcacgggaagtgtgccgatcaatggatttttctattgcttaagcaagtactataagtgtttagagcatgatcaacaatcgctcaatactattccaatcccaaagggtttttaagaaaaaaaaaagatccatcaaaactcctaatcagattaaaaaagtttgggatttcaatcctgtgatttacgttctccataagtggagaagacctctcgctcccaatccaccgatcgtgggcaattttcgcacgctatggagatgtccacactgcaccagtcctcacaagctcgtccgtcgccaatcccgactcgtgccgccgttgggcgtcatgtgttggtcatttgccagccatcgatttcataccattgccaacccgtcatgcaagagaatgagagaaggtgtagaggaggaagaaaagagggattaacatgtgggccccacctgtcgggttattatatatgagaaggggagcggttgcccttttttttttgaccgaagagtggttgcccgttggtagttttgtaggtgatcccatcttatattacatagaatcatgtgttacctaatctgttggagtggaggatattttagaatctcaaatcctagttaaaaatctccaaaaggttatttagggaggtgatttattgggtatctcttagtgatgctcttaaatgctaccaaaaatataacataggattaggtaatgagatggagaagtgagtggagagagaatgagttactcctcacgcaaagggtaacatctcaaaaaaaaaagcaaagagggtaagggcacatttgaatcaaatgatttatataggaatttcataggattcaaatcctataggaaatttcataggattgaagctttccaaatcctatgaaattcctatggaaatccacgttgcatgtggattttggaggaaatttagcaagagctccaacctcttggaaaatttcctctaagtctatctctctcatctaattcctacgtttttcctgcgctccaatcaatcgaccattcctatgtttttcctgtgttttgtaatcctctgttttacacttcaatttctgtcagaatcatgtgtttttcctatccctccattttttcaaccctacgattcaaaggggccctaagatagcgtgagagtgaattatcaaaagaaaactattgtggttgtgtgttagccgcaatatattatatattgtagatgaataggcaacacatttcctattaaacttgctcctatataccccttcgttccaaaatataaacatttataggtagtgagtttttttttaaaaaaaaacaaaatagaacgcagccgagatagccgtttgatccatatcggacggtcggaaataatcggttgaccttgtggccacggaacatgcagctggtctcgatcccggagcagagagagagaccaatcaaagttatcaaaccaaccgccagcgctgatccggctcggctgttgcagctcgcgcgcccccacccctcattcactctccaccgcaccgcaccgcaccgcgccctcgccaccacggcgcgtcgcgcccccgacgcgccaggtcgccgctcccgtgtcgcgccgcgccgcgcccccacggccccggtacgcgcgctcgctcgtgcgacacgccgaggccgaggagaggagacagagcaagcgacaaaacgcgcaggcgatcccagagcgcgccgcgccgcggccgtgtcgatcccatcgaacacctcctcctacaggagtctcgagggctacttgtacacacacccatactagagaaagaaacaacgagaggagatacagagattgggagaggttagcgagagaggttgggcagtagccatcatcatcatcaattcatcttctccaaaaaaaatcagagtagaatctcatcactcacgtacgtgcagcttctctctctttctccttcgcgcgcgtcgatcgctttctcgtccccatcataaagcaaatgattcgttcgcctcgccaccctgctttaattctcttcttctcctcctcctccgccgccgccgccgccgaatcttccggtagctagatcccctcgccggcgacgtgcttgcgtttcttggtgtcgtgacgatcggggcgatccattttgtt

SEQ ID NO: 14326 - DNA, 1360 bp, Oryza sativa
agcacgatgccgaggcagtacacgtcggacctcgccgacagggcggcgcgctgggcagcggcgccggcgccggcggcggcggcggaggcggcctcgggcgaccggaacgcgaacatggcgtgcggcgcctgcgacgtgttgacgagcgggaagaagccgtagtccacgatgcggggctccaggtgggcgtcgagcaggatgttgccggacttgaggttgccgtgcggcggcggcggcggcggcgcgtcgaagtcggcgccagtcatgctcaccagcctcatcgccgggatgcccagcttctcgtggaggtacgacaagccgcgcaccacgccgacggcgatcctcatcctcgccggccaatccagcaccaccctctccgggctctggtcacctgaaccaaacaaacacatcgtaattagcaaactataatcgagattagttgattgagaactacaccctgcgtttttagattataaatcgttttgactttggtaaggtcaaactactttaaatttaactaatttttataaataaatataataatatttataacatcaaattagttcaattaaatctatagttgaatatattttcataataaatttatcatcagttaaaaatattagtcatctctccgttttaggttataagatgttttgactttggtcaaagtcaaactgtttcaaatttgactaagtttatagataaatataataatatttataacactaaactagttttatcaaatcaataattgaatatatttacataataaatttttcttgggttgaaaatttaaacttaaagtagtttgactttaatcaaatcaaaatgttttataacatcaaataaaggaagtattgttttttataaacctagttaaatttagagtagtttgattttgatcaaagtcaaaacgacttgtaacctgaaaaaggaaggagtagtaattgctgtgattagtggggggtgaattggtgattattaatcacattctattattaccgtggaggacgtagaggaggctgccacgtggcatgaactcggagacgatgagcttttcttccttgcggtaatggtagccgacgggggagaggacgttggggtggcggagctcgccgagcatccggatgtgctcctcgaactcggcgcggccgacgcggttcatgtcgcgcatccgcttcaccgccaccgtcacgccgttgcgcatggcggccttgtacgccgaccccagcgtgccgttcccgagcacctcggcgctcgccttcatcagctccggcagcccgaactcgccggcggcgttgctcatcaggacgaactccgccacctgtttccgtgcgccgccgacgccgccgacgcc

SEQ ID NO: 14327 - DNA, 5778 bp, Oryza sativa
tcgttctggttccctcgctggttctagagacacaatccaaatatgatattgcttgcctttttcaatagccactcccttcctaggggaacaggcgaagggagagtgaaaagaaaaaaaagcacacgaacctacttggagtcgttcacgtgatggctgaagtctgaactctgaagaggatcgatgagccagcgcaccgagcaacatactgtacatatgccatatggtcctcttgtctgacgaatactctgaagagtttaggtaggcagtaggctgccgtgccgcttggaaaagcatgacgtgattatgcatatgatagtatgatactgtatgtcgtttacgcagtgcgacggagcgacctggatttttttcaaattttctttcccttgatgatatatatatatatatatatatatatatatatatataggaaaatgcttctgtactcccgggagtacgtactccctctcccatccaccgttcatcgccccaccaggatgatcatcctcccactcccgctaccgggtctaactatgggagtatcgatcggacccgttttaattcgaaaaaaacaatcccgtgaaatccgaagggagccctattatctctgagtaatcaaattatatatatatatatatatgttcaaacaaactccacagtgaatttcatcttaactagacatatatataacaataataaaattaaaatatacttcacccgttacaacgcacgggcattttttctagtaaatcatcatatttataaatagcaccaatatcaaggcaataaagtatcatttattatgaaatttaacctcattgataaggtgttgtgttagggatgcatgtagacaacgatgccatttaatcttgcacatataaatgaatagacatgtaataatggtatttactcatgcacaaataaatggatagacatgccatgatatcatttacttctgcacaaataaacgaatggccaccagttagataatgatcaatctaggaaaacctcaaaaatcttaggcgatttacttgtgcacaaataaacgaatggccaccagttagataatgatcaatctacgaaaacctcaaaaatcttaggcggtgatcaaattgggatagaggtagtatttatatcgaggaccctaggacagtaagatttatctgaatactaaagttacacgttcacattcttcacatatattgtgaatgagaaattgtattacaatgcattaaatacatatgcaaaatctaaatcaaattataactagctatatatacctactttcagctgattctacccattttaaaggcatatatgtacaagttgataatttatcataagttgttgtttttctttattttatggccccaccaatcacaagtgttgcccatgtttgtcacatttatctaaaaaaaaacatcatagccgtaggtacggtcttgttatcattatcttctgagtgagagcggtttgcatctcatatgtacatgaaatagacaacatattagcatcatagtcatttggattttggactcatattataaatatgtaagcacgttgcttttctccacttctatcattctatggaaagcacattgccagttaagtacgcaagcactatgcaatttagtgtggctgattccctcttccacctgatcaagtaatattcttggaagtttagattcctttgtttttgttatgtactcttcgacaatttagggtatgttcactttgatgctattttcaaccttaccaagttttgataaagttgccaaaaaagtggctacatttagtttgctgccaaattttggtaactatataagaaatcctaccaaaattttagcaagttaccaaaattttggcaactatgccaaaattttggtattgccaaaattttgtaagatttttttggcatcaaagtgaacagacccttagaatccgtcgtggttaacttcatccataagtatctactagaaaaacgatttttcccaacattacgattttatttttctaggcagactataaaatcaccatttacaaaaatagctcaagataccataaacctagtacctgcgaaaccattatttttcaagcggacctcattaaggttacgccagcgaaaaacgattttcacaggcggaaccttaggtcctctgcctgcaaaaatccaccgcccacaccaaccggcctcgtaatatccgtcacccaccccttatctctatccctcaccttttcactccctcactccttcctctcagattcactctcttcccctcacctcccccttcactccctcactcctccggcacggagggcggaggcagcggccacggctggcggcgtgcggcgacaaggaggggagccgtcagcacagaggcagcggtgcggagggtggaggtggcagccacagccggcgcggagggtggtggtgtgcggcgactagaagatccggcggtgtggagggagccggccagcggaggtggcagataaaggaggagagtcggcggcagtggtgacccggtcaccctcggcggtgacggtgaacggaggaggaagggccggatggggagggggaaggggaggagagccggcggccggagggaggggctggcaggggagggcggtagcgggtcggttttttttttaattcaatgaggtggttttcgcaggctggtggatgtagtgtgtgcgaagatcgatgtagaggctcgcctctgaaaatgattttcgtaggcggggctaatgtccgcatataaaaatcatctatttttgcaggccttcaagtacaggcggggtgaagctccgcttagaactttttggtctgtttgcaaaaatcgtttttctagtagtgagtaatattctagcctctttttttgagtgatttttaagttgtgaaatatagtagttgtgaaacatgccaggattgaaaattggcttttatgttgtgaaacatactagttgaaaactgagttaaaatgttgtgaatagttcaaaattgatattaaatgatgtcgaacataacattaactaggagctccataaagtaggagcaattaaaacatggcaggactgaaaaatggcttttatgttgtggaacataatagttgaaaactgagtttaaatgttgtgaatagttgaaaattgattttaaattatgtcgaacataacattaatcaggagttccatataataggagcaattgcactggttttacgtttgtaatataaaaagataactttattataaaatcgacgcctgagagattcgaactctcgcggggaaaccccatgtacttagcaggcacacgccttaaccactcggccaaagcgtcgcttggatgatagatgtgattactgatccaatttattgaactgtatataatctcttctgtaaatttggtcgttgactgctgtactttttttttttttgtatttcttgaaatttatgttcttttttttaagactcgcgacttatctctataagtgaatagtgaatcccaaaaatcaactaggatgagccacataatcaacaaaataatagccattggattcacatgaggacaaaatagcaagaagaaatatgagccattggattcattggattcactttatctagaagcttccttaacctattgagaaaaaatagtaaggttatggatataattttacaatgcacacttttaattaaaaaactattttgcaaacaggccctcttactctatctatgtaacttccctttgggaaaaaaacaaatagatcattgaattatattttaaaagatccaacagtgaattaaagagtaaagtgaggaaaagatagtaatgttgtgtatataattttacaattcgcacagtttaccaataaagctaatcttttaagaaagattaatatgatctaactaagctttatatcatttgaagttatatatattagtgatgagcatatatatatgtgtgatatactaatgtaataatcggctatgcacccgtctgttatgattaatcatcattgcaaatttaagcttattattaataccacaatctatagacacatttagaagagatagagtttatagttgcgcaaatgcgcaacttaatatactagtttcagtgatatggaatattagattaaaattatttacatcagtgataacaattcctctttgagattgagtctaaaaaaggacccatatttgggcagctatgcatgtaattagatatggaatttatgttcttttttaagactcgtgacttcttttaatgatatggaatattagattcaaagtatttaagtacatgagcttaaaaggccccatgtttgggcagctatgcatgtaactagcatgggaagatgagttataacaaatattgaagatggacggttactatctgaggatttcgcatggcttccctgcaaaattgtctcctatttcatttcttttccttgaaagaatgggaagatgagttataacaaatattgaagatggacggttactatctgacgatttctcatggcttccctgcaaaattgtctcctatttcatttcttttccttggaagaatccatttgatgttcagtcttcggctctgcaagagttgttatagcattgaaagcagaggtcttaaaactccaatgacctgcattttgtcccagttcattccgatgcaaagtacacacaattgttatattatcttaaaccccagttttcttctaataaataccagtgttatctaccaaggaaacaaactctatgaatattatcgcaaaatctaaatagagagcactctcgatttagtcataacaagtgaccccatcggcattatctagatatgtgttaacttgaagaatcttactttactttactatgtagtactagtccattaagtaagtatggaaaatattcatatcatctacgcttcaaataaaattctcttaaattactcatccgatttataatccgattacaccgttgtgttcataacaattaaatctttacaacaagatctcacatgattatattttgatgaaaaatcacaaattacttttatgatatgtccaaattacttttagatttcactaagttacttcttaaacatataaaagtaaattcagtaaaacctaaaagtaatttacatatattatagaagtaacttagaacaaaacgaaggtatattataaaagtaatttattatttttcatcaaaatataggtctaatcggattgtagatcggatgagtagtttatgagaaaattgtatttgaagtatagatggatagtgcctctcatagatgcagtggtagctggctaccactaactgtgtagtcacgtccaatatttatacagtagggacagatatttttttctcctcttgaaatttcacacgaaaggtcgctaaattcccttcctccggctagaagaaacctttactcaaaagttcctatgacgttatggaattacatgtttgtcctcaggtctttcctttgttttttttctccattttcttttatctctctctgtcacatattcatttttacaaattcagacccttgaatttacacgcagcccaaccacattccccatcacttccacccacccttcacacgcatgcaacgaccaggattcgtccacgtcatccctcctcagcatcaacggccgggattcgtccacgtttgagctccacatgcatcggcggcgaccgtgcgtcacggatcatcgctcctctccaccattgcaccgtgttcgtccgttcgtccgcgcggtcacgacgcgccgccgccgc

SEQ ID NO: 14328 - DNA, 2363 bp, Oryza sativa
cttctccgcgatcatggcctggcactccacgaacttgtcctgcgacgcgtcgaacaccgccgccgccgcgagctcggcggcaattaactcctcgcggaactccggcgacacccaccacaatcgctcgccgcccgtggctggcggcatggggaacctcctccgccgcagcgccaggatcttgtcgaccaacgtcttcgtcagcagcatcgtgccctccggtagtagaggccccgtgtagtagtcggcagagccgccgtcgtcacccccctccaggatgtcggcgatcacctcgtcgagatcgtcggagtcggattcggattcggactcgccggcggcggaacccgattcctcgtcttggctggcgacgttggtgcagggcggctccgtcgaatcgggcaacgccgccgcctcctcctccgccgtgatggcgcactgattgaactgggactccaaggcaggcatctcgccgtcgacggccatgggtggatgatttcgcggcggaatcttggattcgttttcaagatttagcagcaaggggtggcgccggttataaaggcggaggcagttcaggtacgagacggagtcgcgttcgcgtctaactgcgcaaccagcgacgagagatcgaattgggcccaactaggccggtacgatttttctttccgataagttcattggaggtcccttaagttgacaccgaatccgattttgatccttcgaatcgaaaaaccaaatagaatggtccccccaacttacagaaccagtgcaaactatgtccctcaacggaattgttcccggttttgaccgacatgacatctacgtggctaatttgactaggtcttcgtcccaacgtggcccttacatggcaatttgattgggaaaataataaaaaccgtagacccatatatcaattacaacaaaaacataattaaaaaaaggtgacccacgtaagtcccacatgtcattctcactcccctccctccttcctcctctctccccatctcccctctcttcatctctctcccctcacctctcttttctcctcgacggtgaggacgcccgacgaaaatggtgaaggggtggaggagcgacgcggcgaggtcggtgagggtggtccctctggtcgatggtggtggcggtcgagttaagcaacatcgaggatccatgcagaatactgaggtagtgaaaagatttattattgtagtactccatttgaccaacataaaaaattgaaagtagatttgtattgcattaatattcaaaggccgaagtaactgatgcatgcggcgttctttgggtcctcgaccacaagtccacaccatctctctgcctgcagtagcctcgagtcctcgacgcggccgcagctgctgtctcacagcgaaggcgccaatgcatgggcctatatgattactccctccggttccatattaattgacgctttgaataaggttgaggtcaaactttaataactttgaccatcaataactttataaatatttagtttaaaggaactagaacaacatatatagatttgtcttttaaagcactataataaaagtaaacatgcatttatttattatatatattataatagaaaaataaggttaaagatatatctcgtagaccgtatcattgtccaaaacgtcaattaaaatgaaaccggagggagtactgcttattgaaccatggaaggaatcaaaaggaagaggggaagaccaaggcaaaaatgtctttgtgatattatttggtactctcaaggtttttttttaattaggtagaattaatctttgttacatatagaaggagttttctctaaaaacaatttggcatgttcatcagcattttgggatgggtttgcaccacaaagccaaccccaactgacgacgattagttttagacggtttgggtcaccggatatgataggttagaccgcttagtctttcaaatcatttgacgggaacacaacaatcagagaaaagaagggagacaactatggatgggtagtttgcgataacccgcgcgataagccactgtaaccagggtcttcgacttcaaaagaaagagaaaattgcagggaatagaaaaccacaattaacctcatatttgacaacaatagaaataattatgatgtccacgacaacacgactacaaagattatacttatagtgtccataatgtaatgttcaagagcaccaaaccatgattttgaagcaacacagcctagtagttatgccaaaatatggagttaacttagcattttcataaatttatatcacgaggtatcattacaactcttgcactacttctagaattctttggggattttttttccttttttttctaaaatttaaatttaaacaagattt

SEQ ID NO: 14329 - DNA, 8930 bp, Oryza sativa
ataaaaaaaaatcttttgtcgtgatatgatcattattcatctatatcttgctcggatcaaattccacaacaaaaaaacaaactgtatcacgttttttcactaactcagaagccatttgcctctccaaataattgagacgctttgtgttggaataaagtgtgcgtgatcaaagatttccagagcttgattactagcagcatcttttcagttgggttcttcttgagtacatgtgggacatgaggaaaaggggttgatatgtttgttggaatagttggttggggcaggaattgtcaagcccttcccttcccccttgtggctcattgattttgactattggggtgtcgcatcctgaaaacgtcactgggacagacaatgcagaggattggctggtccagcctaagccatgtgtccattctaattctaaactctcatgctggtccaagttggcaggtgctagtttcacatcactccaaatggcacattgcaaatttgcaattctcctttttttgccaaagaacaaacaaccttttttacacactgttgtttagtttaaccttttttttttaaaaaaaaaaactcattggtgcatgaaaggagcttcatgggttcaacacccagtcagtatatattaaggtagttaggtggcaatagtttactattgagttaaataaactaattgggtgaagacatcaatggattgattcttctctgtgcccacagctttagcaagaagtcaaaattcacatggatggagcagaagtttaccggttaccactgtttcctctgatcttcctcttggagatcttcctcttctctttttatttaaccctttttgtagataaaagtgttgaggtggggtcagggagaagtgcattcctcctgcaagtgcaatttgtaaatggccaaattgaatctgactctgttttgcatttgattgttgggggggccctgttgtggtctgaatggaattcttgtgtgaccttttcacctccaatcatattgctgttttgttttatcttatccttgcagccattgttgttatcaaaaaggtagttgtgttccccccattgtaagtacagagagtgaccatcaacagtttcagtgcaatggtctagagtaaaggccccatttgcatctcagaatatctgtacaaattgaactgtttcctatgaaatttctgtgtttcaaacatgacattgagaacgagcgcctggttcaaatgcgaattgaactgtttcgtgctaaattcttacatttcaaacatggcattgacaatgtgagacattttgaatgaaagggattcactgcaaattggaacaatttctctagtttcttttttcatgaaattcctatgtactgaaaatttgcaagatttggcatctaggaaaatccgcgcaaattgaactgtttctcgtgaaattcttctgtttcaaatataacactgataaataagggcccgtctcgaatgcaagaaggaacaatttctccaagttttttttatctctaagggttgtattttctcctgctctattcaatgaaaacactctagtgctgtttttcgttcaaaaaaaaattctccaagttttttgtgaaattcctatttctgaaaaatttacagtgtttatctgaaaatttacactgttttggtgaagggtttgcaggtacctgccgttgccggagggggcgctgtgcctggtggcgtcgacggcgttcatggcggagctcctcctcttctacttccactccaccacccaccagggcctcgagggctactaccactacctcctcgtcgtcgtcgtcgcgctctgcgtcgccaccaccgtgctcggcgccctcctccccgcgagcttccccgtcgacatcgccagcggcgccgccatcgcgctccagggcctctggttctaccagacggcgttcacgctctacgggccctcgctgccggcgggctgccgccgcgacgccgacggccacatcgactgccacacccacgccgcccaggagcgcgccgagcagctcgccaacttccagctgttcggcctcgtcttcctcgtctgcgcctacgcgctcgggtgcttcgccgtcgccgcggcgaggcacgggcaccccgacctggccacgatgcacgccaagcacgtcgccgccatggaggcgcagctcgccggcgccggcgccggcgagggggacaggttcgtcggctctgcgctgccgctggaggacaccgcgatctaagtgagcgggctcgccggcgacgtcgctgtccgtcgtcgccgccgtcttcttggatttgggtataggaagaggaagtagagtgcatgtgacacgtggcaggggcagttcagagttcagaattcggaattttcagatcatgaaacgatcgaagagtaggaggctgcagattaattgggattaaccacaataggggatacaaaattcatggaaactttgatttgatcagttgcttgattgatcctttttgttgtgattacgtgagggtttatatttggattacgatttttcctctgatcggtgcagaggttttgtcttgtacatcaaattggttactgggttatgcatacgacagcattatggatgaacagcatataattagaaactgtttttagacatgttttttgtactttgatgtgatcatacggtttgtttggttggagggagttagtgatgaggaatgggagtttatgatatctaggagtttaaatctgtagtttggttgaaagacttgggaattcgagagggtttgggatagggaattaagaggtccaattcccatcaatctcttgcctgggggaggcctgttaattcgtgagacttgtagggaattcgatgtgaaaccaaacaagagatggggactaaaaatgtaactcccatgaccaatcccaccatcaactccctccttaaaactcccattcctcttctcttctcttgccaaacaggccaataggtccattcagattggcaacccgtcttgctcctgtgcaatgtataattgtacattggcttgtttaatttgttgctgaaattaaccttatctgacacactttggagtttccaaactttagcaatgttggatgtgtgtagtttgtagcctaaccaaaatttagtagtgtttgtatgagaagatacttttgaaaataccaaaattttggtaaagtgacaatgacaaaagtttgcttagtttgttaccctaacaattcttggttattacgaaagaattggtaggactgaaagtggtggtaaagtgaaattggtagagttgtggtttatttcgaatttagaactttacattcggaatcaatttagggccaacttttgtcactttgctttgccttttaaactgtccgagtagaagtacaaaaattcgtcttcagatccgtgtaatttcgggacattttattgtcactttcttcacttagctttcccttttagactgttagagaagtataaaaacttgggaaaaaaaggaataagttcccttgaggtcccttaactcgacgagttcaatttgcatcctagaaccataataccagatacaacggatccctcaactgtcaaaaccggtataatataggtcacatgacggtttagacggtggttttgatttcgtgacacctacgtggctaatttgactcggttttcatctgacgcagcatatgaaacaaaatttaacaattttaaaaataaaacaaaatatatggacccacatgtcagtcaaataataagataaaaaatagtggagcccacatatgggcctcatgtcctccccctcatcctctctcttctctatctctcccattctccttttccctcttccccttctccttccccggatgcagccggcacaccaacgagcgagagtggaggcacggcggaggcgtggggatgccaaatcgacggggaagaggtgggcactacctccactgttgagcatgtgggcgtcatggtccaccgacgagtgtgcaaagaggaggacgaggcggggaggccagcgagggaggggggtaggtgggcagggaggtggcggcgaggccggcaagctcctcctaagtccaaatccatcatcgctgacaccacctccaacgcgcgaagagggaggaggcggggaggctggagtgggggcggggatggagcatcatctggcctgcacggcctaccgcaccccggccatggtaggaaaccatgtctgtcgtcgccgccaccatcatcgggatctggatgcgccacccgtcggccaggttgccacgtcacatcttccacccctactccaaccgggtcaccgctggcatcgtcctccacagctttggcccccccaactacgccgctccactaccacgctgtcctctctagatcttggttgctgacgctactccgggggacccacgtcgatatgcttcgcccatcgctctcgccaccccctctacctcgcctcgtcgcccaccgagccactagcctcgtcccctttgccgtacctccgcattctgcatgggtcctcaacgttgctggacccgaccgtcgccaccatcgaccagagggaccaccttcaccgacctcgccgcgttgttcctccaccccttcaccattttcgtcgggcgtcctcaccgtcgaggagaagagataggtgaggggagagagatgaagagatgggagatggggagagaggaggaaagagatgaggggagtgagaatgacaagcggaacccacgtgggtcccaccttttttaattatgtttttgttgcaactgacatgtgggtctatggtttttattattttccaaatcaaattgccatgtaagctctacgtcaataccaagtgggatgaagacctagtcaaattagccacgtagatgtcatgtcagctaaaaccaggaacaatatcgccgagggatctagtttgcgctgcgttttgtaagttgggggaccgttatatatggtttttttgtttcaaatgaccaaaatcggattaggtgtcaagttaagaaacctcaaatgaacttatttcaaagaaaaattgtaccggcctagttaggcccaattcgatagggggtgtggcaggtaacagtgtggctagcagcatagccatgatcactgaccccttgtcgccccgctgattgtcctccgcgccaatcgtctctccgtcggcgcggttgttgcatctcgcgatggcagcccttgtccttgtacaaggtcttttctcctctctcacccagaagtccattttaccttcctccttttaattaattttaaaatattaaaccttcgaatcaaattttaacatactaaatgaacttatgtgaaaacgttgtaaaaaacaattaaagttgtataacttattgagatctaccaatcttatttttgttatttctccatctgagtttgattgatctatacaaaatttgaatttcaaattatgacaacttcaaataacattttaaatactaaatgatttcaattaaaaaagttatcaacaacaaagttgtataacgcatcaatatctataacttttgttttgttcattttgctatatgactttgttataataatttgaatttgaatttcaaattatggcaacttcaaacaatattttcaaatactaaatgatttcaactgaaaaagtcatcaacaacaaagttttggttaatctttgttatctatatagaagtcatcatcaacaaaagattttagaactaatctttgttatctatatacaaattttggttaaactcataaaggaactttactatagtgtaaacactttagtgaccaaaattcttagataactttgttatctacatacacattttggtcaaactcgtaaatgaactctactatagtataaactctttagtgataactcttgttaggtccatatagtgacttttaaaattaatatacgagcaattgtcaattcttatattgcaagtatactggtaactagcattagtaacacatattatgtgctacgacagttcttcctataatactgtactgtttcacattagatgtagtatgtgttacagcctttcgtgtaacgcatgctttgtgctactgtggtattctcatgtaacatatatctttatgtgctacaagtttatgttataatagccctgtcctgtagtagcgaagttggtgaaatagaaattcagaatcaaagttcagacgcaacatgaatacatgatggcctggaaaactacccaacccaacccaaccaatcgaccttgcagtgcacaacattgaaatttggaaactaccgccacatcaaattcaaattgcaattcaaacttactagcatgacacgcaaagcaggcgcagacgacagcatgcaccatcatgcatggttaccattgcaagaatccttcatatacttatctgttgttttccataccagaacatattttatgaaacacataattaacactcaagtttctcagatcaagtccaccgaacttttaacatcaggtcaatatatatgtaaacctcgtaattccgaatgcaacagccagcaaaaaatcaacgagatggatgcacctccataatactagtaataactctaaaagaattgttggccattgttgcttgtctccatcttaacctacacatctggtcagcaatttctgaagcatatgaccaaaccccaaacacatcatcctcagacctgtaacaaactaaaaatagctcagacaaccgttcacgaaactagactgcaactaatacaaggcttataatgcaagattggcatggctgcaacaattacagacatcatgcaaataattaagctcaaagtaatgagctttgtagtaaacacacaagaaaaaccatctgtccctgtacacaaatcaaaggaacatgcaacaggaaaataccttctagttttcaggcagtacctcttaagccaaatcttcacatgaaaaaaaatatgccaacctgaatgaattggagtatattaaaacagtaatgaatacatatgccaaaacctaacaatctatcaaattgatgaatcatgctcaacagggcatcttcataaccgccaaagaaaaacaataaatagaccacacaactggggaggatcaatgatcaacacaatataaaagcaaatatagatacactaatccatgtacatggatcatagtcgtattaaagagtgttacattgaccaagcccaattaacttaattagctgcatacacattgcaccttgcaccttgcattggagatgaagtttcaattttcacataagttagaatcccaattagaatcattattggatgaagtttcaatttgcacatcagttacagttacaatcatagcccacccataggtgaggtcggtccatgtcggccgacacacaggtgagccatgtttaccaggagtaacaagttcttaaagccttaaactacaaaaatgcttcaacccggtcgtccgatcttgagaaaaaaaatcggacgcctcttactgtgattttgctgcatgcagcctttgtcagatcctctctctgttacatatacttcctttgtgggtattaatatgcatgaaagagagatgacacgaggttacttgcatgtacataacacacttttagcaaacttgaaaatgatttttcttctaaattactcatccaatttacaatccgattacaccattgtattcgttacaattaaatctttacaacaagatctcacatgaccatattataataaaaaaatacacatgtttcaaccaattaaacttaatgtttcacatatgaaaattagatgtttcagctgaaattctattatgttgcacaaatttatttagtgtcacgatgtatatatctttctttaatgtatctcatagtgctatttgtatgtttcagtaagtagtttattgtgtttcactggtttatttgtaaatgttgcatatatgttggttgagtgtttcaataagtatccactagtgtactcacaatgttccactaaaaatgttttacctagtatactcacaatgtttatgtatagatctaatattgcagtgaattgaaaaaatcttttgcaacaaataacccacatattatggaaatcatctattaagagaattcattttattttttgttccacaaaaaatatttcactttatataaatcaaatgttgcagtgacttgaaacattctttcgctatttagtgaaacattgtttttatataaggtgaaacaacgtccggtttaaacgattgaaacattttcgatttatctagtgaaacaattccgatatacttggtggaacaacgtgcaacatttaaaaataatttaataataagctaattttttttcaccagaatatatccatgtgtggtcttgttttaaagatttaattgcaatgaaattaatggtgcaatcggatcatgatttggataaataatttaagaaaaaaaagtagtttaaaatatttttgcatgcatgcatgcttgatgatgttggatggctgatggcgtgcgcgtgaatcggacggctcttggatgcgttctcccttaaactagcgtaagtcggagcttgtcttgctccggcctgaggagttgtacaatatgtcaaccttcatgcaaattgagattagtaaagctagcttcatcctgtccaagatgcaattttcacatatacttttggacattaaactaacataaaagaaattctacaccttcagtccttcctaaaaagtactgtagaatcgtaacaaaacaaaaatgcgattttctatatatatatatatatatatatataaaaggatagataccaatggacagtcaactaacataagagaaaatatatgcctctaatcctccctagaactcatagaaccgaaacaaagaaggaaaatattttatcatctcaaacgatatatcatcctttgacagcaactttcatccttctcctcctccttctcatccaca

SEQ ID NO: 14330 - DNA, 6706 bp, Oryza sativa
aagttttaaatagaatctaacatgaggtagaaacttatgaaaactttcctttgatattttatctctcctctaattcttatgttttttctgcggttcaattaaacgattattcttgtgttttttctatgtttgtaaatttttattttacgcttatattcctgttaaaatcatttttatatctattcctaggtttttttttcaaacatacaattcaaagaggccttgagcctctagaagcaatgattggactacaggggctttattgtagagtattggtaactacgagaggtgaagtgataaaagtgggttttcgggggagagcacgggtggtacagtggaagggcgcggtgttggtggaccagagctgacgtggcgattcggtgggacgtgattgggccaggatgcaggttggtggcccacttgtcagtgaggggatagggctgggtggcgatggcctcggcgttggtggacgaggtgtatgggccgggggcgtgtggagtggatagggttggagtacggcccacagatctggtgcttgtcagagtccgtgtggcccatgctgtggtcgcttggctggaggcaggcagaggatgggcactgggcatggattctttgcaggctagcagagagagatgctttgctctagggagatagagccagcttttcccaatctcggtgaaaatgcaaagccttgtttaattctaacttttttttctttcaaacttttaattttcccgtcacatcgaacttttccacacatgcaaactttcaacttttccatcacatcgttctaatttattcaaactttcaattttaaggtggaactaaacacagcccaagatgaaatttcatggattttaaacgaaacttttatatacgttggaactaaggctccattgtttcacttattgatggaataagcgatataaaataatttgtgaataaaacttgtatatacgtgttcttattgatctaaaagtaaaggctgaaaaataaactacgatgaaaaaatcccaaaatcaattccaaattttaggttgaaaattcaaattttggcttataagcataagcataagccaaaatataggcatttaatgatacttttcgggatctaacagtaaagttggaggagaaaactgagaggtttgatggaactctctgaattccggtcgatgaaattataggtgcgacgagcacattagaaacggtacgtgtatttgagtcaaattttgagccttgcttagcacccctaggatgttttatactcctcccatccaaaaaaatataagggattttggttaatacttttttctaataacaaatgacactatcggtaatcactcttcattcgctccttccccttgcatcaatttgacccaatgacaacggttattgtgttttccttacagacttcttactaacaagaatcattagtaatctcgacagtatggttgaataactaaaagtcataaaaagtcaaaattcaaccacaatgtgacacctagcgtttgtaggaagtttgtaaaaaaaaagtatgtgtatcatttcgctattgtgttatcatgcctaatcaataaacagatcctatggtttgccatggtttttagctaactatggcatactaatagttgtttttttttttccgatgccctacaaatatgctggtactttccttcagcaagtataagcgccctcgagagttacactgactcatctagtattgatttggtaggttttggttatagtccaaatatttacaatgtactattcaaatggctagaaaattaagtaggataaattttggcttcaacccaaaacgggctaatgagtccaagcagacactcaacgtgcataagagtttgcttactgttcatccattattcctattacaaattgatgtcagtcactggaagttgaacaagataccaggaaggtgcactatgatccaactcgaacacaaatccaacatctgacatgagtcccgttgatgtaagtatccatagcaatattatgacagtggtaggctttcattgtctgcttgttggtttattaccaaatattgaattttgaagcttaattttagagttgatcttgggttatttttctactatagtcattttttcaatattgacttttaaaccatgaattataaatacataaacagctttatcgatagattagcttttttttttcacttcgcttagtttttatacggcttagctctatggatcagagcgttgatagatcaaagaaaacgttggacgtgtttggatggtgctttggcttgagtactcttgcccagacatgtgcatctaaacacatgctactaaaatcggacgcttcttgaggcgtaaaccaaacaggcccgttgtctagatgggcctcaacatcgatccatccatgtagctatggcctagactacatctaaaattccggtccatgcatgtatatagatcaggattgaggccacctaaaccagggcggaattgtacataggttgaccgatatgtgctgaccgcttgatggacaaactgaggccgtgtttagttccaaaataattcttcaaactttcaacttttccatcacatcaaaactttcctacatacacaaacttccaacttttccatcacattgttccaatttcaactaaacttctaattttggtgtgaactaaacacagcctgaaactaactgtgggtgtcaagtctctgccactccacgacggcgcctcacgtcatcgtgaacacatacccgtgtacatgcatgcatggtgttcaacgtatggctcacctgtcacaccactcatcagttcacccgagcaccaacccatgcatggtgacgtcgccgctataaatatcggcaggtgcagtagctataggtacctatcctctgatatagacaaagaaaacatcgatgatgatgatgatgacgacgacgtcgtcaatgtcgttgttggtgtactccgccacgatgcgtcgtcgtggtgatggcggcggtggttggcgtcgacgtggtggaggcggcggtggtggttggcgttggtgtggtagaggcggcggcggtggcatcgccaaggtgcaacccaacgctgctgacaccctgcgcgggggcagcactgttcggggtgccggtaccgctggcatgttgcgcgtagctgagggcgtaggcggcgtgcctgtgcgcgtacgcgcggagccccaactacggcagatacatctgaagccccaagaccaggtgcctctttgttgtctgtggtctccctgtgccgtgctgcccctagacctcaattagcttgcatcggtcatgcccatggccatggctttggaactctagctagatcatggatggatgcacagtttaaattattgtgacatgaataaaatggttgtcatgttcagttcagtgatttatgatagcggtttcacaaaaccgacctgccggttcctactggttagcactagttgtttgcaataatttttatagctaactatgacacactgtttttttttggtcctactaaaatgttgatagcttttcttcaacaatgactcatctatagatttggtatgtgttggctacagtccaaacgttttacaatgtactgttcaggtgccccaaaaatttaggtaggacaaatttttgttttgaccgaagacagcctaatgagtccaagcagccactcaacatgcatacgagttcgcttagtatatatctaatccattatacctgttagtcactattgtcactcgttgaaggttgaataatatatcagcaaatcgcactatgatccaattgtagcatgacatgggtcttcatcgtttgctcgttggcttatcacccataaccaaaaaatgaatttagaaatttaattttgaagttgatttggataattttttttcacctattattttttagcattgacttttaaagcatgaataataaataggagtatataagacgttgtattaaattctttttgacttggcttggttttactacttctcattagccttatctccacgggtcagaacattgatagatcaaggaaaaccttgtctggatggacctcaaccttgatccatccatgtatctgggactacaagacaacagaaatcccagcccatacatgtagataggccggattggcgccatctaaatagagaaaactaccgcccggagattgcatctccgatgcaatgtaaggatgcatgcatttattttccaaactatttatccaattgtcattctaattatatcgttatattcattataattatttttttacaacagtatctcacacgattatattttaattgaaaaattacatatgtttcaaacattaagttttgatgtttcacgtgtgagaggtaaatgttttagctagaattcgaatatgtggcacattttaagttttttatactatgcatattgttttagtgctgcacacgaaatcaataaatatattgtgatgtttcattactttatttgtgaatgttgcgcatagtgttatttagatgtttcagcaagtataatatgtgcaatatttaccaagaactagtgaaacattagaaaaatatttattgaaacatgtgtaacactaagaagagttagaaaaaagtcatcagaatatactcatatagtcacgtgagatcttgttacgaagatttaattgtaatgaatctaacaacataatttgttcatagtttggataaaattataggagagaaaatgaccatttgaattttcaatcaatatgaacaattttactaaatctgactttatatacctaccatacacccacccctactattttctaggctaggaagcgtgcgatcttttcctttcacccggacaactcatgagaagcaattttccatctaaatcgggccgaaatggtacacagtctggccatgcaccgcttaatggaaaagtttgaaacgaattgaatggctcctcgtgtcatcgtggacacgtaccctcgtgcatgcgcgcatggtgttcaacgcctagctcagctcaccgctctgttcgcgtaccactataaataccggcagctaggtagcaagctattgatagagagaaacacaaaggcatcaatgatgatggggaagtcgtcaccatcaacgtcgccggtgtacgccgttgccgccgcgctgctgcttgtgtacttgatggtggccatgggcgccggcgtggtggaggcggcggtggtgccaccgtcgaggtgcaacccgacgctgctgacgccgtgcgcggggccggcgctgtttggggggccggtgccgccggcatgctgtgcacagctgcgggcacaggcggcgtgcctatgcgcgtacgcacggagccccaattatggtagctacattaggagccccaacgctaggcgtctcttcgccgtctgcggccttcccatgccgcagtgctcttagatcttaattagcttgcttcgatcacacccatggctatggctttggagctctagcatcatgtgcacagtgtaaaatgttgtggcatgaataaaatggttgtcatgtttagttcagtgattccatgatatcaatcccaaggtacagtagttaattactttgctaatcaatttgtttgtcatgatgtgatgatcgaacggtggaggattattcttgcatacagtgcgcggggttttctttcgtttgtttgcgtcgttgttctttcatggtttcttctccctctgattttgttgtagaaaggcgagctctttagtacactagagatcatccctaataacggcaaactttcacgtgaaacggtttttcagggaaacaatttttcgtttttgaaaatgaagtcaatgtcacgcaaaccggaataggtgattagcttgcaaagtgcaatcagttaagtagtattaactattttataaacataaaaaagaatatagattttttttccacaaaatacaccgagtagcggtttaggaagcatgctaaaaataaacaagaaaaaagccaaacacaaaatctgataagaagacaccatttaaccgtcatcgcacaaaacaatgtttattatagaggaaaacacaacacagttatttttggatggtaattaattgtctgctttctttttttctttcaaatttcaaaaattaattgtcttctgttttgtcatgtatgaattacaatgatgtgtttgatgtatattttatagaactctagttttttttgtagcatttagtttccttctatgaatataatgttttgcataaccgttttgttttggaaaaaacaactgaaagtgatatgttgattatataattccatattgattttatagttaggcaaattgttgtagtgtgcatcccacatataagcctagttgccagatatgagctcagcaatgctctaaagcagttgttttctcttctttttctttttataaaaaaatggttgtttggatgttacgcagaaaaaaagagagttttggacatatgaagagaaaaccataagataaaagctaatgtttgttttcctccaaaatcctgaaggaatggttcattcaataggattttcaaaggtatctttagggttaattcttttgcatcaaatccttagaatttaaatcctccaaaagtcctaaaaagagccccttagaattcaaatcctccaaagtcctaagaagagcccttgattgagtcaacatcttgttatatattaatatatatattcta

SEQ ID NO: 14331 - DNA, 10087 bp, Oryza sativa
atgggtcagtgtaggaggcggagggcaaaacggaatatgtgttaggtggaggcggccggtggtggcgcccgccaccggagacggggaaaacggccgccatcggcttgagggaggaagaggacagggaggggaagggggaaggggagggggccggccggggggacctcaccggcgccgttgactctcttctgccagccggcgaggcgggcggcgtcttgttggggcggtggcgagattggcacgcgaggcgagcggcggcggcggaatgcgcgaggagaggaatgggaggaaaaagttagggttaaggatgtgcacgaatcttaaagcatatctaacggtccaaaatttgaaagattggaggtgagatttccagtccacagatatatacagtccctaaaaattaagatgtatttagatatgacatatcattcaataaatatgcaagttaaattttaacttttacatgtcacaactgagaataaaacgcccgtacgtttacatggacgtgagggtgttcgaggcaatgctccgttacatctacaaagattcgttgtcggagatgaacgataatgaagtggcagccatggcacagcgaacaggtatgacccagagaggctgaagcagatctgggaggacacgctgtgcagccacgtcaacgccagcacagcatcactgtgatggcctcatggaggcttgcttggaattccttgagagctgtcctgttgatctggatttgatgtgagatggctgccaatcttgctgtttgatctggatttgggagcagcatatatgagttcatttttatttttcaagcatttcagatgtgtgcatttgctaatccctgaacagacataacttgtacatagcatggttagtagtcttgtataaggctgacaaggcatgccatgctcagttgctcactagtcactcgcaagtgaaacttagtaaaaaaaagaagttgtggcattcatctgtatatcaactcctttcagcttgatgtcaaaaaaacactcctttcagcttcgatgtttcaatgataagagcttcagagaacacttccagctttatccctgacaaaacaagaattttgtttctacttattaaaccggtaagcgtttaccactgtccgataacaactctgatacatggcgacttcgattaattaatcaacagcgttctacaaattttggtctatctcaataatgttctaaaaatttcgtacaccaaagttacactgttcaatttatacaagagcatggttgagaacttgggattcccttgaggactatggccaaaattctcatgttaaaaaactgagcaataaactttgatgctctcggttttgctgtaaaatgtgccatggcagacaccatgaaccagaatgtagggccttgttgcctgatcataaaaatctcaagatatgcatgccgtcttcgataaattctggagcaaacgggtaaaaaaaggtcggctcggagagataaaggtagagcgagaggcctggattctgaaaataagtgaagaagaaaaataaggctgagttacccctactcagctgacattggatctatcggaccaaaatccttcagtggccaaacctatgaaatagcaatattgtcaatgctctaatgacctgaaggcaaaactcaatagtaaaattagtaatgacattccaggggggaatgaagaatggcccccaatccctgtgttgatgcggttccattgggctgatgcactatataaatagtagcaaaacatggtttctgaatctgaaacctttggttgctataatgaacatcaacaagtagtaatttcaagcaagacttcatggtccacaccaaattagttatatgaactttaagtattaactttatgccttaccaatcaaatgatgatagcatgttgctatgtgaactttgaatgaagaaacaaaatgtcattttcaaggtacacaaatgattaacagacaaaatagcaaggtcactgaaatgaattcttttcccaattaaaactaacacccttcctacttggctttaattacaagtactgtgctaagtcatacagttgaacaaatctacagtactccagaaaccttgtacgtaattatatcagctatttcaaaaaaacctcagcaagtacctttcaagtagaaaacatttggtgtatttaggccaaataccgccaacaaaatgaacgcggccctgatcggggctcgctagttctaattgagcacaaaactgaaatctaactctgtttagaagtgatagaatcagagttgtactcaaaggaatccagagcttttaaagttcagtgggcagcatataggtgctttgcccagagttgtcctagacacggtgtaaaaattcatctgactcatcaccaattattaccatatatgggcacttgccttgaggcatttaaaatgcagagtacttaattcatagcagctcaccagttgaacatataggaacaatattctaaaactataatctaagaaaagatgtacaatgtgtttgctaaagatgacaataaaattttaatttttgtgagtaacccagattgttgtaattgagtatagcaacaagaagcaaatgaagcacttgagactacatgctgtttaccattactacacatattcacatcctagagtaaagcttttattaaccctaaagtttttaacaatcattggttgcttacacaaaatctcatgatataaaaaaattggcatctaattagatgcaaaatcgaatcaaggatgagatttcagtggcatataaaggaaccataatatagaggaaatgagattacccgacaaaagatcttccctgtaattagaccataagggacaggtccaaactgtcttgaatctctagaagcataaatattatcaccctgcacccagacatggccttttggtacctataagtatacatcatccaaattaagagcatcacaagatggtatgtctgaaaaggtagtcaactagtcactataaaaagaattgaaaatcatataaagcatggagcttgccatgttcaaaatcagttatgttattgattgctatttcaaacataagaaatgtatcttctgactgaataatagtctcagcatcctgtcgtacatatgttattcgatcatataagcagtgaactagtggttgtctttcggtgttagtccaatgccaaaaattgcacataaagcgaaacatgaagtcaccggtcataccatggggaccataaaacacagcgttccactcattgtggagacaatcagtgtgcctctcaagtatctattgttcaaatgaagaaaaaaaaatgtctgacagcgagccaggattgtttggtttaaggcataggccacacaccctcaccaccgaattgtgaactcttaatcatgaaacataagttcatccctttattttcacatgtgtactgatgctcgagcaacttaaggctatactcttgaagtacactactactgagcattctcgaaatctacatttattagcattggtaccgaccaaatctggtatcaagtggtaagcaatgacctgaggaagcctttctttttttttctctttttaacaaagggcaggaagcatatcctctagtgttagtttgcattatagcagagaaagataaattctactactaatcttttgcaacacaagagaggatcaaaccaaatctagctaattgaaacagaaactgaagaacctaacaccagattaacccaagctactcaccacgacggtcttggaggcgtcgctgttgccggggtcgacgaggaacgtgacggcgtcgccctccatcccgacgacgcgcttgacgaccgccttgcgcgggttctccggcgagacgaggagcacggcgtcgccgctcgccacccgcccgagccgcgcgctcaccaggtccaccgccaccacgtcccccgccaggttcatcgccggcagcatgctcgggcccatcacctgcgccgacgccaagagccccacagaacgcgggtggggatcaagccagagcagagcagagagagagagagaggaagaggagacgcgggcgaagtacagtaccagcgcgaaggagcagacgtgggcgttgacgacgtggacggcgcagacggcctgcgcgacgaggaagacgcgggagaaggcttccccggcgatctccctccacgggatcccgccgaggcgccgcgcgaacccggacatggcggcggcggcgaggagagctcgggagagttttttttttttttttttgggagaggtagggagagttctgggagaaaagacgagtagtacgtctttggacctgggccatggaagcccacagcaatgggccggctttagacctacttattataggaataagtttacttcaggcctctttattttgaggtcgagtttgaatcacactgtcgaaccatagtaccggatacgacgtatccctcagaagtttcagctgacgtagctgctgcggaaaagaaaaccatagtttgagccctaaggtatggccggtgacttgagatacacttatgttattgattgttacgtaagccgcggaaaagaaaaatcaataacataacggtgaaatcgagttccaatcaggattttgagaggatattgcggcgcaagacgacgagcgagctcgacgaggcagcaccgccaccatcgctcgcgcggctcaggagagaggagtcaaagcgacagctcgagcttagtgacgtcacctcccagcaccttcccgttgaccacacacgcccttctcctagtcggttctcacatgagaaagatggggaagagagagggagaggggagaaagaatgacttatcgctgaaatgtgaggatgcatggattccatactaactcagtcagattaaccacaatcgactcgttatgtcatccaaaaccaggcataacactgacctggggtcttgggtaatatgctattataatttaaggatgtgttatatctgtattgcggttgaaagatatgattcaaactcgatgtcaaaataagggacctaaagtgaccttattgccttattatacggtctgtattgcatatcaggccgtcaagccatctttatcccttctttatggaccgaaatgtagatgggcctaatcataagctgagtcagctagtacttaattggcttgaaacaagaaacaaccgttccggaaacgtttcaaatcaaagttaaaactttttttgatgagttcaagttgctttataaagaccaatcagtatttaaaacatgtctatgagcagagggagagagactggaactcgatttcacttttctcttttaaggaaatgtattatacagtttcggtagagtagacagtttcttggcatgaaaagaaaattatacatacagatatcgttaattgagagcaaggtaaaattaaaaaaaaaatgcgcatagagcaatacaatatgacaccgacatgatacgatgatagtaacagagggaaccatccaaataccaaaggtcgtttccatatctctaaaaatgcagaaaaacattatatatatgttctagatatatatatatagccagcatccagcgaagagaagattactagattggcaaataacaaaggtagaaaaggagaggttcaggtaaggcttcatctactatatgtataagggggtggaggggtcatcatcatcctccttggtcatacagaggcaggcaggcaatggtggtggtctgcttcatggggggtcaggtactcaggtcactctagtagaagacggcgttggcactctggtagccgccgtcgtagatggcctggctggctccggcgcccatccccatggcggcagcctgctttagggcggcgtgctgactcatcagggccgggttcgctgccatcttgctcagcgccagggtgcgctcgtaggctaggaggtcggtcgccgacatgccaggattgaatggtgctggtgctggagggggtaggggcgcggatgctgtccctggtggagttggcttgcttccccaggaacactgcaagtaggaacaagattaaagtttagctgaattgcaagaaccataactagactacatcctctccttacgataaaaactcggtgaaaacataacttgcggaggtaaatgccaatgaaattcagaatgttccaattattgatgttttgcaagtatttctggtatgctctctaataagcatgggcatggcaaaccatccttatgattgatctacccaaaacactcttatattaaatgtatttatggctgaaacattgaagatgaacgtaccttgatctgcctaccgccaataagttgtccattaccagtctgaattgctagagcagcttcttcatgggtgctgtaacgcacaaagccaaaacctttatcacgcgttacacgcacctcctcaattgaaccaaccccaagtgaatggaaaaatctgtgcacatcattgctgttgacctagtaaatataagaggcagaaacgttactggtatggaaaaacaacaaaatacagcacaaaacaaaaagaaatttgtttcagaaatgggagaggttacatcatgaggaagattgccaacataaacagtcgtgtactgtgggttgttttcaggaccatcttcatttgcattatcctttccaccttctgcataaaaaagaacatggaatactttacagttcagtactttctagccatttaacagagctcttgctcagttgattgttacattacatattacaatcatgtattgacttaaaccaaaacaagtgggccaggacaaaaggcatgtatattcacctgatgaaccatttgtcaactctatcatacccttggagtctgtattttgtttctcttcaccagcattagcaccctttgttgcccaattgcaacgaacttgacggttgccgagccacttccctgaagcaatgaaaagtaagcagaaatgatcaggtagctagaactaacctaatgactagtgaggcatggcaacaaacatggaaaaagactcaccattcagttcatttatggcattttgtgcgtcctgtcaatgaataacaaagatgatcaatcagcaccgcaccaaaaaaaagtacaaataaataaaaattaaactgtcacaatgacactacctgctgatttctgaaagaaacaaaaccaaaacctctggatcgtccagttttctgatcccacattaccctagcatctctggaaaaaaaatacatatgggtaagaaagaaaatgcataatcttgaacaactggtaaaatacccttccgataaaatgtcgcagctagcagagtgagaactggaaaaaaaaaatacacacagatacgtgaaacacttacgagcaactggtaaatccagcgaaaaaagcaaacaaagcagcatctgttacttccgggcaaagatcgccaacaaaaatattaaaatggcctgcaagaatgaacagacatcagcaaagctcaattttaataactcagattcacatgtacacagacagtacagaacaataattgcaaaagaacatttaacagtttttcagttcccaacctgatgtatcctctctttgagtacttgcatatgcccaattgacttttattggctggccaaacctggtaatgtaggatcataagaaaatgttggaaaatgttaagaggaaaagcaaaatattagaatttatatatattataatactatagtattgaaatacttacaattgtctaccgttgagtgatacaattgcaattgcagcagatctacggtcataatagtcaacaaaaccaaaggatgactgcgagatttaatacaaaaaaggaaatcatataagcacatgtatataaaaagtgtacggctcagccaaacctaagaagttaattacattaaatctgctgaaaacatttagccacttaaacaaactgatgcatcacattgaagctttctcaagagagatcaatactgtagttagtaacataataattgaatgaatttagctgtctggcctatgtgaataacatagcaaacattttgaaacttccttgttcagaattacggcatttgtgctagcctatccttactatgaaattcaactgaataaaatactccaaaatagtcactccagcatcatcactatagctctagtgttaaccattatgctgaaaaataaactcttgtatacatttgaactatggttcactataacagatttgcataagtcatatcatgtacaagttgtttgatgatatcggtatatcacgcttatggtactgggcagtgtcatactgtcttatagttattatcaagttttaaaaatacagtatgcgaatgaaaaatgaaattcattcaatgacagatttcagtaactatcagtttagttaattaattaagggattaggggcgggtatgcatgtgcttttatatggagatagataaaatactcagaacatcccaaacgatataaatgccttcaagtagcaacatttacaaggatacaaaaggatctagcgaaaacagtatagataatattttttttgttaggtttgtatcaaagagcaaagattccacaccttttccttcatgatgagcttgcatccttctactggaccaatactttggaagacctcatgtagcagtgaatccgtcacttgaagatggatattgccaacatacctattcagaacatcaatggcaaccataagaaagaatgaatgcagaatatctagccaacaatgcaatgctgcaaataacgaagagagctcgatccagatcagtggatcaagggcactctgcccaaaggcatagcattacccaatctaactatttcgtaatgttgcgaaatagaaccaaatcagtgaaacaacagtaacaaagttccttgggcataaacagggcaaaacaggtgacaaatacttacacactccggcatgtacttgaatcaaatccaggaggcaggttgccactaacaatgggctctatctgccagaaaataatattagtgtcaaaaaaaatggtgcacttaaatattttataatgaaaataattcaaggagatagaagaagaaataaaggagcaaaagcatacaagtcactgtaactgcaataatgtatgcaaataacatccaggttataaaaggaattcgagcataattatggtgtgttcaagtatgttccccatttaccacttgccccaaagaagtacaccttgttaaagatcagatgcagcctaaacgtaaacggtaaaccacatcctttaatagcgactgatctagcaatcaccagactagtttccactgaccttcaacggaactcatttatactagttcgcagtacaatctgacaaattcaaagttaataaatatgaaagcttaaacacaagcacagagaactataattcgtgtactataggtacttgttgggtctaataatacataaagatctgaaatttcaaccaaaacaggttcccaaagacgacaaattgaacaataaaccctatccccacaaaccctacgggaaaaaaataattttccccaatacatgcgacaagtcagagagactactacaaaatcaaaagaaaaaaactagagtatctgacaaaatcccaaccgcgaaacagtcaaatcctcactctcaatagtaatcaatcccactggcctcaaacactacaacatgaaatttaccgaatcgtgctaccgaaatccccaaaaacgaaaccctcgaccgcacagtaaaaatccaccaaaccctgaccgctgatcgaaacggaaggagagagagagggagagagattgggccacctgcggcgccgcgaggaggcccgggtgcgggtggtgcggggggaacaagggcgcctgctgctgctgcgccgccgccgccaccgccgcagcctgctgctgctgcatgagcagcgcctgctgcatcatctgctgctgctgcgccgccgccgccgcctgcttcatccgctgctgatgctgcatgtcgatcaatcaaccaatcactcaatcgatcgatcgcgatcgatcgatcccccacctcctcctccgcctccgctctcgtgtcagggatcagattattattagggtttggcctcaggggg

SEQ ID NO: 14332 - DNA, 6887 bp, Oryza sativa
cgcgacatacgtatttttgtagttataatataaccacgtctcacttatctttatgttacatggaagttacagtataagtacattacaattagactataatcatatttaaaagtttctacacttaaaaggaacttgtaatgtttggttagatggtccctcaaatgggatgccccataattatcaaaatttttagtgttagactgcttaaaatgtcagaagcacttatcacctcctcgccaccaatttttacaaaagaaacctctacgacagaattcagatcgaagcaacggcaaatcagacaaggaaaaataatcctatttgtgaaactaaaatggtttagacccggtataagtgaagtggtttcttcggggttttgaaatgaggtttctacgtcactgtcatgcgtttcttctaccactgaatcccacccatcttaaccgctacacctttcgtcccataaaaacccaacccttctagacatatatgtgtattcagatttataactatgattagattttttttagacggatagagtattgtaataaatttcccttccatcaacattggccttccaccttttcccacagcaaggcatcaccacagccacctcaccgcccccgccgagcatagcttttttttttcgttttgtcccaaaaatccatcgatgcccaggattttcgttttcaaatctccctaaaaaatcgtgtgatattattccttaaagtgttcccgaattgtctctagtaaaattagaattagtagctccctccatatcgccaatttctggtcctgtccagagttcaagtttactcacatagtcatgtttgttttcccggttttctttttcgagaatatgcataaggctttcgtatcttcatattaagaagggggtaaagagtgcatcatgacaattacaaaggtatcaaatgaaaaaaaaacacacaaaaaaaaggacattggggcttttatctcgtgtcattagttatgtgacccgatagtcagtcttgggctagtggagcaacccggcttcctgccagagagctgtctcatcccccttcattgttgccaactcggtctaggaatgtctcgttgttgaatacgctgctgttgcgttcctttcaaatggaccaagctattatttcaagtggcaccaccagctgacaaagggaacttgcgtagtcgggactcgggagcacgtcgggtaagctgtggtaggcaaagtatgtgcaaccatgcgacactctgcttttcccggttttaggggctatttggttctagccacactttaccattactccctccattctaaaatataaggcataactacccttaaccaaaaaaccaagaaaataattattatcatcttatagtaataatttaatggagaagggatcataactaattgcctacatgcatacataccttatattatggaacatctaaaaaagtggttgtaccttatattatggaattgagggagtatttgccaataaaagttaccacttgtctaaggtgagataatcaaattgttagctacaacttactaagcctaagagcaaagtcaataatatagcctgctgtgagctccaaaacataggcatatcatctatagtaaacagtataggtaatgtgtaaaataaaaatactatagcactaatattttattattttagtgggagccatcatcttctctaatctctctctttctccctcccctccccatccttttagtgggcccgttttcttggagcacgtgggtagcccggcgcttattagtcgctctctctctctctcttccgagccgacgtggagtttttatcgccggtgctagagctctattgtacctgcaaatcctgccacacttttttaaatcattgacacgtgggacccaatatgttagaagggaatcttgtcacaactgtggctataaccaaatagctatcaaaatttgcccaactttaaccgtggcaaactgtggtaaattatgactggcaaccaaagaaactcttaatttttgctcttcattcatttatgaattgccaataacccatggcctcgtcggctcccgtgcggtgcacaccaccggcgcttcgtgtgctacgccaccacgcagccgccgccaccgccgcctcggctcgcgcgccgccgcgaccaccgctccaatcactcacgccgccgtggccgtgcatcacaataaatacggaactccaacctctcctgtctcctaacttggttccaagatggcgggctcctccccgtcggctgcggcaagcggcggcggctgcgaagcggtgccgagcacgtcgaccatcgtggccgagatggcgacgggctcgcacgtgctcaccgtcgacggctactccggcaccaaggggctcgccgtcggcgtgcacgtcaagtccggcacgttcgtcgccggcggccacagctggcacatcaagtacttccccaacggcgccaccgacgagacctccgagtgggtctccgtcttcgtctgcctcaccggcaagtactccgacccgcgaagacgaagggcgccgccgcgaccgtcaaggcgcggtgcaagctcaccctgctcctcgacggccgcgacgggagggcggcattgccgccgccgccgccgttcaccaagagctgcgagctccggaccttctcctccggcaagggcggctccgatcagtggggccacaagaagttcgtgcggcggaaggagctcgaggacccgtcgaagcgtctcctccgccatgaccgcttcagcgtccggtgtgacgtcaccgtcgccgtggggatccgcaccgacgacaccaccgcgaagctcccgccaccgtccgacctgcaccgccacctcggccgcctcctcaagacgaatgcgggcgccgacgtcacgttcgacgtcgccggccacaagttcgccgcgcaccggtgcgtcctcgccgcgcggtcgccggtgttcatggcggagctcctcggcccgatgaaggaggaggacaccgagagccacgtcgtggccatccgcgacatggacgcgagggcgttcaaggccatgctccacttcatctacaccgactcgctgcccaatgtcgacgacggcggcgaggcggcggccatggcgcagcatctgctcgcggcggcggacaggtacgacatcgagaggctaaagctgatctgcgaggacaagctaagcggcggcgtcgacgcgaccacggcggcgacgacgctggcgctggcggagcagcacggctgctgccggctgaaggaggcgtgcctcaggttcatggcgtctccggccaacctcaaggcggccatggcgagcgatggcttcgagcatctggctaagctgcccttctctcctcaaagaattagttgctaatctcgctgtttaattatgcagtagaaacttcatttctccctgattatgatcaatgtggcgtagctgttatgatcgaaatttgatggtttttttccgatttgatcataatttaaaaagtttggatgtaattaggaaaaccatcactgacagaatcggattatgccaaatagtgctctaatgtctaatcataatcaaatcggaaatcggttggtataaacactaaacaaaataaatataaattctatcacgatgtgcactacgcttggctttgcaaattcgtcactgatcgagcgctcgacatgtccggatcatccgcgtccgccggcgacgcgccgccgccgacgacgtcggtgaccgcgtcgaccatcgtcgccgaggtcgtgtccggatcgcacgtgctcaagatcgacggcttctcgcagaccatcggcgcaagcgacggcggcagctacgttaaatccggcaggttcgtcgtcggaggccatggctggcgcgtcgggtaccgcgccaacggcgacggagacgacgacggcgccgacgccggctggatctccatcgctcttcacctcgacgaccccaatgtcgatggtgttagaagtataatatgttagttagatataagagttaaatacaaattatagagataagataaatcgtagagatagaatcctaaagataagatagagtcctaaagatagaattctagagataaatctactcttatttgtattatactctaagtctgtatcccttatgtacttctatatataccccataagaggatcgatgtaatagatgagaaaataccaaaatacaacatattaaatttttccacatggtatcagagccgaagaccaacgtcgcttgatccaccttccgctcgcgccgccctggggagatgagataatcgccatattctccctggggcgccgcatctaccagctatcaaaattatttgtagattaattagatccataaactcgcattagatcaatttatcctagctagccacataaaagcctatgcattaattcatgatcctcggagcgtttgccatggctaaccgagcgaagcagcagatcaagatggccacttggccagggatcttcgacacgcccgcatcgacgagagcggacgccagtccgccacggactactgcaggagtacatcgcggcaaggatgcgcgcttcaggcgcgtgcgcacgggtgctacttcggaaacctggcaccgccagcgacggggaccgtacgtgcagcaagaggacactatcgactccaagagtccaagttcgtcaagctgcagcccatcaagccgctcatcaacagcatcaagaaattgtcaccacaaataatgcagccatgcatccacgtgcaacgacttaaatatcaagaagtccgtcgtcactaccgcagccacagcaatgcacgccgccatctgctacctcctttacatcatcaccacgatggtcttctccgacacaacatcaccgatggtcttcatcaacatgggaacacgccgccgccgactcgtccacatagatggacacctcgcgtcctctgacagattaatctgtaagacgcttcttcgacgacatcgaccgtgtcctctatgacggcaacgaccgcatcaccgacgatgacatcgatcacgtcatctacgacgaccaaccaaagtggtggcctcattgccaacgacgtcccctgacatttgcaagacgtccccaatggcatcctctgacatctacaagatgcaagatgctaacaattgcagtttttgtcttcacaccatggcgtaattttttttttcgccttcggctatttgcggctacatcaactaccacgaccacggctacttcatgatcagctacgtcgacgaacgtctacaacaaaaatcattgacggaaactccagtcaaaaacgtccgtgtcatcgctatcgtccatgacactcccgctatgactgcgggagggaatagagaaaagtcaagggacgacacagaaggggacgcaggcaccaggtggaggaccgttcatcagaaatgcaatcgatgatggtgagtcaaatgagatgaagaaatagaaaatttcaaatccagtcgcaatcgttcgcttcgctcccgttacgactgagggggaatgttagaagtataatatgttagttagatataagagttaaatacaaattatagagataagataaatcctagagatagaatcctagagataagatagagtcctaaagatagaatcctagagataaatctactcttatcatattgtactctaagtctctatcccttatgtacttctatatataccccataagagagtcgatgtaatagatgagaaaataccaaaatacaacatattagattacaacatattagattttttcacagatggcgtcagagcgaggttcaagatcagcctcctcgccgccgcccacgacggtagtcatccgccgcccccgcgcagcgaccagagcacagcgaccaggtcgttccctcggttcatcacggcgaaggcgctggaggagtcgggatacctcgtcggcgacagcttcagcctccggtgcgacgtcgccgtcgtgaaggatatccgcacggaggacgacgccaccacggtcaagaagctcgtcggcgtgccgctgccgtccgacatcggcgcgcacctcggccgcctcctcgccgccgggcacggcgcggacgtggcgatccacgttggcggcgagacgttcgcggcgcaccggtgcgtgctcgccgcgcggtcgccggtgttcatggcggagctcttcggcccgatggcgatgagccgtcacaacaacgaggagacaatccgtgtccacgacatggagccgagggtgttcgaggccatgctccacttcatctacaacgactcgttgccggaggtagacgacgacgacgacggcgaggtggcggccatggcgcagcatctgctcgtcgcggcggacaggtacgacatggggaggctgaagctgatctgcgaggacacgctgtgcagccacgtcgacgccagcacggcggcgacggcgttgacgctggccgagcagcatcactgtgagaggctcaaggaggcttgcttcaaattcatggagaatccgagtaatcttaaggctgtcatggcgagtgatgattttctacatctgacaaggagctgctcctctcttcttaagaagctggctaagctggctgcctaaattgggaacaacgtataggaagtggattttaaactctcgaagggatatccttttattatttgcatgtcacttagttacgatacaaataaaaaaatagaatttctaaagttccatcaacagaaaatccaacctcaaatcttgtaaattttggatcactggatgtgcttcacgattcgtgctcttcttctccaactccggtgaccactcttcttctccggcgccggcgaacccaaactccagtagagggccgacgaattagggccccgaggtggggtggggtgggggggaggggggagaggga

SEQ ID NO: 14333 - DNA, 2981 bp, Oryza sativa
  unsure (1)..(2981): unsure at all n locations
agctcggtacaaaggattcttgtacctgatcaagacgaatcaggagaacaaaatgaagctctttcgcgtgccaacctatgatgtggatgtcatctggcacactcaccaactgcatcctgctacctactgccatgatatgctgaagctcattggacgagttctggagcatgatgacaccgatgacgatcgatcagaaggaaagaagctcgatactggattttcagggactaccaaacagtttgagaatgcctttggtgcaagatactggaaggctggtgctatgtaccgtggcaacttgccgtctcctgtgacatcccatcctcagatgtttattagtgaggtggatggtgaatttagtgttggcaaagctgagtcgcaaattaccattcttgaancnacagttatagaggtatgatactctcacaacacatgattatccttgaatcaaagccacagaagtatggtggtttgtcctttttacagactcctgtatggtaatggggatggtgttaagggcctatataaaggagctgtttgacaatatggtttgaagtgtagaatgctatactgacaactgttgtttctgaaagtataactaatgtggaacatcatatccagaacctgaattcagcagttgttttacaaagattcttctactgaaattatttattgacttaaaatcttttggtcttctgcagttattcttgcaaattgtggacatcaagaacttgccacctgcaattccaaaggaaaatgtgtacatatggttcacaaagaatcaaccagacatgttcatcagtgatggtggcaggctggatatctctacaaaaacagggaagtcgattggagccagtatccaatgtgagcctactggtgaactcattctaacagtactggttgatcgggaatcatcatcgaagaaacccaaaaagattgggaagatttctatccctcttcaagagtttacatggtctgattccaagctctcctttgagaggtggtttgaattgaaacctcatgatgggcatgccagttcacctatcgtcagccttcgagttgctgcctcttccactgtcccagtgaaggctcagcaggttcttagcatgatcaggacagaacctttctctcttaagagttttctgtcaccgaattccatcaaggatcaaaagatgagctgctggactcactttgtgtatgattgcaatactgaacttatccgtcttcaaattaggtgattttctgccctccttgatacttcttcagattaattctttcattcaaaataaaagaaatggactaacactttctcactagtaacagcatggaaagcatttatggtatttatgtgtattcatttcaaatgccattgaatacatttacaaaatgttctgtttgcgattggagctgatgttcaacacttcaacttatgtggatacagttaaccatttcataaatcaaatctaaaattgttgaagcacttaagcactagtttttagtttacctttttaggatcttttgattgattaatggtactctttgtatcaaatccttcttgctaatgagtactgactcgccttcatctcagggatcagaaggcaaagaacggcatggttgtcgctcgggagttggtcggagtaacaaagtcatcaaagaaaccatttaagctagcagagttcgtggacaacaagtggtcactgagcaactctaacttatgcatcactaatgacatgaaaccaagcaaggatggctctatacttgagctcaaatgtgacaacaaaacggtaagtgatgctaatacattacctgcacacataaatctactatatatgtgtgtgtgtgtccttgtctcgaaaagaatgatctaagtcttctttgaacaaaccagatcaaactctaccagggaaagaggctagaatttcaacggaagtgctgcaacaatcacgcagaggagaatgcttcagctattactgctgtgaagttctctgctgaacatccatatggcaaagcagttgcattgcttgacaccaaatctgagctgataatggtacacttcaacccttatcttttacattttttttcagtttatgtacacgtcaactttcatttacaaagttttcagtttgcttttgtacattttacaaaattttcagtttgcttatacctgttgcattgttcttgccttctttttttttcccaggtaaatgaggattggtttctgcttccttggatcgtgatgtcgttcctgttccaagacatcaatgtcgaagacggctcgaagctcatcggtggcgccattgctcagaaaggcgcgatctctgagcccgacactgctgccatggcgatgtcagccgagacggtggctgctcctgctaactgcggcacttgcggcacggcgtgcgacagtaacatggcaggcgacaaggtggtggccgccgcgagatgcaaggccgcgcgatgcaaggctgtcgcggcaagcggcggcggcggcggccaggcagagtcggctgggtgcggctcgggatgcggcggcggctgtggcggcggtgttgccaaggtcgttgaggccaccaaggctggcgtcggcggccatggcaagtccggtggatgtggctcgggctgcggtggtggctgtggcggcggcgggtgcggcgccatggccgtcgagagctccaaggatgatgtccatgcgaagtgtgcaggttgtggctcaggctgcggcggcggctgtggcggcggctgtggcggtggcatggtcatggaagcctccaaggctggccatgtcaagtccggcgggtgcggctcaggctgcggcggcggctgtggtggaggctgcggtggcggcgtggccatggaaagctccaaggctggccatgtcaagtccggcggatgcggctcaggctgcggcggcggctgtggtggcggttgtggcggcggcatggtcatggaaagctccaaggctgtccatgtcaagtccggcggct

SEQ ID NO: 14334 - DNA, 3102 bp, Oryza sativa
agacaaaatacttgtatccttccatagtatctgggttgcaacttccagggttaaagctgctctcattaccattggcacccatgtactcctgaagaagttttgaactccggccgttccacaaggacctggatgctacatgacgtgccagaatcctgtagaaacactttagtgccagaagactccaaaataaccagaatgggacatgccagaacttagacccatgtgttatattaaggtatgccacagctaaaagcttcaatgcatttctcagctcaaaatatgttccgtaactagagaggcaattgatgctagagcggaagctgaccagcataagggcccagactgggaagagctgattcttgaaaggtgcagcttgcatggccccaataacatacaccaggatggcatcagacaaagcatctagcaagctcaaaatggttcttttcgtagagaagaagaaaatgcccgacaagaagaacatcaccatgtagaggaatatgaggaatcccattataactcggattcgaagaaagacgtaggtctcctgattccatttgatgagaaaatatgcaataaaagcaccaggactcattttggttttcccacagaaaagcgtgtacaatcctgggccctgatcaaataaagtttacaaaagacaactttaaaaatagctaccagaaaacatggcaaatgtattgaagggtcatgctgataatgctatagtggaccatgtcaccatggcaacaagatttacattcttcatgaaagcatacttcacaggcccctgtatgggacaggatgggtggagagggtggtggtgctaacaactgatctgtatttgatactagtgaacttaaagctattattgattaatgaaatagatcacatatagtgagtgtttccacgagcttcccttaaaacatgaaattatttgtggaagactttatttgaaaatatttctttagaaaggctcatagaaacactttcttgctttctcgaatgatttttaactataaggaggtgaaagctaaaactgaaaaaaaatgaaaaaaagaaaaaagccataagcggcaccacatagaaagctacttcctccgtccaaaaatatagcaaccttgtactggatgggacacatcctagtacaacgaatctggacagacctccagtacaaggttgctatattttggaacggagggagtaggaagtaggaaggtgaaggcgtgaaattgatttttgtatgaggagttttgaagctttggacaaggtacttttagaggtgcacaagtaacatgtgcggcttctggcttgcgcacttcatgcactatatggtttgatccttttcttggtcagtactcaggaacagtaaaccataattaattggatggaatggacagcctagcaggctagcataagacacaatatatctatcattttctcaccaactagccaataagtagagtgaacgaagggtgtacctgcttcagcttgtgctccgcaaccttgctgccgtctgcagcaatgcttatcctattagggccttgttattgtttcatgacaattgtgtgtcagtttaaatgaagctggtaatggatgctctgcttttgacctgtaacaaactacgaccactaacttagtatggctcctcaccatgcagctactatttcaaatcagaattgtgattgcacaaatttagacggtgaaaactaaacatgtaatattttttatgcaatgcactacttgcggctagaagaaaaatcacagggcagggatgattcaaacatgcaatgcaaatacatcagaaactgagctaggatggcgaaaagcagctgattcttacccaggtgcaggattcagtagctgctcatgatggatggatctgcagcctgggaagatagagacaactctaggcaaaaccttcagccaagaagagcaccgagatctggaaactgggctgttgtcataggctgagttcctccttgacctcactcctaactcctaagatatagtgatcataaactaaggaccacatatcccgcggtcttgttaagtccttatttttaacacacttcctaaaatatggcatttacagtggcgcgcaatagataattctggcacttgctgtcttgctgtactcttcatttatggtaagtagtactgtagtaatacttcaacggtgttggcaaactacataaaagaaaatttgaactgtgtagtagctttcacatgtgcggacttgttcatccaactggattccccagaaaactgttgagtaaaaaaataagaaacaatcattgacttgcacaaaactactgatcccttaccgtgatttctcttaggaccttccatgatttgttcgtccatttatacaaccattcgataatcccatagcatttactcctactttcctatcacatgatttgacgagaaatgcaccgcgattaaaaaaaaagaggagatcggacggagctgcaaaaaaatttaccgtgagagaaacagagagctccatagacaacactgtagagccccatcggacgatgccgatgccatggccgaccaagaaagcatcccccaattgagcgccagccaccctcgccgccggccgcggccgctgtaccacctccgatgttgatccccccacccctaccgctgaaaccgccgccattcacctcctccgcacctccctccccgccggcgagcggcggcaacagcggaagcaaatgggagaccgaacggagggagagagagagagagagaagcagccgcggtgccactcggcccagtaagcgtcagcctccggtagggaggcaccggctgccggagcggctcgtcgatggcggctgacgaggaagacggtgccggagccatcaacttccgccgccgccgccgccgccgttcgctggaactgcgccgcctcgtgcctctaaccctctcttacacattgcggcccagtaaagctaatgaaatggacagcccatcagtaccactggatcggcccgcctccgccttctggcctacaggcccagatagaaacagacggtatcgggcccacacggcccgtacatctgggccttgactgcacacgctgacacgcaccaccactac

SEQ ID NO: 14335 - DNA, 2429 bp, Oryza sativa
tttggggatccctagttgataactggtgaatcgatgggctggagtaaataattgcctcatcaaaaatcagggctcaaatctctctgtattgttacatactctgtgctaagctccccaaaaatggcccatctcgaattaactattatcagggtcgttgtggcaattagctgggggaagggtaaaagggagaagtgaaccagacaagttcgatggatatccagagttagacccacttacatccctccctgtctgcatataattattggaattcttgaattagttggtagtgcagatcaaggtaatttcatatgccatgcaaatgtgatttttgcatgacatgtactgtggaatttattgacaaacttctatatttatcaaaaaaaaaacttcttaaaatagaaaaccaaccatcgagacagatagacaaataagtcaaacaacagtttgctacatgacataaaagattaattacaaaaccaggatacaatcaaactctgcagattaagcataaacaagataaacagaccaggattgagcttacatctgcatagctgcatatgctgaacctcagctaaaagtagctaacatgatagaaaaaatagaaatatgtcttctttccaaaacaaaatatagaaatatgcatgccaccaaacgatttgatttatctgtgtgattcgtggcagttacttatttgaacggaccatcagtcagtcaacttcatctgacccatatagacattctgacttattcattgactcaatctcaggccacacctcaatttccaagcttggacgacgtttcctttcactattgctgcatctcaggcccagtgaaaccatctttacagcatcctgtatagacgtgtcatccaacttcaattgagcatccaagatttgaagtttctccaagatcatcttttgcttgcgtgtgtccattttttccaattttttaccttccaatttatcaacgatgtgctttcttaggcccgttgcactttggcctgtgactagctgcagcagaatgatacccaacgcgaatacatctgactgaggagtcaatttgcctgtattcttgaattcagggtccatatagggaccgctaccctttggcacttctgtaatatggttaggcgttcctgtgtcgtttgtctgctgtaacaaacgggagattccaaagtcactgagcttgcatatgttttcatcatcgaagaggatgttgcctggtttaagatcaccatgagcaattggattaggcttggcgttgtggagaaatacaagagcagtgcagatgctagttgccactcttactctttcttcccatgagaatgattccctttgtttctcattaataaggcgatcttcaagggtgccattaggtaaaagctcatacatgagtgcgaatttctcactgcatgctcctctgagagtgatcaggttttgatgccttattcttttgagtatcgcaatctgaattttcagaatttttttttttggtgcaagaagagcaatagtaagaatacatgttaggtttatctgtcagacaaatattaggtttgctaaaaggtaatgcaagaagtttaatggtgctagaacttgcttgaaagggtgatgtgaactgcacattctacagaatagctttatctgtcggataaatattaggtttgctaaaaagttaatgcaagaagtttaatggtgctagaacttgctggaaagggtgaagccgggaagaaaaggtgaactgcacaatctacagaataaattgttgtggctgtcgttttattgatctattggtgcagaactgcaggtagtgtccacctctattggagtgatcgtttcagtaagtaaagtacactatttaatcaatattttgagcataaatatcgcaaatgaacagtacttgctgatgatactgtagcagcagcctcacactgagaataccctcttcagagttcagaatatttcctaaatagtgtgatttgttttctagtataagaattagttgtttgactatttcttttttttttttggtttgatcttacccatatttggtaggagaaccctttatgctatgaggctagtgctattacaatgaagcaagaataatgaatcaaagaagtccccatgatctctttctcccctccccttccagttgacaaaatagttatccacgtaatgatagaattatttacaatttatttaattggttactcacctcttgcttgaactcccgttctccttgccggctactctcattgagaatcttcatagcaacagtctcgttccgaagttttgccttgtagacgatgccataaccacctctcccgagacaatgattttggtcctttgggactgaatcatctacctctgagggattgaactcaatgaagctaaccccactactggagtttgaagctttggggctgcaggaat

SEQ ID NO: 14336 - DNA, 6023 bp, Oryza sativa
caccttaaattcgtcgtgattaaatctttacaaagagatctcacatgattatattttattgtaaaaaaaatctttttcaaccgaaacattaagttacaactgctgaaacatcacacaataatagctgaaacattacaaaaatatctactgaaacattcacagagcactgtgtgcaacatttcaaatgatctaatgaaacatcaattaaattatcacaaaatatctgctgaaacattcaaatagcactatgtgcaacattccaaatgacatagtgaaacataattattgcaacatttaaaagagcattatgacaaaaaaacattaaaatattttttatccaaatataatcatatgagatcttattacgaagacttaattacaacgaatacaacggtgtaatcggatcattgattggatgcatagtttaaaagaagaaaaatatttaaagttttgctattaagttagtgcatgaagagtgagattgaggagagaggtaggagggtgtgtcagatctagtgtccccgaggagcggtaagcaactagaaccaatgaattgcttggagaagctagagagatggagacagagaatgtgccagcagccaacacactaaattataggggtggataattagttggctcggctcgtttgagcttgttatcttaacgagccagcttggctcagctagttagcattaacgagctataatgctagcttagctctgcttggctcatgaataggatcgttaagctcgatgacgagctctatctcatttttaccatattaataattttaaatttagcattttgtcatatattaacataataataaaaactaactaataaagaactcaataaatacgaatagtttgtaactaaaagactaagcactaattaagaagcaccgatatcttatactaatgagctaaacaagcggatcgtgagctagttcgttaaactctcgagctagaaggctaactcagctcaactccgagttcgaggtgatccaagtcgaattcgctacataactttattttttttcacccttacatgtatcaatggctgggaaaatattaggtatttttttagcgttgtagtttactccctctgtcctacgtaaaacaaatataagactagatgtaacatattctactacgacgaatctagatagaagtatacggatggagtacataagagcgatagtactctttggtggaacttcgaacaaagatgtcaggacctgcccgaggttccgaaaagcaacaagagccttttcgcaaaagagcggctcgtccgtggcccgaacatacctggggctcaaatccaggggaggaccgggacgggaggcccgcgcgtcaatagcgaaaatcggtgtgtgggactcggaaaacaatggtcggtgattcctcgggtggtgaactggtgatgatactccggccaaggtctctgctgaccttgaccgtttctaattaatggcgtttgaagcggccatggaggagatcgatggtacggtagctatccacgacaccaacggagaaagtgagaaacgatgggcaacctcgttcgttttttaggttattcttcggcctcggccggcgtcagtactgccgctgcctgcagctagcacgtcgtcccacaatggatttgcacgtgtcctcggtgcctgatcccaagccacaagccacatgctcccttcgtcttaaaaaaacttaattctaagcttaaatctatatacattatatttagatttaaatctagaattatattaaggagtatagatatgccatatagtgctcccacatgattagtttatcatcaaaccgtacaaaaatatcctaacagattctcgttctcccttttttttaattgacagttagaatctcacgtttcaacactgacgtatggaacagattttaaagttgtcatactaatccgactattaattgaacgattttgctatatctcactcgaaagattttttcttatctctcactcaattttctcactcaaatttacagtgcattttcttgtaagttacagtgtaatttatgaaacttacactgtaacttttataagttacactgtaatttttgaatcttcacatgtaaattttaaattttgtattggatttggtctttttcttgaggatatggtaatttaatgttcattatggtgtttcttaattgctttttgctttttattatatctatcggattttaatataaagattaaaaatctgtgtgatacgattataaaaatctttcgaaagatgtataggtactcccttaattgaatgaagttgtaaaagagacttaattatctgctgtttatactagtagtatttccgaagtatacgttgccatttgccacagacgttgagcagcgcacattttcttctgcttggttaattaactgattgtggctactctcaagcagggtttacaattttggaaaagaccgaaattttgggttaaaaattttcatattttgagttaacagtttaaaattttaaaatccaagttaaaagtattcaaatttgagttgattttaaaaaaataaaattgagttgaaagctttcaaatctaagttaaaagttttcaaaatcttgacttgaaattttttaatctaagttgaaagtttttaaatttgagttgaatgttttaaatttggggtataaagttttaaatttcggtagatttttttagaatttaatttgaaagctttaattatatttaaagaaacaaccaaacattaattacggcctaattacaaaaaaaaccccgaacactaattacggagaaaaacatcgaattaatcgtgctaatcggcactaaaatacagtgctactcatgtttctttatgttttcgattttatcctaagctagcaaaacgtggacgcccgccggtaactcatcttgtgcaaacgtgctaattagtcttctcggtaatcagctaggcgtaccggtgaactcagagatgtcgtagccgcaaagaataaaattttaaaatatacaatttttacgtttttatgattgctaggaaaaaaaatacccgttgcaaaacatatgtttttagtgatacaacaacttatataggagccgagaaataaataaaaacagtagtatcgctatatattataattgaaaaaaataatgaatatcttttcttgattttggaccaaagcctatttcttccttacgttttcagcttacctctctccgctcagcctatctcttttcggcccagcccacaagtagagccgcaggctgctcacatagccaactcgtgtccttaacctccggaaaacagtcctttacccatatgacgtggaagcctatgttctcaccatatgacgtggaagcctcatcaaatttgatcgaatgtttctcgatctcctaaaattggttgagggttttcaaccactcgatcttctctttccgatcaatgtttctcgatctcccaaaattagttgagggttttcatccactcgatcttctctttccgtttttcataaaatcggacaaaaagtctgagaagctcgacgataggccatcatcaatggagtaacgaattgaagacgaattgaaagagtaaattatggggaaaataaatgagggaggaacgtcagagcctatcttcccatcaaatttggtcgaatgtttctcgatctcccaaaaattggttgagggttttcatacggaaggtagatcgactgagatcagacaaaaaaaagaaccgagaactaaaaaaaaccaaaaggccgaaaaaaaaaggaattccacatgcgtaaaaatactaatcggactagaaaaaccggccaaaaaaaagaagacggacaaaaaaccaggaagctattaggtatagatatagataaattagagataaaaataaatattagaaaaccaactggaacacatatgacatatcaaaattttaacggaaacatattcaatttttataatagtagagatatacataattttaaaagatttgtgaaaatatacacgtacatgagagatgtgcggccggttattttgcgtggcacggaggtagcgagaccaatagccggaataatcctgcgacatcggtgcacagtaccacattggttctgcgggccagtcacgcggcaccgcatatgtgcgtatactgcatgcatatgcgtaacttggctgttcagtcgtgcgccccgcgtcgcggattgttccggacgttggtctcgcactcccgcgccttcatgctgtgtaaaataatctgtcatttttgaactgcggaatgcgtatatttcgataaatcgttcaaaaccttttataatcgtacgtaaaaaataatgtatatttttaaattttattctagccgcaaatgctccgccgccacgccaccgcgcggtcattcgcccgcctctagtcctctctctcctcctctctatagtaagtagtacatgtataattgtatatacgtatgtgtgtactatacgtatgtataaactttttatatgtatatatatattacaattttttatatgtatacacttttactataaaaaaatacatgtatataaaatttatatacgtatttttataaagtttgtatatgcccatataaaaaagaataatacacgtatataaacacatatacaaaatttgtaacgtattaaaaaaccaaaaagtgggaaagaaaccggagaaaatatcaactttgtatttatatttgtatatatacatataagaaaatacacgtatataaagtttgtatatgtgtatacaaactttgtaaacatgtatatacacgtaatcacgtatgtaaactttgtaaagtaacaaaaaaccgagaaagaaaaccggaaaaatggaaagagaaacggagcgaaaaatagggaagcgcgcggcgtccgccgcccctctttgcgcgcgacacgtgttcgcgcgtgggggtgtgtgtggtgggccatatgtggtatgccgtgtgcccctgtcgtttcgaagataacaaattaacggcaaatataggggctcctacgtctttccagccacaatcaccaccgtgtaagatcgatccaacggcgcatggagaagaggccgcgagatcgctaaaattttccccatttcccgtcgccgccgccgccgccgccgccgctcgccggagctgcgccgcctcccgatcttcccggtccctctcctcccttccagaagcggccaagaccaacggcctcgcccccgctacgtgagatcgctggtgccctcgtagctccgatccagcctcgcccccaagccaaggagcgaattcaggtattgcttcttcttttttctccccagattgctgtgcacggatttgccgtaagatgggggaagtaatttttttggagcttccagtaaagggtctgattgcctgacccttcccttgccatatcaagaacgcggcatcagcatgttctagtattcgtacagattctagcctgaagctgacttttgatgatggatgattcctgcaaagttgcttgatgtttttagtgactgagttcacactatcatattgggtaattaacttgggtaaacttcatcgtcggtcataatgtatcatcctctgtttagttacatcactgatggtcttgatttcgcagtgtgttagttgttagttttgagttcaagtatgaagacgtgttgttagtgctttatactagtagtatttggtaagctcatgctcacctaacaacattttgtttcttcagattttctatggagatttagctttcatcaaaacaaaaacaacaatatgcattatgcacgaattaaaatggcgtgtactatagtaatttgtctcagacaattggtaaagattgtggtttttacctatactgtctattgttttctatgtctctccctggatcgccagtggtagctgaaattggggcattcagcatgaggtacaaaaattataatacattgtgatgtaatagtagagggcaatatgtaaggcagtcagagtcacaagcacaattaaaatgtaaaacctgttatttctgatatatg

SEQ ID NO: 14337 - DNA, 648 bp, Oryza sativa
atgaaggactggttagatttatataccactgaggagatagatgattgggagtgtaaggaatgttctgtttctgctaatgaaaatgcctctgaaagccaaacagattcaacagttgatgaccaaaccgagcagctgaacagtggaacacaccaaaaggagcaattcagctattcagctgggaagaaaattatcacgcaaaatcagcaccaagggaagctaccgttgctggattgcaatgcacgtcaaatggatcaataccacaacaaaccaaaggagggaaaaaagataagaagagttgcaacaattaaatatcgcattaacaaggcaccacctgtactaaccattcagctgaagagatttgaattcgttcacgatgatgggtcaggaaagatcgaagaacatgtgatctttcaggagacacttgatataaccaaatatatggacaccaggtattaatacttctacttagttgaatataacatagctcatattttttcaatactgatccaatatgatacacgataagatcatagtgccaataactttggtgataacttcttcaaaaaaaaatatttttaaccattattcatttctctgatgttcagatatctggacaatgagtacaaatattgccttgtagcggtaatt

SEQ ID NO: 14338 - DNA, 2136 bp, Oryza sativa
gagccagctcatggcggcgaacacgtcgccggggaccgggccggagaacgcgttccgggacaggtacagcgcgcgaagactgcgcacggcggcgaggctcgccggcagcgggccggagaagttgttgcggatgaggttgatggagtgcaaccccggtagccgcgacagcgccgcgaagtcgaagtcgccggagaggttgaggcgggcgaggcggaggccgatgaggacgccattgtagcactgcacccttggccaccggtgtgtttcatcgcacggcggcgacggcgacgacggcgaccacgcctctagcgcgttcgtcgggtcgatcagcgacgccttgagccggaggagcgccgccgcctcggtatcgggcgcggcggcggtatcgggcgcggcggcgccatcgggatcgacggcgatggcgccggcggcgaggaggaggaagagagtggagaggcggaaggcgaggaggagggtgaccatgaccaaattggtggaaggtcacagcctttcctctacctttcttccagcttctctaatgttttcctgcctttctttgggggctttgcctccttgtgccttttgtcaatggcttcttctgctccagtggttaggcaggcagatttgggagctaaaaataggataatgcagctgagacaacaaggtgatcaatggagatgatgcaatgcaatgcaatgcaatgcagctacaggtaatgcaatggcagattcttcacagcagacgtgcaaatggtgcaaatgcaaaatatgcaatggattaggctggattaacaggatttgcttactgcctgtttctctctcactgggaaaaaaaatgagggaggtgatgtggcagttgtcctgtaaatacacactaaaaatagtcagggtagcaaattaggcaaagattaaaattagtaaacggaaacagcttcctgctccttgtttctggagtgcaaaccatgagggcgatcaaaagcagggtgttctgaatatgagatgtgtcacactgcttgagactggaaatagagtcagaaatgtcacaacttcaccagaagtgctgaatcaccatgttacattgaagagtattacttaactacaggtaacctttgtccgtatacagcatcataattttttttgtactgcaaaagaagccatgtatgattttccttttttatgtatctccaaagcacagaaagacaatgaacaaggttaaaattagtaaactgaaacagcttcctgttccttgtttctggtgttgcaaaccatgagggcgatcaaaagcagggtgttctgaacatgagatggtgttctgaatatagatgtgtcacactgcttgagcctggaaatagcatcagaaatgtcacaacttcaccaggagtgctgaatcaccatgttacattgaagagtattactcctacttaactacaggtaatctttgtctgtatacagcatcattactttttttgtactgcaaaagaagccatgtatgattttccttttttatgtatctccaaagcacagaaagacaatgaacaactacaaagtacaaacactatggccaatctcctaactaggacaaaatttgcaacattcaaacctacatttgtctatgtacacggactagcaagcaatcattcaacactcagcctgggtcaccttgaatactgaacatagtgcacatatctgctatagacattcttgtcttgaaaacttgaaaatctcagctatgagctccaagggaagacccttcgtctctggaactcttaagtagacgaacacgagaaccaagcagcacacgaatgcataaatcgcacatgccccactgagcccaatggtacttagcatcaccgggaagcagtaaattgaaagtagtctgccaaaccagaaggcaagtgagcaaaaacttgcacatgttgcacgggcccttgttgggaacatctcggagcagagaatattgggtattggccccagaccgatgacatatgagcagaagcaaatggttaatgagagctggaagaggatttcatgtggcaaagatcccatcttcacgatgttggacaaagatatggcaccaactgataatgttaggaaggggatactgaccaggagaagaaccctgcataaatgtacattg

SEQ ID NO: 14339 - DNA, 18542 bp, Oryza sativa
aatgccatagtagtgcccagatgtgggttatgaactcccctcctgactcgaggcattttttatgtgctgatgcattccaactaggggcgaggtgtataagtaattctgtccataccccagataggatctcccaacagtcttcatctcctctttcatcagtttatcagccaattttgccccttgtcgcagaacatcttcatttatgttttcttccccaacattttgggtattgttcttttctttaggcatcaatttatcatacctttcctgtagagactcacagcctttaagaatatcatcgtgagcaagtgtcacggcttcttgaaaaatcatattgggcacaaaaaagctgtcagggatcaggtcaggctttgaaaccagtagatatgcacagtatcgcgacaagctattcgcgatgatatatctttcctgcagcttaccgggcaatttcttttcatccataagatacaagctggaactgaagcaatttgtgaagcacgataatagatagcacaaaaatcctggtttgcttaaatcaacaccttcgtttttagcaagcttaatctcacagatgctggtagctatgtgccacacaagaatagtgtgggtgcatgtctgaagctcagagcatgcccatcggtaacttttccttttatcatcaagcagtgagataaccaccttgggcagatggccggccgtaaggtctatagagttgagtttctccaggatggcatgtttgacacattctggaatatcaatggggttgctgagttttgccccattgtccttctttggaaccattcctgtagatatcttgtgaatcagattccaaattctgggtctgtcgtcatatgactccaggaagacatattgatcgatttgtccatgccacctgttagcaataatgttagatttgaagaaggataatattaggttctccatgcagcggtttctggtacgctcatcatcccatcgcgcatacatgcacacaaggagtaatcttgtccaatctgacagtaagtaagtaaccatctcccagatctccttgaacagcatgaacaacatgaatacccatgtgatgatcatgtccacattgacaccctgcttcagatgaaccagctcaccctccgggggcttatagaccttacggatgtcaatggaaagccagcatataacacaaaatgtcaccatggatgcaagcaagctccaggagagcgaagttagaccagaccagaagaccataggatagcgggtgttgaagtaatcattgaggaaggccagctactgctccatgatcccaaaggcatgattggcatccttctcttcaatgattctcctcttgactagatttatatttatgcgaaaggtgcccctttgcagcttcacatcctcaagcctgcaacggagtagcctggacaatgcgaaggcgagggacagatccttttggtccttgccttgaatgatgttccctgaattgttggggctgggaatgttgtcacaggagcatagcaggtgcctgtgacatccccaaatcttatctagtgtgatcaaagatgatcttgtaattgtcttggacccgctagtagcgtggtggttgcctcgctcgctgcttctgcttcttcttctttgttgactggtagcttccaaatcatcttctttttgtaaggaggtagatctattcttgatattcaggacataccgaggtttctgtaacttgaccctttctccatagactaagtacttgaagccttccattgtctttgggttgcattcctcaggtttccagttgttagcttcacgcatgtactctgaaacgagctctgaactcctgccatgccagttggaattgatggccagagtacgtgaatggaatctgtaccagctcctcagcatctggagagcccaaagacaccagagtggtagcccaaatttggagccacgcgacaaattcaagaatgctgatccaagaagcttcaccacattcctccactctgtgaaccttcgccctcgacggtcaggaacaccataaccagagatgaagtcgacactgtaccgaaaattgacaagcacaagggcccagacgggaaacagttgattcttgaaaggtgcagttttcatagctcccagcaggtatatgactatggagtcagagacagcatcgaggatggtaaagatggctttcatggtcgcattgtggatgtggcgacgaaaaatgtccatgatgaacatcacaaggaacaacaccgtgaccagtaccaccaggaactcaatccgaaacaggatatacttcttctggttcagcatgacaaacagcgatgacagcagatcacggatctcatggaggccaatcatttttctttgctcgcttctttgtatgctggcccttaagtcagaccctgcaaggccacttaattggatgttttaaacataaattttagtaaaaagtaaattggcacagttcttcatactcttaagtgcggttcgttcaaaaaaaatatttttattggatgtttacaattcattggattttattttttatttttcaccaggaagtagcagttcaaagcataaacgaagcagaataaagagattacaatagtggtaaattttcctgagtggccacaaaagagaaggtcgttcacaaaagcgaggggatggatttgggacagaagaaggagataggacaggcatttgggttgcaccctctttgttcatccgacaatcgccaacaccttttggagctcaaggatgtcatggtcattgagacaacaggcgatcgaaatatcctcaagagcttcaggggtggttttggagttgaaatccgggagctttgtgtttggtaattgcttcattgagcttcgtggaacattggcaagctactccttcagtttcttcacctttaaggccttaacttcaatcgagaggaaggaagcagtttccttgttagccaaccgctcactcttgtgtcgtttgttttctctatccaaagttcttttcttctagcgagtgatcttcctcgcggagagctcatgttcagcctccataccgctgcagtcaaaatccggcgagtcatgctaatcctgagagtgctgctccaaactatctgccgatgagacagggacagtctagtcctgaggagcaggcggagacacctgggaaggcacaacaatttcgtccatctcggcaatagacggccaggcttgaactgcaggttagatcgcgagctgaaggccatcaccttctccaccaccgtggttgttgtgttggcgccgatgccatgttcgctgctgggccaggcggccagcaaggggcgagggatcccccggggcttgctgaaactgaaaggatgggaagtgacgcacgcacaacccgtcttcgtcaatattcccagcaaggtcccaagtcgcaatcactctgaccttagcgatgcaaacgcttccatcttggaagcggactaagaggtagggacggaaaacctttccaagttgatgctataaaaccaagcggagggaggattgatcatatctaaagaaacattcatcatcaatttcactcacaaagcccatacgaatcagggttgttccgattctaccagggaacagaagttctggagggaaatctgtgatgtccagctcggtgagttttgtcagatcctgaacaaatctggctttactgtcttcatatcgctccaagacaagaatgtggtccccagagtcaagcatttcctgatgctggatggcaatctcgcggtgagctcagagggtgaaacagagggacatagtactacgggaggaagcatgcatactaaagtgaaggtttggcatgtgctccctcatgagatctctgatagcagcagctagattggggcagacaagcgttagataggtagctgcaaagtgccccaccagcctgttgtcagtgaaggggacaaacatatcctggtagtcatcaggctgtaggtaaacaagctgaactgctggaggttgggggctgttcggagtgtcgtcagtgtcaccagaagcatattcttcaaacatatcactgttgtccgctgtagcatcctgagctggggacctcaggggggggggggggggggagcttcattgggtaggacagcaggctcactctcaggggcagccacaggagggacctggaatgctcatgcgcaggtggcgaagcaaaactagcagagagcaggcgatcttcacaaacaaaagtatccctggctggatctggaacagtgaaaggggccttggaggtggattgaccttccggaagcggccgagcaccgacaatgtaccacaccttgttctttggttggccggaaacgatgtgctataccgatggagcttggggtgaccagatggggagttcacccgggacgagatgtcgagggcggcgaccactgcggccactattgcagccacggccacgctagcagggatggccggagtgggcgcagcagcaactccagaagtggtagagatagcaactgaggcgtccccagcgacatcaacagcagcggcaatctcatcgacagcagcagcagcgacgacaatctcatcgagagggcccacgacggggtcgacatcagcagcaactagactaggaggagataccggcaccgcttcttcggtagcaggcagctcatggctgacgtttaggctatcctccagaagagcaatgacatcactcagtggtagaggcgcaaggttagccggtagagagctagggaagggagcttttggaaggcatgggagggctgttagagtttgcaggcgtttcttgacccagcgggtggtgaaggtgggacgagtagcagcggcaacggttggtggggtgggtagtggagtgttagaggctgcagaggagcgtcaagagttctggcgatggccggagcagtggcaggcggcgtgaacaagggggtcacggcattccctagccacatgatcgcggccaaggcagcggaatgaatcaacgcttgaacatcgtggtgcggcggtggagggaagctagggtttttctttgtggagggttttttgggcgagaaagcagcctctagaatgcatgcgtgtaacaccgagctcagccttcgtgtctagctctgagttgttgcgcggaggagtaagtccctgggccgttaagaaatgttcctaacaagacagagctgtgaatgcatgttgtgcttccactggctgcgaaatgttcattgggcggacctgcgttgaacatgcgtttgagccaatgggcaagcttgctcttggaccagtgggcaaaccttaacattgctttggaggaaaccattcaggaagaactgcacattttttgaaatcacgctggctgcagcagatttatctaggtgcatctgaagcatttaagattgaagaactgacgatccagctaagaacatgagaactgccacattgtaacatgcaacccgagtgcataaaatgccagaacccagcgaggaaatagagagaaaatcaggataggagcagaatcagtaattcaagaggttttggattgacaacaagctaaatattttttgattattagaaaggaaggacgagatccagagagtggaagggttaaattgttcgataggatggatggggcgactgaagagttgaaccaaatgagggcctggtcatggaacagctcaccgggccatacctttgattgttgaggccaccggatttctcgccgccggcaaggggagaagctgagccttcagtggggtgtcccccttgcaccctcccatcccccactaccaagtttgcttcatggatgtgtaattttacatgatgtggtacatgatctaagagtaaagaagcaatagggataattctaaaacttgattttgagaaggcttttgacaaagtaagatgggaatttgtttatgaagtgctcaacaggaaaagttccctttaaatggattcaccggatgaagagttgcataaaaggaggcaaagtctgcattaatatcaatggagagaggtcaagctacttcaaaacttataggggcctgagataggggatcctatctcacctctgcttttcaactttgtagtgatgttttggcacagtgtgttgatttagccaagtcaaatgtgtagagaaagtggaatggatgcctctcacaatgtgtgaaggagaattctcatatatatatatatatatatatatatatatatatatatatatatatagctgagttacacttaatgattcataagaccaagagtcatacttaaagctagtggagagttacactaaaagctataagttacataagaccaaaggtcttgaagataaacagcctaaggataaataaataatcctaatacccgcccgcagtcgcagcgggaggatcacgaacgcaaagactggaccgaaaatcagtgaataactgaaccggtaagcctttggtcatgatgtccgcgaactggtgagatgaagggacgtgaagtacccgtacttgtcctaaagccaccttttcacggacaaaatggatgtcaaccttgatatgcttcgtccgacgatgatgcataggattcgctgtcatataaacagcactgacattgtcacagtagacaatagtagccgaagtaatcgggacatgaagttcctggagcaattgccgcagccaacagcactcggcgacagcatgagctacggcacggtactccgccgcagcactgtaacgggagacagtagtctggcgcttggaggaccaagaaaccagattgtcaccaaggaagacacagtagccggacgtagaacgacgagaatcaggacaacccgcccaatccgcatcggagtatgccgtcagggactgaatcatgctggagccgatgtggaggctggtggagagactgcccttcacgtaccggagaatacgcttgaccaaggcgagatggggctcccgtgggtcatgcatgaagaggcagacctgttgaacggcatatgtcaaatccggtcgaatcaacgtgaggtactgtagagtaccagcgatgctcctatactccgaagggtcggcgacgggcaggccgtcggtggcggagagcttggcacgggtgtccactggtgtcgaggtagagtgacactcggccatgccagcccgctgaagaagatccacaacgtactggcgctgtgaaaggaagaggccggcagaggagcgcgtcacggagatgccgaggaagaagtggaggtcaccaaggtctgtcatggcgaactcggagtggaggcgtgccataagctgctgaagtagtgatgtggtcaaagcagtgaggatgatgtcgtcgacgtacaacagaagataggcaatacgatctccacctttgtaaacaaagagagatgtatcggacgtcgaaggtagaaatcccatctatcgaatatacgtggcgaaccgttggtaccatgcacggggagcttgctttagaccatacagggacttctgcaatagacagacaacatcaggggcagcagggtcaacaaacttggagggttgctgacagtacacggtctcctttaggtgaccatgaagaaagacgttcttcacatccagttgatgaatgggccaagcacgggaggcagcgatgctgagaacaacccatattgtggccgacttgacaaccgggctaaatgtctcgtcgtagtcgatgccgtgctgctgcgagtaaccacggaccacccaacgagccttgtgacgggcaagagagccgtcagagtggaacttgtgcttgaatatccacttgcccatcacaatgttggccctaggggggcgaggaacgagacgccaagtgccgttgtcgaccagcgccttgtactcatcagccatggcagcgcgccagttgggatcagccaacgcactgcgatagttggccggaacatgagaggcagtggcgtggtagccgtgtaggtcagccggtcaactggccgtagggagccagtctaggagtgcatcaccatggaatgcagccgaggagcaacagtcgtggcaacaatactaggtgaagatgatgtcgggaccgtcgtggttgcccaacgggtgtagacatggcggaagggtgacacgatggtaccggctcggatggcaccagccgacggagtagtgccgggtgaggaggcaccgaccaagggcgcaccagccgagcaggcgccgcttgccgccgtgacggtgttgttcggcaaatgtcggccgaagaggggaacatacggttgctcaacctccatggagggagccaccgtgagaggtcgcggtttctcaacctccgaggagggagccaccgtgagaggtcacggttgctcaacctccgaggagggagcgaccgctggaggaagtccctgcagcaaaaagtcaaaagacaaggcaacagggggagtcgccgcgaagggaaatcgggtttcgtcaaacacgacgtggcgcgaaatgatgatgcgacgagtggagagatccaaacatcggtatcccttgtgggaggccagatacccaagaaaaacgcaagctgtcgagcgagggacaagcttatgtggagtcgtggcactcatgtttgggtaacaaagacagcaaaaaacccgacggtgagagtagtctggagtggtgcgatgtaggagctgaaaaggcagtgagtggtgaatggaggaggagggtctccggttgagaaggtaggtggcggtggcgagagcctcagcccagtaggacggaggcatagaggcttgtataagaagggtgcgtatggagttgtggatgatgcggagcattcgttcggctttaccgttttgtggggaggtgtaagggcaggagagtcgtagctgggtgccacgactagcaagaaaggtagtggtggtggtattgacaaactctctgccattatcagcctggagagatttgagcggtaagccaaattgggtggaaacatactcggcgaactccacaatatgacgatgaacatcagatttgcatcggagtggaaaggtccaacagaaatgactgaaatcatcaaccaccactaagtaatatttaaaacccgaagtactcaacaccggagaggtccatacatcgcagtgaacaagctcaaagggaatgaaagtgcgagacgaagacctatcaaaaggtaatcgggtatgtttgcctaaccaacacgcatgacatagagaggtgtctattttattacaggaaatggaggacatagtccgaagactctggatggcggctggaccaatatgaccgagacgacggtgccaaagcatggatgaagtggcgagggagtagtgcgcggcgttggagggagtggcacctggaagggtgtagagttcccctcggctattgcagcgaagaatcacgcgtcaggtccgaaggtccttaacagagaaaccaaattcatcaaactcaatggaacatttattgtcgcgggtaaactggcgaactgaaagtaaattacgaactaaggaaggggcgacaatgatgtttttgagtgcaaatttggtggttcctatggggagaaatgaagtgccacgacaagttacggggatagtttgaccatttcctaccgtaataaaagtatgagagttaggcaagcgagtaacgaggataccatcggtggaggacatatgagatgtcgcgcctgtatccaaaacccagttgtttgggctttgaagagccatcttgttcagggctgcaatgaggctagcttgctcccagttgggctggcttgtagcagcagatgtgggcgacgtaaatggcccagcaaaagtggtgttggcctgggagtagtgggccgtcggagccggcccaagaaggccgaccaaagaggggcgccaggccggttgctgggccggccaggggttaaagcagacccaaggcccgtccggcctccagccagggttcacccagccggggccactcccaccagcagagaaaccaccgccgccaccagaggaaacgccgccgccagaaaaatgtcgagcgccaccaccacttccaccgccgccaccccccactgccgccccctatccagccgccattccctcctccgtttccacctccgcgtccgccgttttaccttgtggttgcggcggttggtgttgctgccggcgcgggcttggccaccagggaagccgccaccaccagcccctccgccagagaaggactggcgtgcgccgccaccactcccactgccgccacccccaccgccagaggagccgaagccgccgggagggcaggagccgaagctgctgccagccatcagcgtcgtggctgcctccaccttggcttcattggcgaggcacaactcctttagcatgagtgtgttgcacgctgaggtgaagctcgggaggacagccgcatttgcgatgttctcgccggtgttggagaagcgctcgttcaggcctcggagaaggttgagcacgagttgggattcggtgacggcgtggccgacgtcgcgcagggcgtcagcagcggtcttcatctcctggcagtaatcgtcgatggaggagtcaccttgaatcatggagtgaaattggtggctgaggaagatcgctcgaggctctttgttggcgtgaaacatgtccgtgatggtgacccagagctcccgagcggtctgatccggctccatggcgaggtcaaggatgttgtcagcgactgatccgaagatccagctgcggatgcagcagtcggcctgttcccaggccgggttattggggcgtggaggagcggagccatcgatgtgagccatcaacccgaacttgccacacaaggaggtaaagaaggccctccatttgttgtagtttgggtgggtgttttctagggtgatgggaacatgggatttgacggcgaccgtggcataggggtggaggaattcgctggtggtgctggaagaagaagaaccactagaggcggaggaggtggaggactgagttgattcagccgacatggccggagtgagggaggacgcagctgcgacagcagcgcgctggagcagcagaaaagaaggtaagagcctaggctctgataccatgtagaggaagtggaatggatgcctctcacaatgtgtggaggagaattctcatatatatatagctgagttacacttaatgattcataagaccaagagtcatacttaaagctagtggagagttacactaaaagctataagttacataagaccaaaggtcttgaagataaacagcctaaggattaataaataatcctaataaaatggtttactatctggggtagttcctcatctgttctcagggggtttgacccacctccaatatgttgatgatacaatcatatttattccctgtgttgacagagagataattgttactaagttcattctttactgctttgaagaaatgttagggttgaacattaactatgacaagagtgaagtgtctgctgtaggtttagaggtggatagagttgctaatatgcttaattgtcatgtaagatctttccccatgaaatatttgggcttacccatctgccctgataaggtgctaatatctgaccttatgttcttaccgcaaaaattagaggagattgggagtttggaagtctaacccctcttctggaggtagggatattctaatcaactcttgcttatctgcaattcattcctacacaatgggcttctatctgttacctaaaggtatccaccttaagatgtataaaattatgagcaggttttactgggctggtgtgggtagaaaaagaaaataccacatgatgagatgggaacatctgtgctctcctaaagagtttgggagattgggcttcacagagacaagaagttttaacattgttttgcttggaaaatggatctggaagttaagagtcaggtgataagggtccttgcatagagctgttgcgaaagaaatatctgggtgagaaaggttttttccaatatgagcagaaggggggttctcaggtttggaaaagcctacactcaattaaagagttgggtgaaacaaaactgtcaattgattgtaggtatgggttctcacattgaattctggtctgatgtctgctctgagtcttgccctctgaaaataaggtttaataacttgtgggagtgaaagagaagacgagttttggcttttgttagttcgaacttggtggttgacacaggtagcagaccaactgtaggagaagcttctgatagaagtgatattgcctagactgcaggagaaggtctactataaatatagttgctaacttccctgcgaattaaggctgtgttcctttggaggggttgggagtctctcccctccgcacggaaaatggagcaattaagattaacacataattaattaagtattatctataaaaaacttgaaaaatgattaatatgatttttaaagcaactttcctatataaattgtttgcaaaacgtgtaccgtttaacagtttgaaaacgtgcacgcgaaaaacgagatagatgagttgggaacttagagcaagtttaatagtatagtcaactaccggctctaattcatttatagccaatctaatagttcatccatacaatagttacatactacactattaatacctggtcccacatgtcatatacacacttcgtcttggagttcgtgctacagctggctacaaatctgtagcccgctgcttctctctcttatttatcttcttaaaatatatttgtaactggcttatagtctgctattgtacctgctcttatgggaaagaattgcatcaggttcccaacctcctctccctcgttttccacacgcatgcttttcaaactgctaaacggtgcgtttttttgctaaaagtttctatacgaaagttgcttaaaaaaatcaaataatctatttttttaaaaaaatagctaatacttaattaatcacgtgctaatggaccgttccgtttcccgtgcagaggagataggttacccaccccaacaatctaacacagcaagttgtgtggagaacgagagaggcggcagggagggagggagagatgtctctgtttgtagagatgacagcaagatcaatcttctctttcatgaaaaggctctttaagatggacacgatcactggtatggcgagcgtggagctgtggatgttgatgatagaccgacctcatttctctcctgatggtgcactagcaggaaaaggattggcaagcagttgcagcgaggcttcgacaccatcgtcacacttgctacctggtcaccttggaaggagaggagcactataggtctataggagtcttcaaccatgagttgtcaaactttgcactaggatcacccaggttagatctagtcgggtggtcctatttggatttgatgtacgacattgtagatgaaagggagagggtttagataccgaccggttgaggagttcgtggaggaagaggcgccggacatcgtcgttgtcatcgcggcttgacgtggacggcagcgacagtgtgcttgatggtggcggttgtcgttgcagcggtggttgtgggcgatcccggcgaggtcgtggcccggcggtggtgtttcccgtcactggctgcgccccctcgatcggattagggttttgtggggtggagttggcggcggcggtgaacttcgtaccttgtgccgtgccggcctccacccctcttttatatggcgcagtgtgacgggggcccaccagccattgggctgggcgccctcgatcagggcgcggtcaaggccccttgagccgttgggctcaaggggagggagatctatctaacattctcccccttgatctcactttttcttttagctttttctattccatcacagatttgtaaatagagcatgcttcatcgtcacggtcaatcaccgatggattcgacagccactatacacatctctattcagaaacagatactttacttttgggccctgtagtccaggattcataaggcttcccttaaacccatgccggctacatgttccttgaacacgttgggtggtaggccttttgtgagcggatccgcgagcatcctttctgttttaatgtgctcgagactgattgtttgatcccggactttgtccttcacaacatagtactttatgtcaatgtgtttggcagcaccacttgactgattgttgtgagcgtacattactgcgggttcgttgtcgcagtataacttcagtggtttctcaatactgtcaatcacctttaaaccgggtatgaacttctttagctagttcacctgccccgttgcctcatagcatgctataaactcagcatacatagtagaccctgcagtgatagtctgttttgagcttttccatgaaatagctcctcctgccagggtaaacacgtatcccgatgttgactttgtattatcttttgcaaagtcagaatctgaataccccactatctggagtgattctgatcttctgtaagacagcatgaggccttttgttccttgcaaataacgcaagactttctttaccaatttccagtgctctaggcctggattactttgaaatctgccaagtaacccggtaacaaatgccaagtcaggtcgtgtgcacacttgcgcatactgtaggcttcctacagctgacgcatatggctttgttttcatttcattgagctcatactgatttctgggacattgcgatgccccatacttttcgcctttcactataggagcaggtgtagcactgcatctgtacatgttgaatttcttcaacaccttttctatatatgtcttttgagaaagtcccaatgcatactttgttctatctcggtgaatctctatgcccaaaacatatgaagcttcaccgaggtctttcatgtcaaagtttgaggacaagaatttctttgtttcctgcagtagactgacatcactactagccagtagaatgtcatccacatacagaattaggaaaataaatctcccattcttaaactttgaataaatacagttgtcctcgacattctcttgaaacccaaatttctttattgtcccatcaaacttcaagtaccactgtctcgaagcttgctttaatccataaatggatctctttaaacggcatcccatattttcgtttcctttcatgacaaaacctttcggttgcaccatgtatactatttcctccaaatctccatttagaaatgccgtttttacatccatctgatgtaattccaaatcataatgtgccactagtgccattaaatcctgaaggaatctttacacaagagactggagaaaatgtctcattgtaatcaatcccttctcgttgcgtgaagccttttgccacaagtcgcgctttaaacttttctatattccctctggagtcatatttggttttgtagacccatttacagcctactgttttggctcttttaggaatttcttctaaatcccaaacattgtttagtttcattgatttcatttcatctttcatggcttccaaccattcagatgagcgagcgcttctcatggcctcttcatatgaggtgggatcatcctccatatgcgactcttctatattataaattttatagtcatcacggatagccgatcttctgactctttcagaccttctaggagcctgcatatttggcacatcctgtacctgaggctcttgttgagtctcctgtactggcacattatctatttgtggctgttgcagctcctcctctggtgtggcaaccatttctgttgaatcctgtataacaggttcctcactctcattgttgccacaggaggggtaacaacagatgctggtacctcaatgacaggcattgcaggcacaacatcagcaggtaaacaaaagaaaggttcctgagtcgatggagcgggtacagacaccgcctctcctcaagatcaatttctcaaactaccgagctccccctaatcatttcgtcttccaagaagacggcatgtctcatttctacaaactttgtataactgtttggacagtagaaacgatagccttttgatctttcaggatagccaataaaatggcagccgactgtcttgggatccaacttcccaatatttgggttaaatactttggcctctgcagaactcccccacacacggaggtgagctagcgagggtactcttcctgtccatagctcatacggtgttttgggcaccgatttgcttggaattctgttgagaatatgaatggtggtttttaacgcctccatccataaacccagtggtagtgtggagtagctcatcatgctgcgcaccatatccataagggtacggttacgccttttagctaccccattctgttgaggttcgcccggtgttgaatactgggctactattccattctctaacaagaaccttgcaaaaggtccagggacttgcccataaggtgtatgtcgaccatagtactcccccccacggtcagatcttactactttaatctttatatcatgctgattttcaacttcagctttgaatatcttaaatttatccaatgcttctgatcgctctttaattggataaatataacaatagcgggagtaatcatctgtgaatgttatgaacgagtcatagccatccacacttttcacaggaaatggaccacaaatatctgtatgaatgatctctaaaattcttgcgcttcgttttgcaccctttttgatgctctttacaaattttcctttaatgcattctatgcattgttctaagtctgagaactccaatggaggaagaatttcattcttaactagtctctcaattctccccctcgaaatatggcccaaacgacggtgccataatttcgatgagacatcgggagttcgctttcttttcttgttttcttttgtcaacgaggacacaacattcacattctcagaaagagataacaaataaaactcgtctcgcaacacagcaagaccaatacatgcattattatgccatagttcacatttgccacttccaaagcggcaatcatatccatcaaaatccaactttgatacacttattaagtttctttgcaaagaaggaacataaaagacatctcgaagtaaaagcatgaagccattcgcgagctctagaggaagatctccaacagcttcaactttttcttcaactccattggcgactctaatggagctttctcttctttgcgtagtcctcgtcgaacggaatgcctttaaacaattacaagcatgaatagttgctccagaatcaatccaccatgtggatctagagtaaccaacataataagattcatttacaaatgtaataatgttctcacctttccttgccatgatcattttcaaaaaatcaggacaatctttcttgtagtgtcctgtcttcttgcaatggagacactgatctttctcaacagcgaactgttgttgctgaggcagatgctgagattgtttagcttttgaggcgggagacttgtggttctttttcttatctttaacatagtttattgaaccaccatttgatcctttgattctctcctcctcttgcacacaattagcaatgagcttctcaaagttctatttctctggacttatgttgtagttgacaataaaattgtcaaactgctttggcaatgaggccataactagatggaccagaaagtcatctgttatgcctaaatccattggcttcaacttggaagccatgttgctcattctaagtatgtgatctctaacaccacctccatggtacctttctgtcacaagctgcttgatcagctgtgtagcatacgtctttgaagagccagtaaactgactctttattttttcaaggtactctgagacagcgtcacactctgggattgagcccaatatggtaggctcaatcgtattctttaccacagccaaacatttcttgttggctaaggaccatttcttttgttcaatgtcatacgacatgacgagaggagcattgtccctctgtctcttttgccagtcagcatctgactcattttcacctctgacaagttcagcaggttctataggacatggggtagtcaacacacaatccacctctcccaagataaaagcaaggtcaagttttcttttccattatgcgtagttatctccttttagcgtcggaatatctttaatacaaaccatcaaggagtagccacttgaaataatcatgtgcggtgagaacaaaattaacattaaaatattatgcattaagcctacatcaccgttgggcagaattagacataacacatataaccataactataatattgcattaacaacgttggttagaaaattacaacatcatagcacataattaatgttcctaaaattaaattctcccgttggttcgaaatttaattttagaaacactaattttcatcaattacatctatttgcagcggaaaactatgtaaaaatcatatgaacagtagcaaaatctatgtaattctctctctgtgaaaattctcccattggttcaaatttaaacagaggtaaaacatgcaaaatcaatttaaaattctaatgtaatttgcatgaaaattatacaaaataaaatggaaaaattgctactgttctcttttctttattttcggcccccgagggacctcttctgaact

SEQ ID NO: 14340 - DNA, 1422 bp, Oryza sativa
cacaaatgcagaacccagagatacagaggaccagctgtagagttatttcatacaagggacttgagcatctgcaaacttcagtaacctcagtggacacctggaaccaattcttcatacatactgagggacaactatacatgcaaaatcctttaaagtgtttcaaagatattcttcatgagcacagaacaagccttaaatttgccttttttttgagacggagtcttgctctgttgcccaggctgcagtgcagttgtgcaatcttggctcactgcaagttccgccttccaggttcacaccattctcctgcctcagcctcccaagtagctgggactacaggcacctacaaccatgcctggctaattttttgtacttttagtagagacggggtttcacgatgttagccaggatggtctagatctcctgaccttgtgatccacctgcctcagcctcccaaagtgctgggattacaggtatgagccaccgcgcttggcctaaatttgactttttaaaaaaactttactgtgtaatgcaatttagcatacttatagagactttattggacaacaggtaagtaaaattatccttattttacatatgagaaaactgaatatgccagctactatttttgcattgaacacccagaaatgtggtgatgtaaagcaaccattttattaagttcacagattgttagtattggaattttggatagggtatagaaagaaaatcttgtctgtgctccacattttctagagcctcatttgggaagactcaaaggcaaggaatgactcagagggaagaatcatctggaggcatgttcatcagcatggctagagggtgatgttggctgtcagctaggacctgagcaggtctgtaggctggattgcctccatgtgccccctctgtgtgacctggcttcctccacagcagggcagcctcaggagagtggggcttctcacatgcagtccagagtttcagggatccacgtagaagttgcatcattttttgtgatctatccttgaaagttgcacagcatcattttattaccaaaatgccagaggtttggtctaagtcctgctgttcactccacagaaagccaatcactgagacaacaagtattgccagggaagaaggctttaatcaggtgctgctgttgaggatatgggagatcagtctcaaattcacttccctaactgactaccattaggggtttctaaagcagggaagaaatgtaaccatgtgcggggaaacaggaattagggagaggtagggaagaggagttcaccaacagaaagctggtgcttatttaagcagtcatgatgggtgaggactctggcatcccattgtctagatgccatgatctggtaagtttcacttccttgatactatctgggaagcctggggatcctctagagtcgactgcag

SEQ ID NO: 14341 - DNA, 11833 bp, Oryza sativa
tcttttattccagaatacagatatgatactactagtactggatacagaattcggctccacacatcgacccaggcagaatctactaggtggcaaccggcgcgctgctgtatatatatgatccgtctctgatcgatggctcagctcaccctgcacacacgcacatatatatagattagatgacatgtatatagtactccatcatgcaaagccatgcgtaattatatatatttaacggaattagatgtatatatagagagagagatgatgagatgattaactaattacctggagcagtcgatggaagcgctgatggtgtaggggacgctgacgccgcacttggaggggatgctggcggcgttgccggcgttgagccccttgatgccgcgggccgcgttcttgaggcagttgcaggcggtgcgccggtctgcggtcgtgcttgctgccgccttgaggctcctcacgccgctgcagcaggccgccgacggcccggcgccgccgcgggcgtaggtcaggcagggcccgacggcggagttgacctggccgcaggtgatggccacggcggcgtgcggggcggcgaggagcagagctgccaccagggcgaccaacaccaactgtgcacgggccatgcttcctagctagtactgttgatctagttgctggatcgatcgatcgatcggtgcgaattggttgctgatgatgagatggatgatggatggatgaggagaatacgcgggaatgcaggggcttaaataggtacatttgctagtgtggatgcatgcacagatgcgcagctgcaagagatcgagcaattaacaaagcaaggatgggtttgtggtgtttagacggtgcatgtgtccatacgttcattcaatacgattgggagctagcttagcagctggtggttggctgttgggaaaaccagagcttattcccctccatctacagtcgactgtatttgcgaattgtattgatgtaaatgtgtagaaagagtaaatatatttatattaattttagggaacgagggaacatgtcctcaaggttttccactaggaggaaggttgaggttttccacaggaggatgggtatatgagaaatgcgagtagttgacagttaaccttaaaaagaatagttggcaaatgatcaagacaaaactaagtttaatttgttcacacctgcagaataagaatattgtttggtttactattattccgagggatcactacttaaaaaagagacatatatattagcactataggtgctgtacgtgctaatactggcacctatatataatatttttcccacctcaactggatgaaaacataaaaaaccgacaccttttaaataactataggtgttggttctaaagaaaaatcgacacttatactatgagtgtcggtttttaagaaataaccggcatctgtaatatattataggtgtcggttaattaaaaaccaagacctataatatattataagtgccgttttttttaaccgacacctatctgccgaaccgaccgagccgagctgagccaccctatctacccccatccttatctcttcctcccctctctctctcgaactctatctcccgcacccacagtccacttcctcctctcttcttcttccctctttctctccatttcttccttctcctctctcctcctcctccatccaccatggcggggccctccactccgccagatccgatgggaggggaggcggtggtccggcggcagcacggctgcgtgctcccctatgccagagccgacgggaggagaggcagcggcccgaaagcggcggcaccctcccctccgccagatccagtgggaagggaggcggcaacatggcagggccctcccctccgccagatctagcaggaggggagacggtgacccggtggcggtccggaggggtggcccagcggcgggaggtggcatgcggcagtgggagagagctggctagaggtgcgacggtgttggcggccgtggatccatctcttctcctccctctttgtgatttgttcatgttgatgtgatctagatgtgtattatttgatctagatgcattgtttttctagggatttttttactatagttcatctgttcatggatttgacgcaatttagttcacgtgttcatggatttgacgcaattttgggatttggttattatttgggatcagcttgacggctcgatacatcaaaccgtttttttttttggctcgtgtatgcctcaaagatgtcggttttgacccgagtaatcaatgccgcttccgtggtgctggttggaaaaaccgacacctaaggaggtttctcaactggcaccgattagtgcttctgtagtagtggataagtaagctaggatgtatgggccatgaagccctttcccttgtatatactccccatatccaaataaaacttatcttagtttaaattttgtccaaaaaaaatcaacttctatcatcttaactactctcagcacacaaaacgagaagttttatcccttaaataccttttacctacctatcactactactaccttttccaacaataagaggtattttggtcatttttactcttcactattttcttcttgggattggaattgatatttcgtggtacggagggagtatgatccaaatgaataaatatttatgcatgacatagcttcttttccatatttgagattaatttgacgtgtatttgggccaagggcttcttcgccaggagaaatgaaacaaggccggcctgcggtgcatccgattcaaatgaagcacatgaaactttaggaactatatgtattagtacaccggcctgcctgtatatcgtccatccatcttttcaaacattatattatatcaaaagaacaagagtaaattgaagaagttatcatattcactctaaaggtctagaaaaataagtatcctttttattatgggaaaagtcacatactaactttttcttactaaattcttactaacactgacatatcatgctatgagtgcatctagattttttataactttcatctacttgaatcaaacagttgagacgattgttagtacaaatttagtaagaaaaatttagtacgtgtagcagtactcagcaaataggataatcattctcacactctgcgagcctataaaatgtgtgaggtaagttataactagacatatcttttttttttgcggggtagacatataaagcttggtcagatgattgcaagatatctgttggctatctaattaatacaatactccaacattgtattcgttgaacaacttaattatgtgttctcatagttttacccctttcaatagtctttcaaagtgcggctttgactatattaataattccatccaaaaatataagtattattggacttcgatatggtcttcacgatgctactttgactaacaatatttgtaaaagtaaggctgctttcaacagcatgtgaaagagagaaagtttgtttcgttagcggtgtgtttttttacactactaaatggtgtgtttttacaaaaaaaaatctatatgaaatttgctttgaaaaatcatatcaatccatttttgaagtttaaaatagttaatactcaattaatcatgcgctaatggtacacctcgttttgcgtatcttctcaatcttctcttttcttctcctctgaaactcagcatattttaaataaaaagagttgcatattgtgacagtttgtttaatgataaatctagtaatatcaattttacattattgattttttttgctattaataaccaaagttaaaaatatttgacttgacgctattttaaaaatgcttatatatttcgagatgaagggagtaatttattaatttattattagagtatatatatttcaagacaaattaacacagtactgtttttttacccaagtttgtatatatgtgtaatgccaggaagatggagtaatcggtgtagaacatgtatttgtatacgaaaaagagctatatatctatgtataatccacaacgtacacgcacgtagtacaagtagtactccatgtacatgcagaagtacatatgcatatggtacaaaaactgatctctagctctcaggtacgtatagtcgatcgacgaataaattaaggaaacagatagcgtagtgaccggccgggcgatcaaccatgtatgcatggcgatggatcgacctagctagctagctctcattttattcagcataaacacagataacacaagatacaaagcgtgagacgacagctgcatctcggccggcgctgcatgtcatcctccggtagcgatcgatcggattagttcacgctgcacgtatgtacacgcacaaattaatttatatgtacttaattaattagatgatcatatgcaaaacgatagtataaatttatcatattgatggatgattacctggagcagtcgatggaggggctgatggtgtaggggatgctgacgccgcacttggaggggatgctggcggcattgccggcgttgaggccgctgatgctgccggccacgttcttgaggcagttgcaggcggtgcggcggtcggcggtggtggtggcggcggagttgaggctcctgacgccgctgcagcaggccgccgacgggccggagccgccgcgggcgtagctgaggcagggcgacacggcggagttgacctggccgcagctgatggcggccatggtggtgtgtgggcccgccaggagcagagctgccacgagggcgaccaacaccagctgtgcacgggccatctcgatcttggtcgtgtgtgctgacgatcgatcgactttgctgctgctgctggtgtgtggtgctcgtttgctgctgcaggtgagatcgatcgatgagaattcccgggaatgtagggggctttaaatagctatgatttcatctgtgccgatgcatcgaccaagtcaaatgtagttactacgtggaatatatagtccacctataattagagaacatatcctatacacacaagctttacttatgtacacactatacatatcaattagcaaatgtcataaaaaattttagaaaaaattggacacatacttccaatagttttacacctacatgtgaaatcttatcttcaatttcattatattttagccataaaaaagacaaaatcctgatatttttacccttaaaactgtcgggttttttttcactttttgttacagctaaaattcgggtttttttcactttttgttacagctaaaatatattgaatttgaatatgagactttgcacatatgtataatactattaggagtaaatatctaatttgtttatagaatgtttcgtgacattttttaattggtgtacgcatagtgtaattaagcttggagtgctagtgtttaggcaccgttcttagtcgtcggtgcgtctaatgttattcaattcaattcaattgaatcagggtggttggttgttagggctggtttagctagctagtcacacagtgttagtattagtgatgagaaaatgattagcagcggcctaacggagctagtcgtttgtagcagctagcatgcatgttgtacatttggaacatgcaagtagttgagcgcattcatgatgtttggatccaagtgtccatcatatcagcagtaacatccaacgatccttccagtattcttctttcaaccacaaggacaacttatgcacacgcgtacgcttcacctggttacactatagcccaataatgcgctcggctattgctaagaaatataagaatcttacaagctaaaaagactaattaaaattgctcagctgctacaaaataaactatgaatgccaaccaacaacgacgatatgatgagtattttcaggagttggtacaaacacagtgaaatatctcaatagcacatcacattttagtacacaagagattgatatataattgggataaaagaataaaagtcatattaagaaactaatccaaatatattactatatgataaaattcggataacgtatttaatagtatttattcatgttcaggacgtgtattgtatcaaccatgcatgcatgtatttaagaggttaaaccgaaacttcatgtttcttatcacaagaatgtactagctggcctggcatgtgctccacaatgcaaagctctcagcagatcgatcaattaaatctaagaattttcagttactaaggtggtgtttgaaggtggtgtttggttggagggactaaagtggactaaagggacttatatttttgtgagagggactaaatttagtcctaatttctaaacacctcctaagtttaacgtagtttttaatcaatcagctgtatgctattttgcaatccaattaagctctagataagaccacgtacactatggagtagtagaattttatctttctttttcacaagaccaagctgctagctactccagttagtaggagtatttatttatcgttgacgtaggttatccctcccggccgggacggctgtcggtcgccagcaggtggcttccaaattgaagccgacgatccattatgttcatgtcattctcgtatcgatctacctgccaaccgttactcctcctcctaggtattaatgcatatcatgatgccacgtacagcaacccgtggccaactttctatgtagacgttagacaaattaaagagggctacgatcggttcatcttggcccgtgttagtttcaaaatatttcttcaaatttttaattttttcatcacatcaaaattttcctgcatacacaaacttctaatttttccgccacatcgttccaattttaaccaaacttttaattttggtgtgaactaaacacagccttggtgttttcgtcaggcttgtatgatagagcactattccctttgaaataagggtgtgcttacttcacaccaaaattgaaattttgattgaaattggaacgatgtgatggaaaagttaaaagtttatgtgtgtaggaaagttttgatgtaatggaaaagttgaaagtttgaagaaaaagttgggaactaaactaggcctaatatagagagtttgaaaaaaaagaattggacgtcacacgctcactagcatatgataaataagattagaggcctaactcacataacttcggtgggcacacgttttactgttgaacgtatctgtatatgtatatgtatacgtaggtagagtatatatatattctctcaagagattaaatctaaaagaaacaagcatatgtgcctatactatggcttgaatcaagataaaaaggttctaccacaagagaaagagcgttatcataaagtctggacaactaataatgttttccggtggtcgaccaatttttcgtgacatcgatggctatttgcagtggagatgtcaacgacggagcctgggcagccacccgaacacaaggacctttaccagtttgtagagtttacaacattatcatcgcgcgtttgcaaattggcttatcaaccaaatcaaaaatttgaattttcaaccataattctagagttgattttcaggtttcctctatcttggtttgtttttcgccattgtgttttaaattgccaacatagatatacaagttttatcctgtaaattattttagttgctctgttcttttttttacggctatattagctacatatcaaacgatgagagttgaaattatgatttgaggtgcaccagtaaattgaaataaattcttgggatgtccttacgaatatatgggctagggttttttttccatcccaaacaagtcctttaatctttttattgggtcgaaactcaataaatatatgatagatttattacaaaatgctagctagctagctaggacccaggtcaatgaatagaacacaagtagataagaaaaataaggggagaaataaaaaaaagcgataagttttattttagcggtaaataacgcattgagcctcatagttgcccacctatccctcttccctccctttccctcgtgatgtaaaaaaaaatatactctcacaagcattggttttgtcctagactctcacaactccccttggacccgtcctgtccctctcgttcctaccctcctctttggcactccctaacctcctgacgaaaaaaaaagattactctcaacctttctagagtataaaaatttatcttgtaactccccttccccacacccgctctttttttttgagaggccaccccatcctcttacgatgaaaaaagaagtatcccttgtttatgaacataaaaagaatataaatcttggtgacaaaaatattctttcacattaagaggaaagagtggggcatagttattatgaccggaccggaccggaccggcggtccgaccgggaaaaaccggaaccatggcctcgatcggtctggtccccttaaaagatcgactgttcgattgaactggggaaaacccattgaatcgtgcagtttttatataaaccgagctttgaaccggagtggtcagacctcggccggtccagtccccttaaaagatcagctatgcaattgaaccgggcggtttttatataaaccgggctttgaattggagtggtcagacagggtaacaagctactaggcttttgttgatgggctgaggcgaggcccaatgagcaaactccatcaaaagccttagcccactgagcaaactccatcaaaaattgactttgggtcgcatggctaagaagagtacgcactacccaacccactatctcttcacttttgttggtaccaaatatttacgtcatattgtacattgaactgcggttggactggcctaaccaatggtcgaaccaccatactagtgaaccgagagctctaccagttaattcttcggtccggtcttaataactatggagtagggggtggaggggacaaatgaagagcctgctatatagaactaatgtgtcacataaaggtgagagtagttttttttcatcataattaaggtgagagcaggggagcgggtatacacacttatatgaggactactacttagaataaacatcccattgaactgtgtacagtagttatttgttttgttcttttcttcttcttttttttcccattttaccccttattttctgattaactaattaaattttgtatggcatgggcctggcaaaaggaggtaaaaggatatagagcattctccctttggattgtttggtgggctaggatccaagaaatgaattgatgggccatatatgaagaaagagagcaggctagtctgcattacgttttttttttctttcagttttgaggcatggtgtgctgccggcccataaaaaacgtttgtacggaagtacgttcatcactacgtggtcgcatggagcctcgtcactgatccgtcattaattatattccagaattccatttggcatttcttcaaattaataacagctcatatcattccatccatatactattacttattgaagtaaaaaaacggggcacagcaagttcaagtgtgtgtacgcttgtatcagtacaacattattattattagattattatatatatgaaaaatatataagtagtgtacatagtacactacatgtaaacattgaaacgcattattacattatatagtgcacgtacgcatgcagcaagaaaataaacaaagctagcagtgaacagtcactctctagatcttcccatacatatcgatctcagctggagatgatcaagctagtaattagttgatcctgcataaaaaaggaaagaggaaattagcttaattaggccaacacatggatggagcaaatgcagatagagagagagaaaatgtagaatacttggagcagtcgacggaggtgctgatggggaaggcgacggagacgccacatttgctggggatggaggcggcgttgcccatgttgaggttcctgaaggaggaggccatgttcttgaggcagctgcaggcggtgcggcggtcggcggaggaggaggccttgccgttgagggtcctcaccccgctgcagcacgacgacgacggcgagctctccctccccatcacgtacgacaggcacggcgcgatcgacgacgtcacgtcgccgcagctcaccgccgccgacgccctctccgccaccaccgccgccgccaccaccgccaccaacgcaaccagcgccatcgtcctgcgagcacccgccattgtctcgatcgagatctagctctagctaactagcaacaatgtacactggtagtgagctgtaagctagagcttgtggtggagtactggagtgagcaaagctgtcgaggaggggtggtataaatagctagcgatagatggaggtggagaagaaagaaattaaggccgggttaattaggttagcttagctggttagcgataggaaacttccagatcggccggccggccggagatgggagatgatctactgtgtttagctaatagtatagagcgtgcatgcatatgcatatgtaccagccggtggttgcgtattgggaccctcgggatctgtcgatacgtgcgtgaatgcacgcatgtgatccatccatctttgtttgcatgctcaggaacaaccttcttaattgccaccattgttatcttgcgtcttttcactccgcgaatggacttcaccatttttttttgacaaattgatctttttgaaaaacttatttcgaaactagccactgccaaaaacttcaactatttccgtcggctcagcgctgaggttgtaaatagcagcgccactggacctgacgctgacctcgtgccagcgtggcagctgagccgacccccctgccgacgtggcaagaacctcagcgccaatcgcttcggtgctgtgttgcccaaccttagcgccaaccgcttcggcgctgagatgcccacccttagtgccaacgatcccgcaaagattctctacaagcatcgaactccataattaagaaagtccagttccctccgataaccatatgtagaaatcaagttcaattcttggataattcatctagtcggtcttatttgcacgtttgtcactaaaaatttgcatattactatgtcttgcatgtaggattgacatacagaaggaaaaacaagaagaccaccgatttgactgcttatcatcagacacacatcgatcgatggaaccagttcgaagccaaccgcatgccggataaagcaatgcacaacaggcaagagtttgacgcgtacttagcctggctcacgaggaactaccgcctcgccctacgtctgtcttggacgctagccaacatagcggacgacccaactggggtggaggagcagaacaagtacgatacaagtacccgtagaggtagcacggtcggggcgggtccagtttgagatagagtggtgagtatgggttctagttactcgttttcccatttccgtacttcgtgcttataacttctcctacaggcacgggagctgatcaggacagtcaacgatgcgggcgtggcacttggcatgccccccggctcgcaacaagagagcagcgttcttcgaaatgcattacaggtagatttgtaaaatttgtgcaccgtacacataattggaactaactccttccttctgttggtactagactctacgacagtgatgcagaagttggcggcacgtgtaggatgcagggccgatgatgccgtcgaaccaccttgacgggctgagcgggggagaagtcgaggagtggctcaagagggtgaacaagagggagaggaggaggaagaggaggagcaagtggagttcggtccctcccagctgcaggacgctccacaatcgttgcaggggccatctcgaccacagcgcaagagagcttatgtttccgactgaaggtacactcctgatcagcctcgcgctccaaggggta

SEQ ID NO: 14342 - DNA, 8621 bp, Oryza sativa
gggggcgttcttgaccaacccggccctgccccgccccgttgccatccctaatctcgcggctgcatttgtttgtttcagagctactaaaaaagatttcacgcgctacgccgcgtggatacagaagcaggttagcaggctgactatgcttatgtttatggacttatcagccaaaatttaaatttgaagtttttttctttaagaattacacagtacaacacaaacactcacaacacatactcacccttatgaacgcacgcacgtaaaccctacccctatgagcatcctcacacctatgaacgcatacacgtaaaccctacccctatgagcatcttcgaagactgtgctggcaaatccatcttggagattgacaaagtcaccacgggcgcctcgttgtcgactgttacgttgcctaccactgaaagcacaaagccgttaaatcctggaaaattcgcttccacggggagtcgaacccagaatctaaggtgctactaaggctcttataaccactagattttggacttatcagccaaaaattaaatttggagtttggttttgggatttttttttaacgaagtttatttttttcagcctttgtttttaaatcgctaagaacacacatataaaagttttattcataaattattttttatgcaaatataccgtttggcttatttgaggaataagccagatatggtgagaacggacaaggattttctacacctaggtgctatggcacccatcattcgcatgcgacttaaatagttgtagaaaaaaattaaaaaaatagtaagattgtttgtgatgatataagtatatacacaaacatgcaggactaaatttgatctacaactaaagaaacaaaaataataaaattaaacactgaatagtgcccgtatagtgcagataaaatttgttatttttgtgtcttcatatattgattgaatttagacttgtatgtttgtgtagtgtcttatattatcatagtctatcttatcaaattttatgaaatttttatacaactgtttaagttacatgcatacacctaggtgccatggcacctaggtgtaagaaagtggtacctagatgtagaaaatactttccgtggtgagaactaattggagtgaaaagatttgttagtggcacacaactgaaaattgcataaagcaaggatagcctcatccgctggaaccacactggaactactagcgtggagtaaatttgcaaagcaaaattagccactggaaaatatagggacctttaaatataaaactacaagttacgggttctgcagaaaaagaacaatttgtactatcctgcttttttttttagaatatttgtactatcctgctagcatgggttggaatcttggaatcataagaaagctagcgtcatctaattaatcatttcgctggtagtggccggttttaattaaccaagtttggactaaccaagtttgcagagtaatactaagtgttttgtatgttattgcatctatttgtatccacccgtaaactcattcacgatgagtgcaatttactcgatcaagaattaatttgtaatatttaagagtagtgtccatatatagcaggaattctgggaaaatataacgtactgataatttaagaagatatgtgttaatcctatcttactataaagttaatgtcccctaactcctaaagctcaacatgcaaacatgtcacccactagtaataattacatatttaatctcatgcaaacatacaaaatcatttataatttatttaattctacaaatcaacatgcaagtatatctctaatcgttattcctcacatcatttccataatattttaacaaatatatctatcatttataatatttaacatatacatgttccatgttaaatcgtgggtatcatttgtttgttttatgataagtcctgctaaaccctcacgttttattatttttttttctttttaatactagctcgataatcgaaaaaaatattgaaaattaattagtaattcccgcagcaaaacgcgaggatcacctagtattttagaaacgagagtattttatcagctttatgttttgacgttgggaggtatttggatccagggactaaactttagtccatgtcatatcggatgtttggacactaatttgaagtattaaacatcgactacttacaaaactaattacataattgagagctaatttgcgtgataaattttttaaacctaattaatccataattagcacatgttttactgtagcatcacataagctaatcatggattaattaggctcaatagattcgtctcacgaattagtccagagttatggattgtattttagcaatagtctatatttaatacttctaattagtgtctaaacatccgaccagggtttagtcccatccaaaccaattaattccgttttatcccttacctgaactgggatcgttatcgatgacgtggtgtcaacatatacagagtcaagagtagtgatgacatcaggataacaatcaatataaatagatagaagcaaaataaagaaataaaatactacaacctacgtgtcaaccttacttcattttcacatggtgaggactcagtataatgtacatatatacatcaacacagtaacaatataacatatatatatatatatatatatatatatatatatatatatacatgcatgatctccattttggtgtgcatggcagcagcatccgtgagatgcacaagcgaaatagacagaagttgagatggtgagttaagatcaaggttaattgacgtcctgaatttgcgtgggttgagctaatttaccgttttcatgggcagatagtcggctagtgagctggtgggctgaaaattcggattatttgctaaacggttcatcgaatgatatgttcgaaataccgcgaataacttatatccaccgatttttttgcaataccacatctgatccacacctgcaccatacaattcgcatccgagggatttaaacaaacatataccatatcttgctccaaccaaattctgagagtatcggatcagaagctatcacatcagttttcaccgctaatatctagacggaggagtatatataaccactaaataagcacatactatgtatactccttagaattagtgaacactagttttaaacatatatatatatatatatatatatatatatatatatagtactcccttcgtattttaatgtatgatgccgttgactttttaatcaacgtttgaccattcgtcttattcaaaaaatttatgttattatcatttattttatcgtgacttgatttatcatcaaatgttctttaaacatgatataaatatttttatatttacacaaaaaatttggataagacaaatattcaaacgttaattaaaaagtcaacggcgtcatatattaaaatatggagggagcagtactttaacgaccctggtgagtttgggtgtacaacgaccgaacctactatccatccagtcataacccagctgctttcttatgaaagtgctactagctagtagacatagatcttgttatcaccattttgaacagttggatcaggctataatatctcacaccatccgttggagatgtgtgattccgacgatagaaaatgatttattatctgtttttatgttcattcttctccctttatcaattttaatatataatatttttcacatttccgtagaatcaatttcagggtatcattcttccttgtgaacaatcaagtaatagaatggccacgagtattacacagatgcggataggatttcaatatgactttagtgacatcagggatgtgctgttggttttcgtctcttggaacatgtgttagaggacgcattcgcggaggtacgagtgtggtgttgtttgtatagtggtgtgtatgtgtgtaaagctgtcatgtaaattaaaaataataataaagtgcagagctagggagcatgatatgcatttaccaatttttgcatatgacatactctccgtccaaaaaaacgaacataagactggatgtgacatattctagtacaataaatctaaatatacgtatgtacgtattgtagtaatagaatatatgtgtcatatttagtatattaggtttattttttatgggacggagggagtagaggggacaggggaataatgtaacaaggaaattactacagattgcctcagcaacaagaagctggagtacgtagctagctaggtccaagtctggacaagatgcaattcatcaacgtaggattacacgtacacagagcagtgtacagactcaagaaaattaagatagcatgctgatgcacgcacggagcgtgcaacataaagtatacagagatacagagagagatgaccagcgctgaatgatatgccccagctgttatttttactgtagctattattttggctagttgatcaactgcgagccagcatcgatcgatatatcgatcggtcggtctacgcaggattaatcgatctagctgaccctgcaccaatgaaataatcatgcatatatacagtggattagtcagtaaattaagttgaattaacctgaaaaaagtaacatgcatggatgatagtatatatttttacttgctgcagtcagtggagaggctgatggggaagccgacgttgacgccgcacttgccggggatgccggcggcggcgccgaggttgagagacttgatggtgccggcgagggtcttgaggcaccggcaggcggcctggcggtcagcggtggtgcgggcggcgttgttcagccccttgacgccgttgcagcatccctgggtgaggccacccctccccgtcacgtaagagatgcacggcgcgatcgccgaccccacctgcccgcacgttatcgccgccgacgcccccggcgccgccaccaccatcgccatcaccatcacggcggccaccgccttgaagttcaaagccgccatatctatctagactgatggatgatcgatcgagtagctaggtaagcttcgttcagtcagcgtctcctcgtcgccggcgatggatggatcgtcggtcgatgggtggagggtacgtataaataggaaaggcaacaggagatgcggccacgtgctatgatagaatcatccattgatggcagtcgctctgctaagtcgttgggagttggactccatcgagctagtagctagtactagagtcttctcaatctcaatgacgtactacaacaacatgtgttccgttagattaagtttgataatagtgtggctaaatgctagcttaaaaatcctatatctaatctaatagcatcattaaagtgttggaatggtaattaaggtgttgtttttttaaaagaaaataagactgtccatcatcttttcttggagtgtctctatacaaaattctttggagagcattgcaattttcttctggttcatccattccacatagtatatcatattttttaaaaatagctcgtggaggttgataaaaaaactcattcttataagagcatctgttttatgttgagcctatgatacggttgagcaaaaatgatatggtttttaataacactatctagatcatatttacatgtgcttttcagcgtaacatattggctctgatcatgtaatgaagacactaagttaataaaagttgcacattgcaaactggagtcaacgtttatgcaacttttcacaaattttggttggaagttcacaaacaatattcaataagtttgtactttattttttttcaattggtgttagtgccggtgtgtggctatgtcagtttggatgtgtcccttatgtctttatgtattcttttgaggtgtgattgtgtttggaatttttttaaataattagctctatgagcaaagaccgggattctattctattatcttaaaataatagcatcattaatacttgatctattgctcatatgcacgtaatatcttaaaacccgtgttaaagcttactataaatttgtaggaggattttcttctttttttttaatacgtgcttatagtttgcttataaattgttattgtacttgctctcagtgttctatcagtatcggaagatttattaatcatgggcgagtagtaatcactgctactatacttgcttctaactctatagcgcattcattttctaattgaggcaattaattattttttgaacattatttttttttccgctaataattaatatatcgagctttcttttggttcaactgataattgttgagctacaattatatatatttagctaggaaaattaagttgctgggatagtctctcggttttgtaatataaggttttattgacttttaaatattatgtttgattgttttatttaaaaatttagtgtgaatatgaataaataaatccataataaagtaacctttagtgtaaaagtttttttaaaagtaaatgatgataatatataaaggtttttcaggaaacaaatgtctaacaatattttcaaaagttaaccgtaccatatatttaattaaaaatggagattagtagtactcccttctcaaattgatcatcatacaatggaatttaaaatttctcaaattgatcatcatataaccgcatgaacacggatttcattataatataattaatgcagcatatgagaatgtgtgcatgttaaggtgtaattggcatggtgttaaatcaatgtgtgcattgtgagagaatgtgtacatggtgtcttgattgatgctatttaaattatactatttgatcttgctatataaacatatactccctccattccaaaatatacgacataatcacccctaacccaaagatcaagaaataattattatcatcttatagtttggatcatcctaataaatacaatacatgcatccaatagaattagaggacatgagagtggaggatttaaaaaaagtaataatttaatggagaatggtcatagttaattggctatatgcatgcatgccttatattatggaacatctaaaaaaagtggttgcgtcttatacttcctccgttctaaaatataaggcacaactacccttaacccaaagaccaagaaataattattattatttcctagtttgaatcaccctaataaatatgatgcatacatccaataaaattagagatcttgagggtggaggatttaaaaaagtaataatttaatggagaagaggtcctaattaattatatgcatgtatgcatgtcttatattatggagcatctaaaaaaagtagttgtgtcattatggaagggagggagtattatataatggagggagtatgatgattatttttgtaagaagggagtacactgcaacgtgtatggaagcgatcgtgtgtgtgcggttactctgccggttccctcagggtgctgtacctctacagccatcagaaatggactgtcgatctgtcttctcatgcgacgactcatgatcagtcaacacgatgtctgcgtgccaagcaaaatttgccccactgcaatcatgataaatagtttgtgtctaggatttaggattttaccggcgtcgatcgacggttatcctgttacagccaatcaacaatctggccagcaggtcttcagctgatcttcaatcacttcattaaatatcgctaatagtgatagctttaattttttctgttgaaaagtcattgttgtaataatgtagccccgctcgatcgctcctcgcgagatcgtacgttgaacacgtatttggagaagtaacatttgtagttttccaaaaataattataagctgatactatttttttttcaaaaatactatatatatttagggtcatatagcaggtggcatgtattggatttgtattactttcaattaattgatttcgtggttagtgacaatatatttaaaaattttaattattaaagttggaatttcaaatttggaaactgtatcaaaaggctatatacacaccttctatctttttcagcgcggaggaaaaatgtacatagttttcgtagtagcaggacatttcactagtacagaacctttcatctgtgacggcctctaacatgtttggaattagcgaccgtcacaaggaagccatctcaatcgggccgaaaaagcgcccgattgagataactcaggcccgtcacggatgacacatattagtgacatgagttttatgcccatctaacatgtctgtgcgaccatatctcaacaactaggcccgattgagatgacttagtattttttttttcattttacatatgaaatgtttatatttgtaagttgacatagcaaagtaattaaatgcagtataataatttattttatttgtcaaaataatttttcgggtagtaaatgatttcaaatggaaaaattttcaacaacaaagttgtataacttatcgatatttacaatttttattttggtcatttttctatataactttttttaactgtttgaatttgaatttgaaaatataacaacttcaaataatattttcaaatactaaatgatttcaaatggaaaagtcatcaacaataaagttgtataactcatcaagatctataacttttattttggtcatttttctatataactttttttaacggtttgaatttgaatttaaaaatatgattacttcaaaacaac

SEQ ID NO: 14343 - DNA, 6743 bp, Oryza sativa
cgtcaaacatttagggatggagggagtatatttttatgtatacatataattttacatatttcataaaagcaaatatatttaaaaaagttaacagcgtcaaatatttagagacggagggagtagtagctatcagtatcaggtgatttaattacatcatgggcgatcgagttggaattaatattttgcaatcgatctctcctctatcgagcgaattcatcttcaacaattaatattgatgaatattgctccagtcttctgaatatcaacgttaagcccctgtttctttcagcttaggattattataatccagattattaggagtaagctgaaagaaacagacaacttattagagtagcttattataatctggagtccagcttattataatctgataagctcatttatgtgagctttttctagattattaggtgaaaaattacccaccatgccaccacacttcctctttagacttgcaaacctaataatctagactctaataattaaaaaagaaacaactaaccgcttattctactacagattataacaatctagcaatctgactcaataatccagattataataattttaagctgaaagaaacagagcctaagtcttctgaatctgatcaacgacatttgtacaacatgcatgtgttccgttatatagttctatcagtatcaggtgatataatcatggtcatgggcgagtaggaatcattattacttgcgtttagctcttctagcgaaatcatcttctaattacggcaatgaattatttggaacaccagaatcaatattccgataagctttaatttcggtactactgaattttacgttactatatgtgtacgtgcctagcaaaattaagttactagtactactctctctattttcttactcatgacatggtttacttttaaacgttatgtgttgaccgtttgcctcatttaaaaattaagtagtgcatgtaaatatgtaaatacgtaagttatgtttaaattttctatatataacaataaaaacaagtggcaacaaaataaatatacatagctagttttaaataagatgaacagctaaacatcaaattcaaaaaatatcaatatatcacatatttggaaacagagggcagtacaatgcaacgtgtacatgtggatgctactgtgtgtgatgttattgtctagctactggttccctcagggcggcgtacctctacagccagcagaaatggattattcatctggtgtctgctcatgcgacgactcatctgcagtcaacacgatgtaggacaatgcaatatatgcatgccaagcaaataggagtaattgccatttgcccccgctgcgtgcatgcatgatataagagtagcttttgtgtgtgtatagtatttttaattaccggcgtcgatggatggttatccagcctgttacaaccaatcaaaaatctggccagcaggtctttactatagctgttattcaatcaaagcaggtacaatagactataagctagttataaacttattttaagaagataaaagataagaaataagagcagcgggctacagaattataaccagttgtaacacatactccaagatacatatgtatacgataggttggaccagatattaattatatagtacatacttataggtaattattgtatgaattggctattaaattgactatagatgattttgagccaataattggctataccattaaacttgctcgtttcacttcattaaatatatcgctaatagtgatagctttaaattttttgttgaaaagtcattgtttgtagtaataatgtagccctgcttagggatgaaaacggagtggatgatactcataccgtattcgttttcatatttttgccagatacgagagcaaatacggatagctcgaatatggaaacaaatacggattatctcgaatatgaataagaatcgaatatgatcggacatgaatatggaaacaattttttatcgaaacacgaaaaccaactcaaattctaataggaacaaatatcaacatatataattacctcattttatataaaatgtagtataatttataatttttttttaattttaaataatattaatattgtggactagtgttaagagatgaactactattaaaatctaaaaaggtatattgaaagttatagaattataaagaaatgaggtatgtctcatgacttctgtggatatctgaatagcactgttcaccggatatccgaattattatccgtatccgacggaaaccccgataccatatctgtatccgtatccgggaggaaatatccgtatccaaactatccgatccgaaaggtatccgtattcgtttttctctggagtggacggaaactatccgcttcgtttttatccctagccccgctagctcctagcacgatcgttgagcacgcgtaagtaacgtacgtatttggagaaaattacatttgtagtttttcaaaaataattaagctaataccaattatttttgtgaaaatactactccctccatctcattgaataagacacgcatgtattctaatattcatttgtttaaatatctgacccataactatttcattataaattaaattttatttgatgaaaatagtattatattggattgatattttaatttgctttcttataattattattttgttactataaatattatattatatgagaaatttaaagtcaaagattaattttgtaggtcatgccaagtttgattgtgcattgttcagtaacggagcgggtaagatatttagcatcacataggtgccatgtattggatttgtatcactttcaattaatttcctggttagtgataatatatttagaaattttagttatattaaagtttaacactggaaactgtaaattgaaggctgtacaccttatatctttttcagcaggatagtgctaacactataatagtagcagaacatattaaagagtcaaaaattttctcacaaagtcacaaagtgatgcattaatatttgctctgatcaatcgataatgaccagccaaatcttctcagccgtgcaacaatgcaacacatatattagttgcttcaattaataccaactgtacacgtatctcgcgtagggatggcaatttacccggtaggggcggggacccgtaggggacgggtccctgcccctatggggctggggtcgggactggtttcgtacccacggggcgaccggggcagggccccgactttgttcggggccgggggaagaattccacccgcgggtccccatgggcccccgaaaatatagccaatgaatacccatgtctatactagtaatatgtccgtgctaacgctacgtgacatctcacaacagcatcacaatgatactttgacaggaaaaaaattctgtacaaaatatcatgcttgattccattgttcaattttcttttgtataacagaacaccatacgaataagcccgagtacggtctgatataggttaacatgtattgcctccgttttttaatagatgacagccgttgactttttctcacatgtttgaccattcatctttttcaaaaaatttacgtaattataattcattttgttatgagttgttttatcactcatagtactttaagtgtgatttttttttgcggggaaaaagagaataaattactcaggaatcaaatcgtttcttacaagatttgatacaaaggtgcaatcacttccgcaccaaaccttgttgaggttctcacatctacctttatttgctaagtagtgactaactgaattttggcttctgtgagtcttcctgagtagaattttggctaagtgtgatttatatcttatacatttgtataaaatttttgaataagatgaatgatcaaacatgtgagaaaaagtcaacggcgtcatctattaaaaaacagagggagtactttacgaacaggaaatttaatatacacagtttgaaatttgaaacagtagtgatgtatatgtctcgactttttagaatatacacagaatttatatgtctcgacttttagaatatacacagaatttgcgtagtattttatgcaacgattattggttagatgttgctctgaagaaaaataagcatatttaattataaataaattgaatagaccatgcaatcccatctctgtagagcaggtcatcaaggcatacaaatacaaaaatatgaattagtattcattcattaatatgaattaaagtctgattattgtgtctgcttggtgcggtggtgcctatgctttcttgcgctgcaatgtcatcatgtccctcttctctaccttgatgatgacaaaatccatttgttcctccatgaaaaataataaacaaggtcatgataaaaaggaacatgatcacaactgccagtaaacagatgaacagaaataaaaaagatcatgcaaaacttacatctccaactgtatagctgtatcacctatgaagcacttaatgtctttcttaacagcacgtacaagatggattccagtgttacattggatatgctataccattcttctatgaatcaatgatagttgcaacctggctgtgtgtgttagtagcagatctatgcaagtagtctacaagaattacattattaggtggcaggacaagaagcactgttatatgtcgaggatattcacattcatttgaagagtttccacatttacctaaaacaggaaatgaaaccattgtatcgtatacccagccatacctttaacctcttccaagccccacagcgttgatggagctgttcgattaaccagccagcacaagcacatcttattgatatgtttgtcttcgactccaaactttaacttcaatgttttccgttagcacacaattcaaactactaaatggcgagttttttttaaaaaaattatatagaagatatttgaaaaatcaaataaatctattttaaagtttataatagttaattcttaattaattatgtgctaatgagctttcttgctttacgtgcgcgaaaaatctttcttcaaactcaccaaaagaacgcaaccttatctcaacagatccaactgagcctatatggtctgattcaccgtgcacccaaattaagaaatattaaccgaatatgtggtcaatatacatccacgaaaacactaaatatcttaaactaaacagatatactatcccgcattccattaacaaatcacaaaggtgtcattttcataatgcatagagaaacaaaacttatggagtgaagtcgtaccaatttaccatcagagtttataaaatgattataaatattccaccataacttgagctaccaaaatagcatgtacagttatcaacaggttaagtgacagtgagtcagtgacatgccatacgaatgatcatggtagcacatcctgcaattaggaaaaattgtagatttataacaaggattgcagcgtttaatataaagattcatagggagtatattaatgcaattcggaaaaatctgaacagatatacagttgaaaaaaagaacttttttgcaagattaatccagctcttgttcatcgcagccggcggcaaaccgaatagactggcgtgccagtgaacatgcgcatatcagcaagagtagcgactatatgtaccttagcagttagctagacacatatgatgtgatgaatagacaatgtttgtttaatttcacctttcaacctgaaatttatcggttcagaaaagtaagaacactaatattagccatgaaacaagatttccaatatggcgcatgaatatatatatatatatatatatatatatatatatatatatatatatatatatatatatatatatatatatatataatgtcaatgtaattctgcagttctactgataagaaactatggagatggacacttaaagcactgatttatacagagggggctgcgaggacggtggcgtggtggagatgtgttcggaaacttattaaaatagggcactagtgacagtattgcaaacattttctgtggaaggaagtgaaatgatcaaaccgaatatccgacatgcatcaggaaaggaaactattttaccaaatgcagagctctgttctctccggtaggcattgaaccaaatgctcaaaatatgcaaccgccatacaacaaacattttgacaattagcaagctgacatgaaaaaaatcaaaacaatgttatcttaacaatttgtgcataacaattagcttaaacttcaacttctagtcttctctagccaatagacatcagagaaccaagagagaaatgaataatttaaagcttgtgggttccataagcatactaagaccctgaaattacactctaataaaataggggtgggacccaaatttttcaccaggccacctctcaagcatcagaatatggcaatatttaatagtaaaattagtcaaacctctcttgaagccacctctcaagcataatttacccgtgctaacactacggcgatgtttaggaaatatgcacatgaaatccatgttaaaaagttcatttcctacttaaaaaatattttactattttgaggtccagatttatttaaattttattattacaaacaggagtagcctttagttataaaagttccaagtctcaatcaagagtaatttgttcactattaccatgttgatgtgtaatagttgatctgactactttataagatggttcttatttttctacatgcataaacaaatactccctccgtttcaaaatgtttgacaccg

SEQ ID NO: 14344 - DNA, 1122 bp, Oryza sativa
tgtatttggccacctttccggccagagccaactcggcctgctgtttgttgccccgaggaggacaacatggagacgatcgtcgcgcaggatgcgcttgtaatcacgtggaactcgtcgccagacaccgcagatcttgcccgtggcattctgatagacactgagagtgccgcaaggtggtctccagttgatgctcctccaggattacacccgcatcatcaacgaattgaatggcacgcggacgaccgattcgcgatgaggtgtagaaggagtagtatagattcttcttgtggaacaggaaacgggcggtggccaccacattctgcggattgtaggtggtgtacatggacttcatttcctcacccttgaggaaataggaggtgcggcccgttagcaacgcagcgtaatctataaatagggatcaaatgaaaggtggagataatccaggtgttagataaatacaatagttctcttgttaattaaatgtaggagctggtgaatgggattacaatttcccgcaggatttggcggattctattgggatctgggtgggtgtccggtacttttgtacttacgtttcatgttgcgctcttcctcttcattgggcacgggcacatccaaggctacatccgtatctgaaagatggagggaatacaaatagagaataagatgatgctgggcgataaggtacgaccttaaatggaatttagatagcaacaaatgcttcaaagcaaccgaaccgccgccagccattcaccatccatccagccagccatccagccagccatccagccagccaaccaactatccatccacaatttgtggacacaattccggcattcaaccaaaattccagttgaatgggtgaatggtgaatggctgaatggacgaatgccaggggatcatcatgaatggcaatgcaactatcaggtagagatcccacctccgaactaagaccttccatttccacctctcgcttccacccaggtggcattcattaatcgtgcataaattgagggcaggtagaaggtagagtttctcgaacgggaagtctaacctacatctaactagggaagtgctttgtatttgaggatgtgcggactctggggttctgaatgcatgggt

SEQ ID NO: 14345 - DNA, 726 bp, Oryza sativa
cacttctgtcaattttcaaaataaaaaattatttttgtaaaacttttaataaaaaaaattaaaaataaaaaaagtttgcgaccattcggtggcctcgaatatctcgtgggctttgtttccttggcccactaaccaaaccacggcccactaggagagcccaccaatgcattccacaacaaccatgaccgcctcctacctccgcctcctgcgccgcttccctcgccggagcgccgccggcggccaccagctccacgcgctgctcgccaagctcggcctgctccaccgctctgaatttctctccgctctcctctctcgcctcccgccttcgccgtcggcgctctccctcctactcgaggcacccccggccgtcctctcgccgtcactcgtctgcccggtaatcgtcgccttctcttcctcccaggccccgtcctccgcgctcctcctcttcaatcatgcctcctcgtgctccctccccaccccgcttcccaccttccctgcgctactcaaatcctgcgcccgcgcattcaaccacagctctcgcgccagtgccgcgtcggtcttcgtctccaaggggatggagctgcattgccgtgtcttgaagcttggctgcgggaaggatcgctatgtgcggaatgcgctcgtctccatgtatggcaagttcggtcgcctcggggatgcacggaaagcgttcgatgaaatgcctgacaagaatgccgtctcctggaa

SEQ ID NO: 14346 - DNA, 3700 bp, Oryza sativa
ctgggggagggcgattttatactgtgctttatatttttgtataaatatcaatagttatcaaatctttttatattgaaaactatacaagattaaaatctccaagactggtaaaatataattttattattttttagggcctatttggaatgttactgtacaaatattttgttagtgccaaaatataagcaagttttggcactaccaaatatttggtaaggtaaaattgtatttgatcatatttggtttgctgccaaaatgtaaaattgtagtgaagaatgttctacataatctcaaatctagattacgtattaccaataaataggcttcaatcgaaatcaaacacaagtactattcaaattaccaaaatattggtagggcatgtttttggtagcaatccaaataggcccttagtcatacgcaccactgcaatgtgcactctctctaggaaccagtaccagctttcagtgttctcactctctacaaatgcaaaagccataggtagaacctggttgttcccatcacacccaattgctgtcaatatctgacctcagtatttacctgtcataaaagttccatctatgcatagaacaggtcgacaatgcacaaaagcattgatgcaagcacccaatgagaaaaaggctctttgcagcacactctttgttcgatcatcaaccgatgtaaatgtatgtaggtcatagtaagtattattattcctctgggcaatggtggctaacaaacgaggcaaattatcataagaagcttcaaatgtgccatacctcatctcaataatcttttgtttggctctccaagcctttgcatagcttatggtgtacttgaatttgttctcgatgtgcctaataattgattttagttcaaagccaatgttaccaacaacactgttgtacatctcacttgccacaaaagctgaagtgatgtttcggtgatacttctccaccccttgtaagtagcacttgtgctcggtcacaatgctaactttccaataatcattccatttacccttatatgcatggacacgtcacggacaatcttccttcatgcacctcacttcatacacataatttgttgacttgaccaccctaaactctctctgcaaggaaactgcccaatgcttcactgcctccttcatctcatccttatgagcataccttgcaccctcaattacctcgttctccttatactcccagggtacatgatcaccctctgatataacaagtccagagaagtcctcatttgcccaatcagtggccattacatcaccttcctcatcggatgatgcgtcgtcgtccgcttcctcattatccgaatcttccctctccatttcatcaacaattataccgactctctccccctcatccgccatgcccatggcctgctcctcctttggttgattttcctcattttgcatcgatggtccaacaacatcccctgcattgataggaccctctacatcttcggtttgcattgaaacatttatatctttctcttgtaccgacacaaatataacgaggggccatgaccgttcaaaagccatttccacataccgtctccaagcagcagtgctgtccatcggcattagttcccaaaaataaccttctgttgcacgactcactacaactgatactgacattgtgtagacttcttggtctattctaaatcctctcaacaaccaactataaattgactgaaatgttctctccgtaggcctatcgatgcccttagatgtcattacaaaatctgacagatcaacaccatctggaccaaatctaatatttccttcaccgtgaactatctgaaatgtgaccttatttgacattgtgcctgatgaaaacaataactgcgttaactcgcatttctgtactacgccctaagttacattctctacaatattgttctccaaaattctaaaagtaggttacattctccagatcaaactagactacaatcttacaattaacactactgtgtaggtctcaattaatgctattatattctatgctcgggatctacacatatgtggtgtgtgctacagatatgataaaatatatggaacgtaaaactaaaacgcaacatatatactcaaacataacatattagtacaaatgcaaaagatgtatgggagcaaacctgtgatgaagtgagcgaaccagcagggcttcgccgctccccttgtgctgccctcccctctctctctttcgttttttttggatttttagtgaatataatgaagtttcagagaggggggaatggggtttatagggggaggcaaaaatcgccctcccccagggcggcaagggggccgcctgcaaaattccatgccccctcgccgcccatttgcaggcggcccccgcacagtacaaaatcgacctagcggagggcggcaaggaggccgcctgcaaaattcaatgccccctcgccgcccatttgcaggcggcctcccgcacagtataaaatcgccctagcggagggcggcaagggggccgcctgcaaatttcgttgacggccgtcgcccgagagcgaacggccgtctgccacatcattttcgccgccctctgggagggcgattttcggtaggcgattttcaaaatggaaaattatttttgtaaaacttttaataaaaaaaattaaaaataaaaaaaattcgaatggtcgcagggggaaaggaggaaccgtggcttgaagccgcaggcagagacagcgtcttcttctcctcttcgtcttcgtcttcctgccgccgccgaggagccgagcaaaatacaataataatccatcatcggagacgagcacgagcacgagcacgcgcatcaatcatcgtagagtgactcatcggaggaggcgtgcgcgaacaaggggagaaaattccacctttccttttcttttcttttcttttcccccccttgtattctcttattattaaaatcccaaccccgtaatccgtaccccacccacccgcgcccatcgccggcggcgcccagatcgccaccgatcgcctccgccggtgggcacctcttccgccgcctcctgcatcaccttaatccctcttctagcggcggttgctccacgtctccggaggagggagggagggagggaggaggcaactcggggcgttggaccgggctcccacggcgacgcccatggttgacaaccagggctgctcgccggcgctcgagcccgtgcccacgccgtccaaccccgacccctcatccatctcgcaggaggcctgggatcccctcgaggccgccgccggagccgtcgtcgcccggatccagcccaacccgccctccgaggaccgccgcgccgccgtcatagcctacgtccagggcctcctcaggttcaacgttggctgccaggttcatctcttactttgctcacgcctgcctttctagtattccgcaataactactactctacctttcctttgtgcgtcaatggcatgtccacaacacctagtatgagcttacatgttaatcttattcagtcatgtaattattccctctcgatcatttctatgtagacagctgctctggggtgtttaggaggattcttttattactgtttcacatgttgtttctattctctctttggatatggaaatgtagtcaggacaacatgctacatacattgttgcctctgatttggctaattaccatccttggagtttcatatacctacaatgtgatgg

SEQ ID NO: 14347 - DNA, 6138 bp, Oryza sativa
tcggagatcgaggtgctcaatgtctatattaattatatggattaccgattgcaaaacaaatttaggtatcatcttattcttttttatgttaaaagctaaagttagttagttaattaaatttagctactgagtattttttttacaagtcaaggttgtgaaggttttacaaggaagctcagtacagatggcagggttaaaaggaggaggaaaaatagaaaatacatcttgccaacggagagctacagccctatatattcttgttgtttgaggcgctcagcacatagccgagcttaattcctgcttgcatcctcgcggagtgttggagatcgaaggctgctgattaattacgaaagttgttgacatcatgttgattgttccagagcgatcagcatctagaataattcatccttatgtagatctagtaaacactttacgtaggataaaatcgtcatccaaaccatcgtgggaatggattttcacagattttaatactggggttttacgattgaggaatgggaatgaaactggactcataaagtgaacttttctttcagtctgtcgctccaaccaagcgtgcaaacaatattcatatttggacaggcaaatcaacatgggccgcaggacacacattatgggccgcgcttgagccccattcccgtcccaggccagcccagacttataggctgcacgcgggctaagggtgctccggcccaacagatacaggccgcgctccagctggaaaacgacggtaggatgcgattgcttagtacggaccgacgattaaagttgattgatttctggaggcaaagattttacttgaaaacattttactcatatatatccctgatctttgcgctttgactgacaaaacaagttactatatattactattgttttattttaaacccagtgagacaaacaagttcagcagcatccagcattatattccagttaggtgctaaaatactgtaaatcatcaccccggccatgaggagtacaaatgaagaacatgccagaatctgtaggagcattatatgtagattagcatatatgtatgcagatccagctaatgaactgaaataattgacaagatgcattattaaaagactcttcattggatggatatatattgaagcatgcatgcatgcagtaaggtacaatgcaagcaggtcctctaaaattcatgcatgattcgtctgcccctcgtcccgtaaaggagacagatcaaaatcaaccctcacactcttacactagctataacgacgactatcaaaccgcgacgaagcaacaggtaagcagatagtaacagaacggaggagtaacatgcatttctagctcgatctctctgacgacgacgaatattgcagatagcaaccgcaaaatgagagccgcagatcgatggatccatctctccattattattgtggcatcacttgacgttgatccactcagtgcaccctgcatgcgaatgcacaatacataggcagattaacaattaatggttaattaagctgcagctaatagcacagatcaaaatcgtagtagtacgtagtaaatatcatactgatggtaatcaactataatgaattacctggagcagtcggtggaagggctgatagcgtaggggatgttgacgccgcacttggaggggatgccggcgaccaggtcgggcctcaggccgcccatggcgctggtctgctgcttgaggcaagcgcaggtggtctggcggtcggcggtggtggcgacggcggagttgagggtcctgaccccgtcgcagcagccgccggtgggggcggacaccctccccgtcgcgtacatgatgcacggcgccagcatgctcaccacctgcccgcatgtcaccgcgctcgccgccggcgccgccaacagcagcgccaccaccatcaccgccgccacatacttattattcgccgcgcgagccatcgatcggtcacacgaagatcaagttaagttgctgcttaattagctaagcgcagtactatgctggagtggagtgtggtgtgggtgagtgagggaggggtagggagagggtttatataggggttttgggccaagccggagatcgatgatagacctataagttggagttggttttcatcctagagagtaattagtgaaatcatgcacccacgcttatgtgcttcaattcccggtaatttttcaagaagcgcagtgtttcaatcctagagaaaagaggacttccgagtccgagtgtccgacacatcagttgataccttacacgtgcagttacatgtgcagggcggtggaaagctaaaattaacactgcgtgcttttagttaactgtacatatgacttttgatctcatgagttggtggttgttgagttgtttcatttactacttgccaactttaatttgcagtaccccaatttaggataaattcatggcacctgcatccagccatccggagagagtttataaataagtactccttctgtcctctagaattttgacattttacttatattgtttgaccattcgtgtttttcaaaaaaattgaaattattatttattttatttgtgatttactttattatttaaagtactttaaacctaactttttgtttttatatttgcacaaattttttaataaggcgaaagggcctgtagcctagtggttacaagagcctcagtagcacttgaggtcctgggttcaactctccacgggagcgaattttccaggatttatcggtattgtgctttcagtggtaggcgacgtacccctagacagcgagacgcctgtggtgacttcgtcaatcttaaggatttgctagctcagtcttcgaagatgttcatatgggtagtttaataagacgagtggtcaaacagtacaaataaaatgtcaaaatcccttatattagggtcccttatattaggggacgaaggaagtatatgtatatgctattacagcggtttatgtatagtgtgagctactacgagtatttgtggttaaggatagtggaacatgcccataatctagataaaaacgacatgcacaagcagccatggattcagaaaccaacgtgtatacatattctgccctgcagaacagtaagagttcgaagagagaaacaaagtatacgtacagtctccaatattacaccataacaacagtagataatttacattgtgaatagaatattgcaacagtaatgacttaatggcagtatcatttttatgtatggcgtatatacaaaatacaattcacaagcatacatattaaaagacaggtctttagaaagattgacatttgacacgcagcttcaattccatctgtgggcaaacagagcaatgggtactccactgttgaaggaatccatatttattgaatgaaagctaccagcttcatttatttgtagcctatcgattgggcagatggatcagcagctacttcgcaaatttctcctttcatcagtgtgaccatacagatacagtaatgtgcagtgcttggtcctggtgcagagctatagcagcctgcagcaacctgatcgatccattaattcatccagagacgtcgcctagcaacgtatactactctgttcatttgatcctcatctcgataggtcagataaaacctcgcatgcacatgaatggcatcaactccatgctcctaatgtcaccaaccaactacatgcctgaaataagaaaatgatagggagtactaattaatttatatggaattaaggagataagattagatatgtcaatgacaaaggagattataatttataagattagtcattttatataccttcttgcccctaatattcagctcttactgagtctccagaactgtttcatttgtgcccatataaatttccattgctccatatacaccgaaacttaaaacttttactggaatgtcgttcaccagcattgtatagcaaatattacagttaccatctggcaatcttaaaaatgaagccaagaaagaatgcattctgcaatcctatttgtgtttgcccatctggatcagcttctcgagctcgtcaccatggtatttaacttccaccgaaatactacttgctttggtacttgctgaaaattccacctttcatgggctactgatctagcgaagcgttcgcattgaaatcacttctaggcagagcacagagttcaacttcattctccttttctgcatttcagtagccaatttagccagtgcagtttactgacaacagacactaagtggagtagacatccaaaatttcacatattgcaatggaaatggatagaaacccaatattttcattttgtctgatgcatgttgggaaacaatgcacttctccaaagtcctaaccacaatgattgtgacatactcaaaaacgaggactctcagtggaaaaatccaaggcatttgatggaacaggcacatttcagcacaagaagaaggttatctcccatctgctgtgcatcaatacattaatagtttaatacgactcaaagttcttacgaaattcacagttcagcagtcttcactttgagaattagcagcagtattgtcctaaacatcacagaaggtaattttagaaaatatgaaattatgaataaacaatattcagatagataaaaaagttacttgagaaacgtgaactcacccgttggaactacagtctagaagtggtagcaaagtggacttctggaaatgaagctgaatattacactgtacagcttgcggcgggtttattggctacctaaaattaacttggctgtttgcagcatgctttgaggcattgtatctgatcatctctgttctcagatactcaacttcactccatctctgcttctgcccaaacctttggtactgagtgatatgagtgaaggggcaatgatgtgagcaattcttttgctgccagttattcatgtctaaaacattcaattagcccggaagtcatgattcagtttcagaaacatttgttgttgatcaacaaaaccattcaagcaacggtatcggttaattttcttgtgccatcacacatatgtccatctggaaatcttaagataaacaagcatgccataacaatagttataatttgcccttcttaacccttctgtacttaaaatgacttgacaccaacatcaagataaaaatgaagctaccaacattaaaattattggagctacagcccagcaaaactcaagagctagggcttctagaattaagaatgatcattatttcctatagtttcaggcagatgtattgcttacattacgtccatttgactatgtgcagcatgcttcaaagcactgttgcatctgaccttcattctcagatgctcgacatcatcccatctcttcgcttctgcataaacatttgatattgtgacaagtcctccattatcagttagaatcaactcacgtagttcatgaaaaaacatgtaagcaagatcgatgtgcccatgcactcggcaagctgccaacaacatcttccacagaacagagcttgctgttgaagggttttctttaatcatcagataagcttcttcaatttttccatagcggcaaagcatatcaatcatgcagccataatgcttaacatcaggaacaattctgtagtcctcaatcatgctattaaaatatttcctcccctcattcactaggccaccatggctgcaggcggtcaagacacccaaaaatgtgacaggatttggctcaatcttcatcgaatcaaagagctctagagcctcacgtgagcagccatgcacagagaaaccaacgatcatcgcattccagcatgtaatatccctcatagacattctgtcaaagaccttcttggcaagatccaacatcccacattttgcatacatatcaatgagtgcattgccaaccaagccatcagctacaatgcccttgttctgaaggtttctgtggatgtttgtccccaggtccagcttaccaatctttgcacaagccccaaggactagtacaagtgtaagctcagtaggttgaatgccattctcctgcatttcttgaaaaatccccaatgcttgggtatatttgccgagctttgtgtagccactgatcaaagagttccatgatacagcatccctctctggcatttcgctgaaaatccttgcagcctcatccatatacccgatcct

SEQ ID NO: 14348 - DNA, 3640 bp, Oryza sativa
aagaaaaacatgtgcagctgacatgtgggccttacgtgtttttttaattttttttgttaactaggatgccacgtcagcaaaactgggcaaaaaaaactaccgagggtcctccggtgaacggtttgagtgagtttaggggtacatatttctggttttgtggttaatgaacatcaagaaatctcgctgttaaggtgagggacctctggtgaacttattccgaaggggaatcatctcttccttatcgtcttcatcgcatcagttgagctgccagctgagctatggcttctctccgccacggccacctctctccctccggcgccactgcaccaccctcctccttcgcccaactccgccgcccttcctcctgcctcgccggaccacgacctctccgctctcgtctcacccgtatccttccttcatcctttctgctccccctcccattgtcccaatgctgactgcctgaatactactgcttgttcctttctttcttgcaggggtgtacgcgctttccagcaacgatatcagggtgggctccaacctcgaggtcgacggagctccctggaaggttcttggttcgtaatcgtatccactcacaatctcatcttctttggcggtgtttagttcagcgcaaagtttggattttgattgaaattggagatgatgtgactgaaaagttgtgtgtgtatgacaggttgatgtgatggaaaaggactgaagtttggatccaaacgttggatctaaacacagcctttcttcctttctgctagtactaaacatacctgattcctggttggagtctcccagtggatacagtagctttgttgaacatacctcatgtagccacaaatttcattatttcaaggcacattattatctgcatatataggaccagatgggggggacgaaagctgctaccttcatttctttaacacattttaggaagaataacaactcccttttatacaactgcaatccatgttgttcataagcaatgtgacactctagtgctataaaaaacaactattttcttggttgttgcatccactgtttcagaagaattacctcctttcatacctttcagtgtgtacttgagcaaatttgcttctgttggttcgatttttcaaacttcacatatagcttagcttgccacaatatgtgaatgttatttgctttcccaagtattccctgcttttcagatcactcactgctatgtttctttcagttgctagaatggaatggtaaagcatactctagtacctataaaaggagctttaagagttccatttgttacgtttgatttaaataaaattatgtgtttttcaataaattccagacgaatctatatctgtgaaaaaacaaatgttgaaatgtcatagagtattctgacagatgtatatcatttcttgccatctattgctcatctattccattttactttagatgctcgatataagaaatatcatataaaactttctgtcttcatgcaacaacagaatttctccatgtcaagcctggaaaaggtgctgcttttgtaaggacaaaaatgcgtaattatatcactggcaacacagttgacaaaacctttcgagctggaagtacggtaatccaagcagaaactcacctttctaaacctgtagaaattactccctccgtttcaggttataagacgttttgactttggtcaaagttaaactgctttaagttttaccaagtttgtagaaaaaagtagtaaaattttcaacccaagacaaatttattatgaaaatatattcaattattgatttgatgaaactaatttagtattatcaatattactatatttgtctataaatttagtcaaacttaaaacagtttgactttggccaaaatcaaaacgtcttataatctggaacggagggagtaccattctgtgactgtatcagatcatgctttagcttatgtaataaaaaacaactgatatgatactcatcaactctccttcaatgtgttctaacaaagaagagcacttattttgtcacttttgttttagatcccagaggcatccatttcaaaggaaactaagcaatttacctacaaggatggagcccagtttgtgttcatggatctggtacatgtttcagtttttcattcaaacatatcatgaaaagagtagtcgctagctgtctgtatgcttcagtaatcagtatgcaatggaacacccatgtttgaaatttaagcacgtgctaaccatatggtatatggtactatagaaacatatgaattgaactcgctgatttttacaatgtagaaactactggtagaagtatcgtttaaagttttacggacagtcggaagttttacagacagacagtcaagttttagaaacatatgaattaaacttgccgattccttttgtttgcagcaaactgctgccaacaaagaaggcaaagagaatgaatgggtcttttatggtgtgttccccaagtgcataatgttacttatctttataattttcctttccagactacctttgaagaaagtcgcttaaatgagtcagatgttggcgacaggcagaaatggttgaaagaaggaatggactgcaatttgttatactggaatggacgggtatttcctgttttgtttttacataatctgctgtccaaatccaatcaattaattggctgttgtcagttcatatgttcctattttgtttcaaactcttgataatgtgctgtttgattagttatgtattcttgcacagaataggatattggtcactgacattaatatgtcctgcagatcattgattttgatctccccatcaccgttaggctgactgtaactgatactgacccagggcaaggtgacagtgcacaaggtataactgcatgtgaatatcacaattagaaaaaaaatgttttcttattaaagctgacacgatcagaataataatcttttaactgtatattttgtaggaggaacaaaaccagcaaccgtggaaacaggagctgttgtcacagtgccctcgtttgtgaacgtaggcgatgatatcctgattgattcaagaactggcagtatatgaacagagcatagaagagatgagagactagacatcaacagagcattagtttttgtctccccatttttggcccattccctcccctcaccaggtttgactgtattgtttacagcatttgaaccctcgacaggatcaaaatgctttctcaaatttttgtactgcatatgtgcgtacatatttcaccagagcagatgattaatgagccaaacacattgtaagatccatcatccatctcatggcattttcacatgtctgcacactcaagccggggttccgttctgaataacatcacaaggaagctagagttttgctaccgatgtacaccccgaaaatggcacgtgacttggcgacagttgagcaagcgaatctgcagatggttagtgatgaaacagaatgagaagctgttaccaagaaaattctctctatctcaatgcacacatttctgacccttaagattttccatgtcctctaatataagtgactgtatcgtacaaagaagaatgctcactctgggactaccttgtgtgatattggcattgtagtatgaatcctgaagagaaatcctatggcctttccagtgat

SEQ ID NO: 14349 - DNA, 5353 bp, Oryza sativa
gcatcatccgacgaggaaggtgatgtaatgcccactgattggacaaatgaggacttctcgggacttgttatctcagaggaacatcatgtaccctaggaatacaaggataacgaggtaattgagggtgctacgtatgctcataaggaggatatgaaggaggcagtgaagcattgggcggtctcattgatgagagagtttagggtggtcaagtcaaccaattatgtgtatgaagtgaggtgcgtgaaagaagattgtccgtggcgtgttcatgcatataagggtacatggaaagattattggaaagttagcattgtgaccgagcaccagtgccacttacaagatgtcaagaagtatcactgcaacatcaccgcaacaacatcactccagccgcaccacagccgcgacttgccactgtcagggacgagtaccccacgcaccgtgaccgagactacttcatgggggtatgtcgaacttctactcacttctggcaatagtttctactcagttccttcaattattttcctactgacatgctgtcttatgtcttgaataggccgacacggcacgagctgtgaacgccgatattacctcgataatagtgaggttggacgccgggctatacttgagtgatgctgagcagaggattaccttcgaccggatgcaagagaagatgcacgctgtcatgcgcgtcttctcttgttgcagcgccatggacgcggtacctccacctggtccagtaccaccatgtccacgcgcccctagtaccggagttgtgcgacctacagctggttcttcgcacggtactgctccgcccagaggttagttcaagtatatatgatttattctcggtaacatgactacgtcctaactaaatacgttacgcgcaagtccccgtctgcccttccgcgcccttgtcggaggcagcagttcgtcacagagatcgctgatccctcgtcctaacacgcagacgcgagggatctttgctagtggagcctcttcctcacacgccggtggcacaggtcctactgtccggttctacgatgacgacttgcacggggcgccagaccaggagatacttgggtcctcacagcttggtggagctccgaaggcgcacacccaggagcagccactggtcacaccagtgcaggagggtcgagcaggccgtgccgtaccaccggaccgtctgacgtactcccagggacacgttagggcgcagggcaggagggaccggggtaagaggcctcggcagtagtgttccacctattgagtggttgtgtgcacttttctttaggcttacttttgctgtgtagaccagtattacttttgctgtgtagaccagtattacttttgctgttagtactacggtaccattgccttgacgctctgctatttcgttccttccacatgtccactgctacaactattccatgcgtacgaagcctaactttcggcgcgtgacggtccagtccattatagacaaagcgttttgtcgagttgtcagcatcaactttgcaccacagattccgcacgtgaattaattactgcatgctcgcatgtgctcgtgtcatcaatacactgcatattaaaactacttacgcatacgacaacaaactttcggcgcgtgaagattggctcctttaggtagcgcagcaaaccacagtacacatataccttggtagttcgagttgtcactatcatctttcagccctgttctcggagataaagtgaatgatgctcacgcgtgcgcgtgttgtcacatcaagtgggccagatgaacaaaattaagtccagttatagcactagttgcggccctatataatagacaagccgaatacaagctcttcaaatcatctttcatcttcccacacatctagagagaatggaagctccatttcttgagcgtctcaactagcgaagcgatcctttcgccggttgatttccaccatggtgtgaccggccgttatgcacttgtggggatcgatgcatacttaagtcaagcctcatggtagaaactcggggcaggagattcttccaatgtgcaaaccttgatcaggtatcattcattcgttacaagttcaattaactatactgaacacatcaaaagctaacagatttctactccatcataacatcttacacagacataccgtacattgtgcaactacattgagtgggtagatacagagaacccacaaaatgacagaacacgtccatatgcacgtagtgaatcaagatcggactacctcaggcggaaggatgagcatgaacgtcagattgctgcggaagctttagaatggcaagtaaaccccctaggactccccacatggcgggaacgtccagagtgtcgttgtggtgaccgttgtcaggtgataaggtccgtaagacaacgaactcgaggacaaagatgcttcgtgtgtcctaacattgacgacgacgatttcgtcgtaagtatcttttttttgggtaccactaatcactactttcatgcacttacctctatttacacaaattttaaaataggaggaggttaggaaatgtcaattcgtacaatggatcgatacggtcagagttacttccattggtcaaacgataacgcaacctgagacgaccacgcaattcataacaggcatggatggagtacgaacgtcaggtacaaattgcaagcttagactggaggaacaatccattaggtttacctaaatggtcggagcgtccaaagtgtggttgtagatatcgctgcctggtggctacctcgtttgcagaacaaacaattggcaggagatactttgtctgccccaatgtagacgacgatttcgttgtacgtataacaaattccaaatttaagtagaatctgcttattattactatcctatctgaataactatgtttgtttctcagggcaatccaaggaggtgcgcattcattatggatcgacaatgtcaatcctacatatgatggccaaaagataactgagtctgaaacacaggtagagtactagcgagagaaggaccatcaaaatgcaatacatgttgaacgacgcggaaggagtcggtagataagctcaggctcaatttgtcaggaccgacaaatttgtatcttttatccatgctatcttgtcattataatgtttaattactatgttgtgctgttgtatgtgtcacgaattataatttaatgtgactatatcattccgatttctaaagtttctttgacgccatgatatgttgtatccttataatttatatgtacctgcttatatttttataacttccaccttcaattgtgtacatgattcaacatacatgacaattatgcgtaacttgcaatttataggtaacaaaccccctcatagccctccaatttatatgaaaaattgagttattaaaattttgtcaaaatgcacgtactttgttcgtttcaaaatgatactttacctaattttaactgctaaaaatcaggtttatgtaaaatacctatttcgtaaaattttaagtgcaaaatagttagatttatgtagtttgaaactattccttcttcgacttcgaaacaatgatttatgtagtttttacagtaacaattaaatatttcggtgtaaaaacaccccttgttgggctccaaaccgccgaaacaacgtaccattcaattctaataatattttttcttgtttcacaattttaaaagtgatgatttactaaattttctaaatgcaccgagctaaacacctaggggctactcttaaagctggcggcacccaacacagtaccaaaccgcccttcataagggcggcaagggggccgcctgcaaaaaaaacagggtcctcgccgccttttgcaggcggccccccgcacagtactaaaccgccctccgtaagggcggcaagggggccacctgcaaaaaaaaccagggtcctcgctgcccttttgcaggcgccctcccccccccccccgcacagtagtaaaccgccctccgtaagggcggcgagggggccgcctgcaaaatggcaggccgcctatagacggccattagtcgtgcgctaacggtggtcagccacgtcacgaaaatcgccctttgggagggcgatttttaaatatcgccctcctagaggacggcaggcgactagttttgtaaaattttgaaacacaaaattacttttgtgaatattttaataaagaaaattaaaaataaaaaaattccccgggtggaagtgaaaggaataagttcaccggaggtccctcaacttaacagcgagattttttgaggtcccttaaccacaaaaccagaaatgtctactcctaaacttactcaaaccgttcaccggaggtccctcgacagtatttttgcccggttctgctgacgtggcatcctagtcagcaaaacaaaaattaaaaaagtatgtggagcccacatgtcagctgcacatcttttttcttctccttctcttctcttttcgcttctctcctctctattctcctccaggctggcggcgggctcagccgcgatggccgagcgcggatgcgggcggccggcgagcgcggcagcagagcggtggcaggctgtgggcggagtggacggcgggcgagcgcggcggcggagcggaggctaatgggcagagtagccgcgtgccgtggccgccgtggtcgtcggctctccaccgtcgtcgtcgccgtgggcgaggctacacggcgcggccattcggcggcatcggccaggcgtcgcagtggccgtgcataggatgctcaaagtgccggctgacgatgcaccctagtcgctcgcactcctcctgtgccgcggcagtggcagtggtggcggtggcagcgccgctagcctgatcccatggtcctcccggacgcccagctcgcgcagctgcagcaggagcgtgtccacgctcggcgtgccatcggcgtcgtggacggtggtcggcgcgggcgcggtgaccctcgtcgtcttcggcgacgtcgcggtagcacttgacgtcgtagctcatacgcatatacgccgggtacagacggccgcgtgtacatgcgtcttcgtacgagcatatatatgcatgcatggagacaaccagctatagcctagctagcttcttgttggtttgccgcccgataacatgcaaccgtatatattagccaagcatgtgtatatggctgagcacactcacatgtatatatgccattacgtgcagcggaggagcacggatgcggggggcgagcgcggtggccagcgagtttgggagggagggggaggtggccggcgaccaagaaacaatctcttcctctgcctcttccccttctcccgccggtggtgcctctcctagcatcatcggccacccgcgggggcacagcggtggtggcgg

SEQ ID NO: 14350 - DNA, 4425 bp, Oryza sativa
gtacagtagctcatcacaactatagaccatgtacgaggcacccaataaaaggaaaacgtacctgtatgcaatcttgcattagcatcaaagcatatgttccgatatcaatactactttgccaagtatatgttactgtctggtgtgtgtccaccatgtctagtatcagcaagcaagtcatccacatcgttgctcatacttgttgttcacggacctgtttaagctacactatgtgcggatggagctaatatcaaactgttaattatggcaataatagccatcaaacgcgtacatggtctattctttgatgtgccaaaacatgccttttcaacctttgtttatacctaattactagaattactgtcgtgcacagatgcacttggtagatcacgaattttcaagacaaaggtgaacaataaaaatagaaaagaagtcaaacaaaaaaaaatcagaaaacaagcagtttattgctttatttcaatccaattcttaactggaacccttagccactgtgaggtgtacatctgacaaatcaatactgaaaactgcatagaaaattgaggtttatttatttaatatcgttcatgtaatatgtgatacgtttactaccttggcatcatgttctttaggagccaaacacatgttccaatggtgcataacatgctcactgctacttggtctatgaaggagtgctctttatggctcaaccctaggaattggcatggctttagataggcaatatgggattctctgattttgttgtgacttatgtacaatacttgaaaaagaattattgcttgcgcctttagtcctctgcgagcactggtctctctctctctctctctctctctgtgtgtgtgtgtgtgtgtgtgtgtgtgtgtgtgtgttgaatcatccgacatcgtgctattaaaaactacaactttaacctttttctttctgtaaagcacaggtctttccatttggatctgttccgttgaaaacttatcttcctgatggagatattgatttgactgcctttggccattcaagtgatgaaattttagcaaaacaagtacaggctgttttagaatcagaagaggcaaggaaagacgctgaatttgaagtcaaggatgtccaatatattcatgcagaggtttttctcttgatgctctttgttttttagtttatatattagttagtgtctaattcatatgcgtttatgtttctggtagtggtgtctacttatgtgtgcttatctattgtgtttattatataagatcacatgaaaccatccatgtgattcattaatacatgaattcttttcttttttcttttactccccttcttatagttgcaatcaaacatttcgcagtattcttatcctactataaaacgggaaacaacaatagagaaatccatcgtattcacatgacatcaatgaagcctgtgcatatctcaatatttcactgctagcaataaaaataaatagtcaatagtgatcaagtaaactttccaccactgtgctctattgtcatttaacaactaatgcatgcttcaacatagatttacatgttctcgcacattgttaatgtttctgatggcatcatgtttgtctaaaataagtctttctgatggcaggtcaagttggtgaaatgcattgttcaaaacatcattgtagacatctcattcaatcagtttggtggactgtgtaccctttgttttctcgagaaggtaatgtttgaaaagttgcaacaaatatgcagttgccagttctcttccttaaactgcagatctatctcggtctgatttatcacaagctaggtccgttgtacttccttgtggttcaacagttggtagatgatttctttaaggtcagactgctcaggggaaaatatatctataaccattacattttgcaggttgatcaaaaatttgaaaaaaaccaccttttcaagagaagtataatgctgataaaagcttggtgttattatgaaagccgcattcttggtgctcaccatggattaatttctacctatgcattggagatattggtgttatatattttccatctcttccatggaacattggatggtccactagctgtaagttctgacttccaactattctgcagcatttgtaaagttcttgtttctgacaccctacatacgttgccataaattactctatgttttctgcaggttctctataggtttctggactactatagcaaatttgactgggacaataagggtataagcttgtatggccctatttccttgtcttccctgcctgagctagttagtaagtggatgtggtctgatatgttacctcttttttttgtgattggaagttttcttttttcattggtcatgcaaactttattttttttcacagctgactctccagacacggttaatgatgattttactatgcgagaggactttctcaaggaatgtgcacagtggtttactgtactccctagaaactctgagaaaaatactcaggtctttccccgaaaatttttcaacatagtggacccattgaagcagagtaacaatctagggcgcagtgtcagcaaaggtttgtttcttacatctagatcatgcgttttgatggtaggattggatgattagtcttggaaatatcacaactatagtcaattttggaaaaattgatgtgtcaacttgtttgttgtaacttcacagttgttttcaaattcatcttcatcccatgattggtcactcagggaaaaatgcttgtttacttgtcaaattttagtacttatgctccagatagcttagtttttgggcatttactgtgcgtgcaaaagggataaattgtcgctgcgccccctagttcacaagctatttatccatgggccaagagattttagaacaattaagcacaaaagaaactctacgccacttaactaagcagtaacacttagtacattggatatttgcatgccagtgtatgcaacgtgcccctggaccaccttactttaataccatacatgccgcttactgacatgctgtaagttagtgattcaattgttgtttgttatatgggtatttgctcacatgcataacttccttttgctatactgcacaattgcttatgtgcattaagctgttgcagtgctatttgtttacctggcctgatcccgttgtgcaaagcacaggtaacttcctccggatacgcagtgcatttgattttggtgcccggaagcttgggaagattcttcaagtgcctgacaattttactgtggatgaagtgaatcaattcttcaggaacacattgaagagacactgcagtagggtaaggcctgatgtgcaagaaatagctctggacttcaatggtgaaagagccgacaacgatagttcgcctttatacagtaataattcctttggtgatctatctgatgagttcaataacatcagcatttcagattccagcaaccatgggtcgctaaggcaaaatggatggaattatgtggctgagaacaaggaaaggaagtctgtttctggtggctggctggcaagcaaagcaacaaatcctgcagctactaattcaactggtatgacgaatggcagtgactcttgtgagcctgcatcaccatcaattaccggagcacatagcttgccatctgaggaaggtcatgacgcactggatctctttaatgagtcagaaagtggtacgaaggctggcataaagtatgacacaaacccatcacaccatggaatgtcaacagtgagttacgcaggcagatcccaccagtcctttgaagaggtggataatgatgatagaggtaccattgatagcaattggtcagatctcaccggagactacacaacaaattttaataatcttctctatgctcaagggttccaccaagattatccaatgaaccaatattatccatttggtccagtgtactatcaaatgccttccccaccacctgcacgatatcagaataggcgatcatcaaatggtcatagcagaaataatgtgtatggatatgctggtacaaatggaataggccctgctccttgtccaccaggttatttaattatgaggacatatagtcaaatagatgattcacatcgagctcgtggaactggcacatacttccctaacccagtatgttcctcctttcacgatcttatgttcatactattaagcgtattatgcacatagaattccctgagctttgtgaaccatttaagagtctaggtttggcacaagtggtagataatccaccttctatataactcaaattgctaaggaagatgcacatttgtgaatagtattgtccttattcttttaacaagtacaactttaaacttcattttgtgtgaacttttggcactttttttcacatactatgcatatcaatgcatgaatcaataatttactattccctctgtccgaaatatagcaactttt

SEQ ID NO: 14351 - DNA, 9260 bp, Oryza sativa
ggcttcgccgctccccttctcttcctcctcacccctccctctttctctttttctggattttgagtgaatataatgaaaattctgagagggggaaggggttttatactcggaggggtaaaaatcgccctccctaagggcggcaagggggccgcctgcaaaattccaggccgcctcgccgcccttttgcaggcggccccccggacacccatagagcggccttcgggagggcggcaagggggccgcctgcaaaaaaccaggccgcccttttgcaggcggccccccgcaccgtagtaaaccgccctccgtaagggcggcgagggggcctcctgcaaaatggcagcccccctatagacggccgttaggcgtgcgctaacggtggtcagccacgtcacgaaaatcgccctctgggaagaaaaaatcgccctcccagacggcggcgggcgactacttttgtaaaattttgaaacacaaaattacttttgtaaatcttttaataaaaaaaattaaaaataaaaaaaatttctccacccgggttggttcatcggtacatgaagaagcccatcggcccagcatcagtttaggcccaaatgatcaggcggcccatcaaatatgtgcacatgtgctcttcagtggtagcatagggtatagattatttgactgtacgattggaggggacaactcctcttttttatattactatatagaatatagattattttgtgaagtcactcgcataaatacattaaatattataaagctaataaataactttgaaaaagaagctatttaaaccatgcttaaaaagtttgagaaaacatactttcggaagcgtgctacctacattagctgtttaaaacgccaccgaagtgatataagacgaggacgtcctaacaaattcagttttaatttcctcgtctttgcatatatggaaggaaccgaagaacttcacctcaaaaaaaaaaaaagaaactctgctcttaacagattaaatcttgttaaactaggattagcttcggtttaagctgagactgcgtttggtgaacattgctacctacccatccattagcaatttaggtctcattttttcttgagttgcagcggtttgggactttgggagtggtaggtgtatctgacagtctcgaatgtgccacatctcttttcttctctcctgtctccttctccaacctaacccctgcctgcctgcatcaaccatatatgttgtccttcaccaataaaacacattgccctactcctcacgctctttcgatcttcctcctctcctctctatttctctcatcaacaattaccgcatcacaaggagcaaaagcagtttcagtttcggctccattgcttattaatttacctctacagaagaagtaagttgatctctctttcttgcttcaatctgattgtttccttgctagttgaaaactactattatatactctgtctttcgtccatcttgagtgatatcatgaattgatacacattctcatgaatgaatgtatcaaattccatctgaaactctggtagtagctgcacacacatttcagaattcagactttgcactagctttgtgcattgagatagagaaattaccaaagtagatgtaagcatgtaagagttgttgaaatatgcttacatacaaaaattgtataaaaaatatgattatgaatgtactagtgaatagtgattacaagatttaaactcctaatcaattaagtttgcatcattgatgcaagttcagtgggcacagagatggccaccgtggaggtggagggcatcccatttcctcaggagatcaccgtcagtaagccgttatcactgctagcccatggtaattaattaatctattaatgatttataagtactccatttgactaataccagattatgagtacaacacaagcctctaaatgcatttgaaacaacaaattgcaggcattacagacattgagattcatttccttcagatcaaatacaacgccatcggggtgtatcttgaaaaggacaatgtactagggcatttggagagttggaagggcaagaaggcagaggagcttgtgcaggatgatggcttctttcaggccctagtttctggtaactaaaatgactccaccattcaggttttgcatttcagaaatatgtaaaacggatttggaattgcttgtctatagtatatcaataccattctcccatttccagttacagatcacaaatagtagtattatctctgtagagtttatagaacaatgttctatcctacaaaataaaacagagtaaggttcagtctgccgctcctgcataactgcaagaaaaaaatgtttcattttttcatttgagtcatgctgattgatgctgtgcatgtacgctagctcctgtggagaaactattcaggatcgtggtgatcaaggagatcaaaggatcacagtacggcgtgcagctggagagctcagtgcgcgaccgtctcgtgtcagtggacaagtacgaggatgaggaggaagagtctctggagaaggtgactgaattctttcagtccaagtatttcaagcccaactccgtcctcaccttccactttcctaacacccctggaattgcagaggtataatcttgtagagtactccttatattcagctgggtttggttaagatatcaagtgatcaaatctttgttcttgcaaacctaattgaagcatgcatatatgtgtgcagatatcatttgtgacagaaggcaagggcgaggcgaagctgacagtggagaacaagaatgtggccgagatgattcagaagtggtacctgggtggagaatctgcagtttctccgacgactgtgaagagcctggcagatcaattcgcagcactgctctctgcatgaggcatggagtaataaactactgtagtaatgttgcctgtttcccattcatttttaactcgatcatgctttgatttgtccagctgctctcatgtgcatgctacaattgataatggtattggtttccctactacttcaaatgcatgatttacttgctccaaagcagaggaaacatactcaaatgtatatgtttcaactttacctgtgtatctggtgcaagcaacctaagacagtgatagaagtgaaggtaggaatctgtccctgtactgctcatgtgttggaattaagtccaccagtggttccaacttccaacttgtgtattgggcttgcaaaatgaagctggaaaaagacaccagaatatctttgagagcaacatcatgacacaaattcatgaatagtactgtactgctatagtttggtgtgcagtcttcagtattgtacatcctttaaaacctcctttcagtgttgtactcattttggaatcaaccaacccatacaagttacctactccaacaaataaataaattagagatgttctgctttaacttcttctaaggatgatctaaaaaaaagattcttctaaggggaagttaggatgcatgttgccaacaaaacgtagatactagtccacagtcaagtcagttcttcattttgttttacaaagaatatagtactatatttggatagcaatggagataagatagacaccacttcgaataaaggaacaaattaagggaggaatctcataggatcaaaatcacagtggattttttatcacatatatatccattgaaaatttgaaattgttgggtttagtcccccattcgtaattgttaatggaggggtacaatttaaaaggtaaggacggtcgttacttatcagactagtcttttaggttatgtaggcccaggagctaaagttgtggcaccaattgagtttgtggtggagcagacccaatgtgaccacggttggtgggccgggctgcacactctataacaagtggtatcaaagcccacgtatgaaaacccaaaacattttttataggtcacatggtgggggagctccagtaatgtggcgggaaatattgttgggcctcggctacttcagtggaggcggcagatattgtttggccgtggcctgcacatcgagatccaaacattaagaaacgtcatagaatatctaaacgtgatgacgacaccaagatataatatttgttaacgagattcagccgaatcctatatctccggacactgattatgaacactcgtactagatgtagcataattacagcgtatcagaggtacaacaaacttccgtcggacaccgtcgacagccattccctctcgcctatgctaagtcgttatgtggttaattataataagtttgcctctctatttaagaagagctgatagagtttgattctaactctatcctacccctattaaacttcaagttctaaactgaaatcgactttatatacatattcacacaaactctaacaagaagaaaagataatcaattagaaacctatattgaatggcttaatatatccgtagagaattttagaggaatccaaacatatataagatttgacatcaccgaagacgtattactatgtgccaccccaggcaccctctccccaaaatcctacgttattttttttgaagcattatttgaacagaacaattgaacattttctgagtttttactccaatgcttgtgccataaatcgagcgcagaacgctggcatggagcgatcttattctgctactagtactagttggcaacgtgaagaaaagggaattgaaaaggaaaaaggtctcaggcatgggaggtgattagatgctggacaacaccaatttgagaaaaggacttgccacttgggggaaagtttggccaaaataccaatgcaattcctccaaaagaaaagaccaattcaattaatgctttctctccttaatttggttttgctggtgagtggtgacaaaattatgcccagaacaaacgaacagcgaatctggggtaaaaaaatcatgtgctagcacacaaattaaaggagaaaactcatagaaacagctaaacagataatccaagtgagaagtgacagtgacactgcaaacattgtgtccaaccccttgcatttacgcaatcccaatttatattctattcacattgtagacctcttctgttcgagaaattacatacaaaagaattaattatattactagctatgtttggccgccggtgactccggcatggacggagagaatggagtcccggcaagtagggcaggacgtgtgcgcggcgagccacgtgtcgatgcagccgacgtggaagccgtggtggcacctggggagcacgcgcaccttgtcgccgtcggcgaagtcgcccaggcagatggcgcactcggcgtcggggacgccggcctgcttggcgccgtacacctccaccgtaatcctcctcagctccttcttcttcagcccgcccgtggtggtggcagctgccggcgtcgccatggcgggtgagggtgagaggccgcgggcgcagtggagcgcgcagcggatgagggagctgaggccgagggagcagatgacgacgcagagcagcgcggcgaggacgatgaccatgttggcgtccaaggcgccggagctcccgccggcctgctgcatggaggccgtggccgcccatgccggcgtcagcaccagcgccggcgcctccacgacgtcaaccagccgccgcatggctggctggtacctctagttaagctagtatagctcaagcatatgcaggaggaggagacaaattataagatgttctttttaattttgttgtacattgaatttcctttggatttggtgattggattgggtgcaccagcagagtgagattattctggttcgtcgctgcagccaaaccacacattggattgagctctctcaaaaagtggactctgaaagctagctagcggcagcgctacatatgtctctatttgttaaattagttttccctgtttcgttttcgtgtaagaaataatgtcgtatttatatttgtgccactttcgaggatgaacaacaatgcccttaccagtatctggcgcacaatacaggctatgtttggcaccccttttcccaacctcctctctcgtttttcgcgcgcacattttttaaactgctaaacggtgtgttttttacaaaaagtttctatacgaaagttgtttgaaaaaaatcaaattaattcatttttttttaaaaaattagctaatacttaattaatcacgcgctaatggaccgctccgtttttcgtgcgtactgttagtgttgggaacagggctgccgaacacagcctatatatggtttagagaagtccacattaattaatttaatcatcaactattgcaatattgttccaactttgatcatttaactctatgaaaccgtttatttttgtctcccaacacacttatagatgcccaatttcgttccttggtctaaatttcatccttggggtctattccaggatgattttcgattacgtggagttgcagagggtataggtttcatgcccaagtctatttccaatcagccaacgacaactttttacaatctatatatgaaaaggaaattaatggatctaccatttcaagcaatagatagtgcgcttatctattcattagctcatgtcgatcaaattaattttaggtttagacttgtagatagggattgggctccctatcattgtcgaatattcacaatgtgaacatttaaattatactttaaaagacagtgtcaatgtgaatatgggtgacaatgtgaattcttaatgtgtgaatgtaaatgtattgccacactagtggagaacccatttctaacaccagttgggaaccgtttttagtatcggatgtagaaccggtactaacaaatcgagactaaatatctcgatctttagtaccggttgaaataactggtactaaagatgcatacgaaataaaaaaaatgtgtaggatatgtgattcgaactcaagatctctcacctcagccctcacgcgtgtaaccatccaccaactccacccatcagacatggatatggatgctttctttttaaactaaccctgtagacatctttagtaccggttgtaacaccaaccggaattaaagatgtttttgtacttggacttttagaaccggtacttaaaaatatctctagtacccgttctaaatctaaccgaaatgggtatcccgataaaatatcagttgtgtagtagtgccattttgtacgactgtgcatagtgtggtgcatcttttttgacatactacgataatgatacatgaagttgtcttaaggaaccgctcgtaaaaaacgattttcacatacgggtctattaagacaaccggctgcactaattgtttttagagtgggcttgttttatgcctgtaaaataatagagatgattttctatatatagcaagatcacattaaacaattttgttgcgtatcacaacgagggagtactactactgcagatttcctcagcaagaagctggagtagctagtagctaggaccaagacatttggacaacatgcaattcataaaacgtataggattacacgtacgcacagatcgtgtacatactgaagaaaattaagatagaacatgcacacagggagcgtgcaacataaagtatacagctgatacagagagagaatggagcgctgcatgtctgccgcagctgttattttaattactttgttcatatatgctgtagcaagtacgtgcttaattactagctgatcaactccgattgagctagcatgttaagctcgatcgatcgatccaagcaggattgatttaactgaccctgcaccaaagaaaaaaatgcacatatatagaaagttagttattttatgggaaaatgtttcatatctcgagaaatatctcattgttgctttcatgccccccacctaaatagccattaaaaagtaaaacaaaatgataagctagattaatattaatatacatgtccgtaaatatacatgtttaaatttaacttgtacttgcaacaaaaataacggatataatagcgaaaatacgttaagtagtgttagtttagtttgttgtttttctaattaacttgtataagttgaatttaatcttttatgtctatgaagtgagatatatctcacatatgataatctattttaacttgtaaaagtttttattaactattactccgtttcaggttataagacgttttgactttagtcaaagtcgaactattataagtttgactgattttgtagaaaaaaagtagtaacatttttaacccaagacaagtatattatgaaaaattattcaattatagatttaatgaaactatgctggtattgtaaatattattacttttctatagaattagttcaacttagagtagtttgactttaaccaaagttaaaacgtcatataacctgaaacggaggagtatttagatagcactaaaaaataaagagatatatgtgtgtatatatatagagagagaggggggggacgtcataataaagagagatgatatacttgttgcagtcggtggagaggctgatggggaagccaacgttgacgccgcatttgccggggacgccggcgacggtgccgaggttgagcgacttgatgctgccggcgaggctcttgaggcagcggcaggccgcctggcggtcggcggtggtgcgggcggcgttgttcagccccttgacgccgttgcagcatccctgcgtcagcccgctcctccccgtcacgtacgagatgcacggcgcgatcgccgatcccacctgaccgcacgtgatcgccgccgacgctcccggcgccgccaccaccatcgccaccaccatcaccgccaccaccaccttaccgttcaaagccgccatattcaagattactgatttgatcgtcggatgatcgatgatctgatgatcgagtagctaagctagatagctaatcgtcgccgccggtgatggatcgtcggtcgatgggtggagggtataaataggaagctgctggcaacgagctgagatgcggacgatggaatcatacatccattgatggcagtcgctgctaggtcgttgggagttggactcagatcgacctaggtactctactagagtctgaatgatgtacgtactacatcacatgtgttccgtgttctccagtactacctccgtcctaaaatgtttgacgccgttgacttttttaaacatgtttgactgttcgtcttatttaaaaacttttgtgaaatatgtaaaactatatgtatacataaaagtatatttaacaatgaattaaatggtaagaaaagaattaataatggtttaatttttttaataagacgaacggtcaaacat

SEQ ID NO: 14352 - DNA, 2424 bp, Oryza sativa
atcttgcagcaggaaggaagggtagcactaccagctccacctctcgttctcctgcccgtcgtcggtggtggccggcggcagctgcgagtagaagtcgtagtccaagctgctgctgttgttggtcttggatgatgggttgtagtagtggtgcgcgagggcggcgccgccgaggacggcgagggtgagggcctgcgcgtgaagcctggcgtggatcagccgcatctgcggcgtcttcctccgcccgtacgccaccgatgcgcccaccgccgtcgcccacagccctcctgttcgtcacagatcgatcgattgactgattaaggagtactgtagagatgaaggaattggattgaatcagaaaggggatggatcttgcttaccgatgctggcgagcttgtgttcctccacccacgactgcaccgatgagctcagccgctccattcctgatgaatactactgatttcgacgactctgaatctgaatttgaggatgtgatttgggagtgagagtgagagacagtgatgagaaatgggaagctatcgcgtagaatttataggaagcaaacagataaaagagaacgtcagcaaaactgtggctactgagaaaccagtgggcgggccgtctgtttcactccacctgctgctttggtttcttcttgtgggccgccgtttctttgctacaaggctccccaaggttgttggttttgcttcctcccaacagttggctctatcggttttggactctttggtcttccttgtctgttggctactcacatggtttcttctcttttcttctgttgccatggcatctgcctcgttcatgtttgcctcgcatgtttcacaagtgttgtgttttttcttactagtaacaagtaaaataaaaggcctaatcaatagccattgtattttacatttgctaaggcttgtttatttcacgcaggaacatgatgatttttttttaaaaaaagaaaaattcataagacttcaatggcaaaacagatcattacaaaacatgaaaattaacgtaggaatagccgtttggatagctactaataaaacactaaaatttgagaaggggatgatagatagataccacaaataaaatttcaggtctttattttttattgaatgaggcatttcacaggaattttataggatcatacccattcttcatcgaaatgaatatatgcaaaagttaatgtaagatttaaaatcatgcaaaagtctcttattttgttgttaagaaactcccctaatcgagaatggcatcttgataaatccaagtacagaataatattttaaccaaaccacatcatcaattaataaccctcctacccataccgttttcctcacgtctttagagttatttttgcttctagagaggttaacatgtaattttctacggtttattttaatagtgccataatagcatgggggcagtgacaatttgacaatagtcccacataattcctctgtagtgatcttgaggacaccggaattattatttagatatgtgagggatctaaaattcttaagagggtataatacactacttctacttatttatcttaattaattgggcaattctatgtcgaaaaaattgttggagggtcgttcccgcttgtctctgctatcagctgcacgtagccttacatatgttgggttctctctctttctcctcggtttctcttcatgggagtgagtgttgcatcgtcggcagcagcggcttacgtgtgccgaagcagcggcggccggcgcctcctccaacctcatcccagctgacgttcacccgacgccgcccgtcgcagggccggatatcgatagatcgacaagtgctcgaacggtggcggcagcaagaggggtccgccctctgcggcgctggcaagcactgtcaactgcgccgccgggagtcgccctcgccgccctcctcctcgctcgctcatctccttcggcgtctctccctcccggtctccgcccccaacgcctccaccaccggggctaccgatgacaacgatccactgtcatttgaagaaggaagaaacaggggagaaagagaaataagaaagagagagagggaggaggaagaaggaaggaaagaggatgccatgtgggtccccatattatttttgtgtgaatgataaatgggtcacgcgtatatttttttaattaatacacataagcaccacatcgaacgaaaaccaagtcaacaccgtcacgttagcgaaaccgccctacaaaacctttgagagagccaaattgtaccggttttaatagttgtggggccgaaatatccggcaatacgaattagattcggttaatactcaaggaagtcaaagtgaacttatttccgtggcgtatatcccttatttcgatgggtgggcttgggctgacaaacaatcacgctctcggcccaaaacttgtatctttt

SEQ ID NO: 14353 - DNA, 4946 bp, Oryza sativa
cgttcatcatgtgtttgcagtgatttgttttcctgatagaagcatgatttgcatcaaatggatttgcagattttacatggtttcttctagtggtaactcgattagaatttggcagttactagtaggtaacgatgcatcaattgcggattcttaccatgcagactgcagctctgacaaacaaaacgtgaaacgcactaaataaactaaaagactaaacacgggtctcaagtccttacccatataggaaaggaaattccacctgaatcaagcaaatttcgcacaattgggtaccatgctgatttcggcgagggaagaggaggatcatctgcctgcaaaattgcaggcttagcacgaacatggcagttaaggtggaaggcttactgaattcggggcggggccacattctctgcataattcagtagtactagtaaacagcccaacaaactggaccattgatccagaaaattaaacaacctgcaaattcgacgtgaatcaagctaattgcacataattgtcaccgaggatcaacctctgcaaaattgtaaatttaccatccagtggggaagtttttggtgaaaggcttactctgcatatttgggaacgattttgctagatctttgtcaacagattttcacccccaatatttgtcgtttttctatccgtaggatttgcgccatgattcgtgcatttccctgtgtggatgagaccgtgtggcgtgtgagcagatggcctgggagtcaatgtgggccaacccatgttaaattttggattccgcgctattatgtccgtaaccgttggttgtttcctcgctctctttctttattctcgctctttctctaaatctctttctcctctttcttttctcttctcgttttctccgtcgagagagagagagagctcgccggcgagagagagcacgagcagctccccggcgggagagagagagcgcgcacgctcgctgggggagacaactcgagagagagttttttttgagtttcttccctgatttgctggcatcattagcttgtgttttggttttttcaatgtcaatagggctaggtttagaagattcgggtcaatatatgacgattttttttgctcccaacgtatggatctgattcagaatcacttgttttagttttggaatccgtttagattttggattccctaagtttttagttatagtttgattcagttcagtctagggtgttttgttactagtccattgtttgcaaacgaccagattcgatggtgttctatgttttttttctaatccacgagggtttttgtatttttggttcgatttttcttcaggggtgttcatgttgggggttggattcaggggtatttgatggagttaaaggtttaattcgaggtggttttaggggttttttctaatcacccagatagttgatcattttttggatccctgcatgaattttcttcagggagggggtcagattcatgagttgattatttttgctttgatttatgtgtgatttgaatatagtagggaagcatcattgcaactttatctgaatgttgcatttcactttcagtgattagttgactgatctgttaaactccttgcatgagtctgaatttttctgcatgtgaagcatttcgtttcagagatgatttatctgtcaactccctgcatatatctgaattcttatgcatctgaagaatttcgttttacatatgcatgctaactgaaccccaagtatgttttgtgttgccttctgcagcatatgaatcatttcgtttcagagatgtacggtttgatttcccagtatgctgagttgcttggttaaattaaacccaaacccctacatgcgttctgctttcttcagattgtattctactgtactatttggtttataaaattcctgtacatgttctgaacttttcagtgctgatctaaatgagttagcagcaagccaatacctgaacttggtccctgttgctttgagaaattatgggctattggttgcatctgctctttcttctcttctgaacttttgttcattgtcaatcgctcgtaaatcgtaaatctgtttgaattggcgctatttctgaacttgggaacataattggcactatttctgaattgggaacaggggatagcacgctcgtaaatctatttgaattgtcagtattttttgaatcttggagcaggctattgaacagtttcagtcgacatgagctttttaaaatctcatacttcagcaaactgaaaaataatttggagggtttcagtctaatgttgatctaatgcatttcaatggtagcaaaaccaaggtcacttgggtgcctggaggtattcacatgcctgaaatatctgtatgattttttttcttctttattctgaatgacccatcgtcccatcccaatattgttcccatgttaattatgtgtggagcttgttagtcagttaactcatttgctgtgaaatttaatcgggaggctcaacaacaacaccctgtctggtccattcccttctgcatcagctaacttgtcacatcttgttgtcgagtgattttaatatatgtgcacagaagtttgagatatgtgcaaattatgtacaaaatttaatatatgggcaaatttgtacacaactggagatatgaccgtttggaccacaatgctctgttttttttttatcctaggctctaatctaattgttgtgctttgttaaacaccactgtctgaagatgattttcacttgaggaaaatcttcagtccattgtgacaaagtgactccttttctgaagaaattctttattttttgaagaaattcaagcatgcttgcagttttagcccagttacagtctatatgtattgtagttacatatgtaacttttgttatttctcactgtaactgaccgtagataaatagttctttatatatttgtaacataatttagagcttgttatactaggggaaagtgttttaatgttgctgcatgaatactgaatttttaaagaaatttaagaatgattccatttacaacccagttacagttagatgtacagtagttacatctgtaacttttgttatgtctcactgtaactgactatagatagatagctctttatatatttgtaacataatttagagtttgttataattggggaaatgttttaatgtcgcagtataagtactgaattttttaagaaatttaagaatgattccatttacagcccagttacagtttagatgtactgtagttatatatgtaacttttgttatttgtaactgtaactgactatagattgatagtttttgttacgagtttttctgaaaaagttacatacttttaactacttgatctaaagaaatttcctattccaagcacttttctccaaaagaaattcactattccaagtgcttttctccaatatttttacagaactgagttgtttttgtttgatttaaaagatgactggcagaatatggtgaagtcaatggggaaaggtaaaggtggattttgtgctaggtaatttgttacctggaagattatgtcttgttgatttcaacttcttgacctcaatgttcttggtaagaatttgcttcttcttctttttctcgttctcctcactgtctatggcgtgctcgatttgttttgctcgatctaggggatttgtgcgaactggtgtggtctccctgtgttattttgttttttttctgacctttattggatgtgaagttgatcattatgggccgtgatgtatttgcagttatggcctgtataattttttgtattgttctatgggctagaattcgagtccatgtagttttgtgatctgactagtcagagaaaaaaatatgtagcattttttgtgtcctctggatcttaatctaacggtaggaaaaaatctgggtgattttgacccaaggatttgtcgacaaagacatagctagttcctttgggaaagaataaacggcccaattaacttgcacatctatctatggaataagttcactagacgtccctcaattttacataaagtctgcctgacattcctaagccccaatacctgaaatctccacctctaaactatacaaaaccatgcaatttggatcctatagcgctatgaatctctggttacgctaatgtggtatcatagtcagcaaaaaatgaaaataaagaaataatggggcccacatgtaagtggaaagaaaaaaaatgtggagtccgcatttcttccttttctcttttcttcttctcttctcttctcttctcttcttcagcaagcctggaaggccaccgatggtagagggtgctgagcggagtggcggcgggcatagcgacggtagccaactctagcttgcatagtgcttcgacccaccccatgtcgctacggtagccgccatcagcaccgattccgaggctgccgctgtgatgaggacatcacttcgtcggatacgctcataacttcacacgctccaatgataattccaagtccaagtccagttcggcctccggagacagcactgacttcaaacggacctagcgccttcatgccaactccgatttgagtgatcttggacttcgtggaaagcttatatcgctacctttcaaacgcatctggtctcatgtccaaattcatctcgagtcaacgggaatcgccaaaacaagacagtgctgttgctgaaaccgaacttaggccttgggccttgtaatagactaggctcatctcgaaagtgtcaccctccacctccacgaattagcactgaaccctagctttattttcctctataaatagctttgttcatcctcaaaaacatttgagttttgtttagttgaattttaccaagtgccattcaccttgtctctagtcctcgctcgattagtcggcgactatagattcagagcccccaatagttggtgtgttgatttgccgggtcgattagatctaccacttcaatcgtaactattcct

SEQ ID NO: 14354 - DNA, 716 bp, Oryza sativa
gactgtgattatgagggtacaactgtgccttctgcttgcattgcagacactgatttgcaaccccctccctactcttccggcaggcggcagcatatatatacatgtgttttgaagcatgtatgtatatgctccagcctccagcaataccagtatcttaccaggatgagtacagctaagctcttttcttttgcacatcacagccatatatcttacctgaagaacttaccataagatgtgagatcaaccatgaaatggttgccccttgctttaaaagcgccatcacaaataccaggcacctaacaggacatttcagaaacacacttcctggaccagatacttcaaacaatacatagaaaggaagaaagctaatgttgaagtatcatttcaacaaaacaaaacaagcatcatttcaacaggaaaataaagaatagtccaaccattgtattcagaaacttcagtccaaatctcatgtattaataagtctatactcccagcgttgcccccaattctccactcattgttttaggttacacgaaaaggctcaaacgtgaactattttgtacatttacttcaagatgtaatcctcatgttacagtcgccatcgtactacacttcaacaacagaatctaaccacaataggggttacatctggtcccaaatcaactaagtatgatatatatatcagaactccatcactggaccttctcagattcgca

SEQ ID NO: 14355 - DNA, 15625 bp, Oryza sativa
gtagttttctatgtaactacacatccacacgcacaagcacctggttggttggtctttggtcatttgatttttttttcttctaggcttgagtcctttgtaatcttatttaccagctattccatttggtagataccgcttgccaaaaaaaaaaagaaataaagaaaagtcagaaggtgcaaaaaaaagaaataaagaaaagtcagaaggtgcaaaaaaaaaagaaaaaaaaagagccgcaccaaaaaaaaaagaaaaaaaagaaaaaaatcagaaaaagaaagtgtggaatttttttttgttggaatcttagagagagttgcttactatagcgagttgtggattgtccgagtgtgatcatttgcttgcttaagctaggattgagtctaggctacgccagcaattttgactagtactttggactattattcaatttcgcaaatctgtttgatttttgctattccttgtgatatagttaagcctaccaagatccacatactactaatctttacatgtacgaccttgcaatcgctccactcatcaagcgtgtcattgtgccacgaaccagccacggtgattgacctgttttgcattctttgagaatattataagaatttggtatatgcttgagtgttgagtgccttcaaaagctccacatatatatagattgttaggaactgacactttcttgtgagtttcttttgcttgctaacgatgtcaggtacaagttccgatgaaccaacactgaagaatctagcgcataaactgaagggcatggaaaattggtatgaagagttgatgcgtaatagtaaatcatacaaggaaagcacagataaacatttaaaaaccttaagtgaaagcctggtgaaagtagtagatcaaattgagcaaatgaatcgatcacataaacaattaactgaaaacattcagaatataaatattggacatgaaaatattgtgcgacgcattggtttacttgaggctgcaggtgaagaaggtgtaggtgccactgctcatcgacaccaaagatatgacgatgaagacgaagagcaatctgttgctgatgatgaggaggaagacgagagtgttggaaatagaagacgacgtcgaattagggacaaagatgatcctttatctaaggtaaaatttactatgccttcttttgatggtaagtttgaaccttctgtttatctagactgggagctagctgttgagcaaaaattctcttgctatgattttcctgataataagaaagttaaagctgccagtagtgaatttacctcctttgcatctctatggtggaatgatatatgtggtagaggacttagacctagaacctgggatgatatgaaacgtacaatgaggtctagatttgttccttcttactatgctcgtgacatgttaaataaactgcaacttttaagacaaggttccaactctgtagaaacatactatcaagagatgatgattgctttgtcacgatgtaatttgcaagaaactgaggatgctagaatttctaggttctatggaggtcttaatagagagattcgggatattcttgaatataaagaatacaataccatgaatagattattccattttgcctgcaaagctgaaagagaagtgcagggacgcaacaagcataggagttctcttgcaggtgctacttccacacgacagtcaacaccacgtcaatctactactgttgttcgtccacctacctccatgccatcccatgctcaagaaacaagcaaaaacgcttcagttcagactccagccaagagtgcaacttcagtagattccactggacgtacacgtgatattacatgtcataggtgccatggcattggacacattgcccgcgactgtccaaatcggcgagctctatttgtgaatgctgatggtgagtatacttctgctagtgattgtgatgatgaatatgctttagctgccactgaccacgcaggaggacaagatgatgaggacatcgaggaagtccatttgcatccagagtcgctagatcagtatcctagcctaattgtcaagctagcacttagtgctaaagagaagtgtgaagagcaaaaccaacgtcacaatttgttccaaagcaaagttcttgtgaaaggccataccgtcaaaatgattattgatagtggaagttgcaacaatttagcaagtgaagagatggtcaagaagcttggcttgactacccatccacatccacatccgtatcatattcagtggtttaatacatgtggtaagatgaaggtaacccgcttggttaaaatacctttttctataggctcctaccatgatcaaattgaatgtgatgttgtacatatgcaagcttgttctgttattttggggcgaccatggcaatatgatagagaagttgtttttgatggtaggactaatacatataaatttatgttcgatggtaaaagagttgttttgcattctatgactccagccgctgctttgaaagatgatcttgcaagacttgaatgtgaaaagaaagcgaaaagtgaaaatcagattattgctaaacatcctgcttcaaatagtaaaatagaaccaagtaccacaaagaatgaaattaagttgaagggtgctttgttggcttctaaatataatatttgtgcactagatgagccagattcttgttgctatgctctattttgcaaagatcctatactcacattggctactgctcctagtactttatattctttgccacccgctattactaaccttttgcaggaatatgaggatgtttttcacgatgagatacctccaaggatggccaatggacgagagagtgcacacaatcaagaagatgggattgagtcgaggacgactccaattcaagaaggggaggatgatgaggacatcacttcgtcggatacgctcataacttcacacgctccaatgataattccaagtccaagtccaattcggcctccggagacagcactgacttcaaacggacctagcgccttcatgccaactccgatttgagtgatcttggacttcgtggaaagcttatatcgctacctttcaaacgcatctggtctcatgtccaaattcatctcgagtcaacgggaatcgccaaaacaagacagtgctgttgctgaaaccgaacttaggccttgggccttgtaatagactaggcccatctcgaaagtgtcaccctccacctccacgaattagcactgaaccctagctttattttcctctataaatagctttgttcatcctcaaaaacatttgggttttgtttagttgaattttgccaagtgccattcaccttgtctctagtcctcgctcgattagtcggcgactatagattcagagcccccaatagttggtgtgttgatttgccgggtcgattagatctaccacttcaatcgcaactattcctttgtgcttaattccctattcgcagtatttagattgcatcttatcttgttcttgcagtgttctctcgtttgcattgcagggatcatcaaccgcgcgtcacggttggtacgacatcgtttgtggtgtagcgattgcacggcgtcttggacttgttctggttggtagccacgtcgcaaacgtcgcactcgatcaaagcgagagttatccccctcaccagaagatcgggccacgagagagagtgtcatcacgctggagggcagaggcagtccattgtggtggggatctcgtccgccgtgggggctcgtaggggcattcgctgctgcctccgccacggggacctgtggaggcgttcgccacctcctccgcgacgctgcgacgcccaccgcagcagtagctgacccagaggacgctgacatgtggggcccaccatatgccacatcggcgaaagcggagaaaaattgggtcaatactgctttaggatcttttttgcatggtttgtgatagttgaggggtagagatttttggtattgcggactggggatctcaaacaaactcaatgtaaagttcaggaacatcaagtaaacttattcctctatctatctaaagaccgaaggtccgctccaaacataagagattgggcctaacttgtttgtttcacgaaggaagagtgggccaacttgttactcggttggcaaaaggcttggccttccctatctcctccttccaatcttctactgtacttattattcgttgtaatcgtgttggttttagctgtagttgctgtagctgtaactagttttccccctgcgttttgcttggtgtgcgatccgagcgcgcgcgttcgtggagtggagtcgtgtgccagcgatacgatcaggacgtgttaatcagataaccagcactaacaatgccatcttttgtggtctcctccctaaccctgctggctggctgtttccttcaagttggaagttagtcgtcatggtcacgtaccacttgtaatcttagagtggtcagacgtctgtaaactctatccggctgcaggtacatctcaaggaagaagatcgaaacaactcgagcccatgctgctcaactaggagtaattattaaggatcaggctgtgccattgccaattatattgacatgcatgttctgatgcgtgcttgcagggagatcgatctccacatccatcaatattgattaacacatctaatacaacaaggaatctttcgtcccatctggggtttgattcttcacagcaaatcccaccaagagaattttaatttcttgtgctcgatcgcttgctacggctcttgttaatttgtttactgtcgcactgcactatatgcacgagcgccatggatcgatgatgacaaaatgttatattctgtcgtctcaagcccaagatgtacaccaaacttagcgttaaataaaacagcagtcgacacacaggatgaattcagagcagttccagagaggaaaaaaaaagggcttcaaagaaaaaaaaaacgattaaggggtgttgcgagaatcgaactcgcgacctctcgcacccgaagcgagaatcataccactacaccaaacaccctttctgaagactatggtatgtaaattttaattgtattttacattttcagtctattattctaccataattcaaaatgtgaatatcatgtggctgctttacacagtttcaacatgtacatgtgattatttgtgcttactattagattcacacatgtcgatttcgactttcaagcgtccgatatgatgaacatatgccatgtcggatatataacgaaaaataaaattgagagtggttcatagcacagacaccagaaacttaaaattaagaggccgaggttctcaatactagttgtgttgtattaatttatgagtgaatctgaagtatgtgctagatatatctatgctattataaaaactgaagatatttatatcaaaattttggtacgtcatccgtatttcatttagtttttaagttagttataggtcgtcctcatctaattcgatgtgagtctagaataactatttttttttctttttctccttttctttttccctgatcctcttccaatctcttatattttctctattttcctctttttcttttctcttccaaacttctctcctcataaatatttttcttttaaaattataattgtttaagatgtgtatgctgcaaatttgttactttgcgaatgctttccaccaacaatattttttcgtaaattgaataattaaaattttaatctttggtcaataaggtatagcaaaatacgcatgcgtcaacttatggaatagccacccaatcgatatgtaaggctatagaacagtatacatgaaggattcttcatatgatgatgtatgaagcgagcttactcaatgctataaaagatttctgactttgttttgtcattgttttgtttgttttgtttcggtttgtcatttaaattgataaagtttttatcaatcgtgaaaattgttttcaactgcgcacaaatatttttgctagtatatttttaaaaaaaacaatctgcaatatgtatgcatgtcgatatacagaagttagaaacatgtcgctagctagctgtggggagagagaattgaattgaagactgcaggagatcgatattggaagggatgattggttgatgagaacccgtgatgagagaaggtaagagtatttggagggacgcacagctcagagctcacgagaccaaaaaagctgatcagaccaattacaactaaacacaccatatgcacggatggatggattttaatttttttttcatgtcatgtagattgatcatgctgcagagaccaattacaatgaaacacaccatctgcacggatggattgattttaaatttctttcatgtcatgtagattaattgatcacgctgcagatcaaattacaactaaacacatcatatcatatgcatggatgtatggattttaattttctttcatgtcatgtatattgatcatgctgcaaagcatatactatatgcatctatatatgggaatggtatggcaggatcgatgcgtacatacgatcgacgactgcagacgcgtttgcgtcgcacacaagcatcccaaatgcacccagagaccttatcatttcgatcgcttttgacgcctccttctgaaacttaattaattttcattagccaggatagtatatttaatttaatgcatgcaaggcaggcaagagatgaaataatccaagctttagtgctctctccgtccctaaatatttgacgccgttgattttttaaaatatgtttgaccgttcatcttattcaaaaatttttgtgaaatatgtaaaaatacatgtatacataaaagtatatttaacaatgaatcaaatgatagataaaaattaataatatgacaaatgatcaaacatatttagaaaaatcaacggtgtcctaaataaaaatacttagggtactgactagtgatgacaattttggcctgggtgccaagcgataagcaagcacgcgtgcaagcagtcactatatgtttgaccaacccatccttctcatcagttacgttaatcatttgctgtgactctctgcactagctacttgactgaacaaaactacacatatcgattgaaacatcgatcgatcagagacagtatatactccatccgtctcaaaatataaatatttttagactatgacatggtctccgagatactactttgaccaacaatatctataaaaataagatgttttaaataaaaagagttgtatatttgatagtttgtttaatgataaatctagtaacatcaattttacatgattgatcttttttattttttttttgctattaatggtcaaagtttaaaatgtttgacttatcattatgctaaaaaatacttatattttagaacggagagagtatatatttctgagctaggcaggagaacacgttaggttaggccgggtgacatgttctccccggcatagatagcactagaaaacaaattgatctgtttgcattttgtatacatgttgtgtaacaagacgtgttcgatgtgtatatattgattaattatcagtttattgtattggctaatgtatattgttgggtgaaagctacttgacgcggttggaccgaaagctctagctagctaatcactacgtgcctgataaaaggcgtacatttacgtgatccgggataaagaaaatgacaggagctcgatcaggagaatttaaagcagagtgatttgcaacacgtacgatattcgatatcaagctaattaattataagtaggagtatgtaattaaggctactgtagtcggtagttttccgtgtgtcgtctcgacatataatgttatcaattagaaggaaaataaatgagctaattaagcatatatatatatatatatatatatatatatatatatatatatatatatatatatatagctgagacgacgacgattctcgcttcgcttgtactactcaaactccattgctcagagtggatgatcctcttgcaataatcaaaataaaatagtaaggaacgtgtgcatgcagaacaaaacgaagaaggcaaagagacaaggaaaaacaagatagagtattagttttgtcttaggatccatcctcaggctgtcaggcaacacaccagtactgcagatcgatcatgtgcacaccccaacaattgcaattatcaataccatacgtacgacacagcaaagtactgtactgcccactgatcatcatgcatatcatcgatatcactcgttatatatatatatatatatatttcagtcccccctcgtatatatataatgaccatgcgagcttctgattgatcgatctatatatatgatcgagatgcccattacaaactagctaagctagcagctggtctctctcttgatttgtgtttccccagagagagagatctagggagagatgtcagggaaagatcaaaagaaagcagcagctttagaagagaagctcgagctctacgttctgttacaaagtcaagtgcggtacgtaatttaattaacttaattagtatccatgttataattactacatatgcatggttcggtatctctcgatcaatttgagaatatataaaatgagctatattgacttctatctacattggttacttctaatttttcctattgcaataatcgatatgttttcaccctcacctatcttttctcctaaactggaattttaaaaagaccgggcttaaaacccaaatctaccggcagcgatactgtgccaaacacactattggttcaaaaacttgtgcgcttccagttatgaatcgatagtaatagaattttctgcagcagtgagagtttaattatattaatctaaacatagcatgcatgaatgtatgattatatgcaggcaaacgagacatcaatcctcgtagatgcgtccaagtacatcaaagagctcaaggacaaggtatctcaggagcctgaacagctgggcagcactagcagttccatgccaatgccaagagtatgtgcatcgcattgttacttacttgtccatctctctgtttattttctaagctaggacaacgcatgcatacaatgatacaaagtgtatatgggtaaacaagtacaatgtgtgctaatacatctattataaactagatgaaaccccacgcgttgctgcgggagtttggtataataataagaaataaaaataatatgtaagatagttagacgatagaaacttgcataagttattgtggtttatcataatttaaatagtatatagaatgatggtccaaatttaaaagtaatttgatgtggctttatgagaggagaaaatgagggaggtaattccaaccatagattaatcatttgagggctagaaacaattgaggagatatggcttaatgagagaagagagaaatagcattaactaagtgaaaatgaattgtataggtatatagatattatacaaaatgatggagagatatattgaaatattttgagaattatgtggaatgatgatttaacatgcttggattttttaaagctctaaaatttaaaatttaagtgaggatatactatataggcatataggatattataaaaagtgatagagagatatattgaaatattatgtgaattatgtgggatgatatttaattaacatgcttgtattttaaagctctaaaacttaataaattaacatgctcgtatgagatttgagatgtattaaatgttagtggatgatgtggcatatttgtatgttgagctttaggatatagtgggccttaactttatagaaagataggatattcaaacttttaaatttcaccatcaatatatttacatcaaaagaaatttatggaatctaataattaagtttatgatattatgatagtatttttttaaaaaagcaaatatatacatacctttaaaaaaaccttcgagaattattgatgtggttatgatttatccaaattatattttaaacgtgaaatatttaagattggactgagtacaacaataatgcaaatctatttagttttccttaaaaaagataaatatatatagtctaattaacacaagccttcaccgatggagcgaactaagttatgaagaatatagctttggatcactcctcttcagcaacggagatagctcgcgggcaagtcttgtacggtgtccacgcttgggctacgttgctaccgtctccactgtagatagccgctaatacctataaaaatcagtcgatcactgaaaaacactattagttgtctgggttcgacggtggtgatagctccacaactgctcctcatgatactttaagtttatagctcatcatagcataaaatgtgactcttccttcaagttgggaaaaaaaaagaacttaatgcagcattgaagacgtatggatgcatgcaggtgagtgtttcatcggtagagctagagaagaagagaggttttcgaatcaatgtgtcgatggagaagagtcagcctgagttgctgacgtcggtgctagaagcattcgaggagcttggcctcgacgtccttgatgctgacgtgtcgtgcgcagatgacaccgcatttcgttttgaagcgtttggatccagccaagtacgtaccacactaattatctatcgatagattaagtaatttcgttgattaatttggctaattaagccggcccctttcttgtgacaacggaagaattgtactcgttgataatacttttgacttttttttagtcaaagttcttttgatttaaccaaatttatagaaaagattagcaatattttcaaattagtttcattaaatttagcattatatttatttcgatacaatgtttgctacaccgctttgcattaaaaatattattatattttgctataaactttaccaaacttaaaagtttttgactataaaaatcaaacaacttataatatggaatgtagggagtacttacataataaatcttgatgaatactacaggacggtatcccgttcgaacggggtgacaccacctgagatattatcccgtccaaataggatatcgtcttgtagcatttccctaactctttagtgaattatttattagtacttagttgttgtatttgcagagtgaagctgcagagagaagcgtggatgagcaaatggttcggcatgcagtgctgcaagccatcaagaaatgcatggacggatcatcaatttgatccagaatgaactactttatgtttagttctaaaaaaagtactttatgtttcgacttaatactcatctgccgtagcgcaagcttattgtgaggatactaaatagtatactatctatattttcagttaattttgttgtaaaaatttgctcatctcttggtgctgaatgaacaagaacggcgttttgtcgtttaaatattcgtgcaaagaatctaaattgtatatattgatcacattaattccagagatatgcatgtactatcatttaattacacttatacatcgtacgtcgtctaactaaattctaaacgaagaaaaataaaagggatattaaggcgtcttggcgggaaatgctttattggcaagcagagcgcgggtgatctggacgcaaagggcggcgttcctgacggcgaactcctcgtactccggcgagaacaccacctcctccgcgtgctccaccaccgcccccatggcgcgctccttgagcgccgcgctcgagctcagctccgccacctccagcgtccgcagcacgttgcccgcctccacccccgccgccagccgcgcctcgcacgctcgccggaggaacggcacgtcgtacttgtcgccggcgaccagcagcgcgtgcaggtgccgctcctccgtgcacgtcgccagggagcccgtgtagaggaaggcgaggaggtgggagagctcgtcgtgggtcagctccggtagcgacagagagtcgccggcgggggccttgcagtcgtcgtcgccggcgaggatgtggcggaacacctccgacctggtcgcctgtatatagctgggcctaattagtttcattgggcccaatcaaactaaaagaaggccggcctattgggctgaaactgagagagagagagactgacaaggatggccttatgggcttggattgggggcccagttccaggcctgacggcgatgtcggtgtggatgccgtctttccacgccgccgcgaagccttgctggagaaacgatgccctctgcttggtctcctcctctctgcatcgcatctgcttcacctcctcccacgcatctctcaatccctacattgagtaacacgcacaaatgttagcagttagcactatgatgctgataagtgtagtatgtatgtcccatgcacccccaccaattagcattaatctgtgactgttcagaattaattctttctgaagattagcataacaacttgtccaaggcatgcacctttatttcctcattccagctattgcaatcaaggagaatcttgtgtatgtcatgccggtttggttttttaataaaaagataacatcagctgttgaagcacactagtatataaaatacagcttctgaaaacggtctttaagcatcgatcaatcatgaaccttttgacaatgagatttccaccaaacctatcattctcatgcaactctcgattgagacttgctcctcaccattaaccaacacaacgttgacagcaaacctgacgcatgcgtcaatgaaactgaatgatgtaaccaatgcaacaagagtttatattgcattacatgtgagatggaattcctttttatcaattcattctctaccgaaatttctctgcttctagaatctagaaacacgcaaggctagatttttcatggaagtagagcacacggcacaatcgagatggttgtaaaccgaacatagtcataccaatcctaaaggactaattaataaaggagcaaaatgagatatgggaaggtcttaccttggttgtgctattgagctttgtcaatctgctgggcttcaccgagccttgatcagcatcggcgtgctcgtcgtcgtcgtcgttgaagaaggcgatgatggccttggcaccttcatagcacgcagcgcagatggcgttccttggaagcctgtacatggacgccatgggactgcacacgcagcaatccattgtttcttctggccttctccttctcctgctgcttccttctgccttctcttccttcttccttctccttgtggcttggcaacgacgtgaacagcaacgctagcattgtgtttttgagctgtggtgaggctataaaaacgaatgcttgggacgacagggggatagagaggaggatggtgtgttggctatttcgttttcagggactaatgtattgtaatgagtggtggttgctaactaagacagccaggggaattaaaattctcctgctctctctctttcttcagtacacgtttgttctccacagagagaaaaaaaaaagataatgcaaaatatgcaactcatgaatgtagtaggtgcatttagcacttttttgtttcagtacattgactaaaatggccttacgtccttgttacaaaatgaagtgcatattaatgtacagtgaacagtcggtcattcagaacattcaagttgagtcctaatcctacgggactaagagaatgccttgtcaattaagttagagaaagcatgggatttccttttaatggaacgcaacgtacaattgtctatttagcccaaggccaactaccgtttaccaaaaacagtctgttcatagaatgtagatattaaattttacttaagaattactagcgatgcaaataaatatgggagcagtagtagcagagttattgatcaatgtcgaagactcaaagtgctctctctttatacttagtggtttcttttcggttcatgaatcttcatcttgcaacttctttgaaaatgaaaagaacaaaacaatgtgatatgttttgaattttttttaagataatagaagctttattatgacttagtcaaataacaccaagatgatacattccaactgagcccatcccgacctctgcataaaatgcacacagccaataaaaggacaaaactaaatccccatcacgaaacataggtactagtgactatcaatccgtagactagatcgtcacccttgggtaaaagcatcccgtgccacctagtccaaacgtcgagataccactgcaatagtatcccataatcccgacttgtggatgatagcccagatacatagccacagagtaactagagtaataacctatgttttgaaaatttttggcatgatattttgttgtgcatttccttgcgagaaaaaaaactgtgatatgttttgaaaaaaagatggcatgaaaatttgctccgcaatagtatcccacaatcccagcttgtggatgatagcccagatacatagccacatagtaactagagtaataacctatgttttgaaaatttttggcatgatattttgttatgcatttcctaaaaaaaactgtgatatgttttgaaaaaaaaaatggcatgaaaatttgctgtcctatgcgttttctcgcaagaaaactctgttttaatatgaatactatgcatattaccaaggaaaggaacacctgaccaatatagttgaggggacaatactgtcttttcctctcaagatataagtagacctcagaagaacataatctgaaattaactcagacaaaatgatgaattcatgattatataatgcgtgaaggaatcatagggagaaggttgataaggactttccaaccttataagagactttaggtatgaagtaggagttggccggaggcatggagggtggcacggccttggctaatgtgttaacaagctaaccacttccctcccactcctcacccaacggcctgtgttcgatactataacaaagcagaaaagtatgatatgatataccagagaactagatatgatgatttaaacaatccattttgctgctaagagcaggtacaataacaagctataaaccggctgcaaacatattttaatgagataaaagataagagagaagagcagcggactacaaatctgtagccagctgcagcacggactctaagacataatgtgtgtatgacagtgggaccatatgctaatagtatagtaagcaattattgtataaattgactattagattagctatagatgaattggagctagtagttggctgtactattaaccttgctcaccagaagctggaaggatgttcctggcttcctgcaattactgtctcaggatgagctagcaagctataacagtacaagtagtaacatagtagattaagctacttttcaaaatggttttactgtaggacttcttaataatttgattgtagcaggaacaaacatatgcatgaggaatagacagccctgggcttacagaaggtctacactagtggggaattaaggcagtcctgcgcgctcctgcaatttgtgttgataaaaaatggaaagggtgaggacaaatttggcgggagaaacgtcggggaatggatatatatgttggttggcacataataatccatcatatatatcctctccatgattggcctagtgtagttgtagagtcaatcaatgaaatggatggatgtaagcatctcattctcattagcaagcttattaaggatgcctccatttatcctctcttcaagagaattcttaaaatacggagagcacatt

SEQ ID NO: 14356 - DNA, 4459 bp, Oryza sativa
gattccctagtttgccctgtggttgaactggttagttccagtgtgacctttgctttcagtctgctgagaggtgtggagagaagataatgaaggaatggtcgtggagcaagtgctgttcccattaattgactgcattttttgtgcttgttatctatccagcgcgccgatccttgatttccataataaaagtttagtattgggtttgttaatctgcatggttaccttttgcatcagtcggtccacaaaagtcaaacaaagctgtgtgggcaagtgggtcactagctagctgcctgcctaactattttgttgtgctcatggacatgattgcgccatgatgaaagctcactagctcactcactgcctctgcctgtgcagaaaaggccgcattcgatttaaaggatttttgtatgaactgaaaccttaggaattttttttaccatcattcatttcataggaataaaacctatccaattcctaaggattctattcttacagcctaattctataagattttttttatattatgagagacctcttggaaaaatttctatgaattggagtgcatgagtcattctaatccttaatttttttttctacctatgatttggaaactctatgaaccgaataagtgctcagagttgttggatgtatcccagtcaaaagaaaaggaattgcagatgtgagattagactatcattatccccttgtgaaaaatgagcagatgatatatccgggtagccggcggatttgcctggagtgatgcatgtgtatcttatctatctggttgggcggcccttgtctgaatctcttgcaactgtgcaagtgggctggtgtgtgtactgtaaaacccacacaagcttgagagcgatggaccgactgctcgtggaaatacatagaaactgagaattgagagatggagcaacaagaaaagtcattacgaattctcgaaaaagaaaaagaaaagtcaatacgaacgaggagtacaaacaaattaatgcttagaagaaacgaagcaagcttacaattaacttgatgctacgatcgatacagcatgcttacaaaagacaagcattatggctgtgttcttctcccattttcccaacctatctatctctcgttatccgcgcgcacgcttttcaaactgttaaacggtgtgatttataaaaaaagaactttttatataaaagttgtttaaaaaaatcatattaatcctttttttaaaaaaataggtaatacttaattaatcatgcaataaaacaaacttcattttacgtgcggggaggggttcccaaccccctcctccgaacacagcctatatatccttgatgctgatcgctagagtatgtttcactttctttcctccaaaaaaacgacacatgctcgatagtaagtacagttggatcgatgcttgtctcccgtattttctcaactgcagggaaaaaaaaatgccatcggtctgtccaaagcaggtcacgtactcttctgtccaggttactctagtttggtagttagcacatggcttacactcaatcttgcattgcaaccgatcgagtaccgattcaatattgcatcatgcggctggctctttctttcttgaacaattcagctacacaaccaacatcaatatacgtactcctagtagtatataaacaaggagtacctcattacaacaaatctacttgcctgtatccctgtgtgccttcaagaattaacagcagctatatctagctggctaatggtgagctccccattatgatgaaaaaaaaaggtaaaatttgctacagaacacttaaagattgtggtctttgctgtgagacatccgaagatcgtgtatttgctcttggacaccgaaaaattatggaatttggttggcggcacctcttcccgtattttattatttccagctgaaaccgtgagacaaactttcataaaagacaattttacccatgggccatttgtataagccgaccaggtccggctgcaaccatatgtgagagaagtagtagtagtcagagcagccatggccccctgcccgtgctctgccatggcggcagtgcggtggtgtttgtcagtgacagcgcatggctgccaccacgagcgtcggcgtcaggcaagaggagatggaggcgaacccggtggcgcggcacggggctctgggatggtgtgcaggtggtgctgcggcaacggacggtgttggccggaattgtggaaaagacagagagaggcagtggcgcgaggggaagaaggcttcggccttggagctcaccggcgacggcggcgcaggaaggagacggcgatgtccacggcgcagcacccggccgtgatggcctccacgacgcggcggctcgccacggccgcgccctcatcgtcgccggtcggccacaggcagaaccgcgctctgcccatgagctcgccgtggtccacccctgccgggaggagaccgtacaccagcaactggtcgtcccgcccctcccactgcgtgagcagcacctcccgcacggcgccgccacgcgcgacgcctcctgcagcgaaggacgcgacccgtgtcaggggcaggaaagagagaagaaaagagagaagaaagaaaatagaaagaagaacagtgtcaagggaattttggtactttcaacactctttctctctctgttttcaccgaaaataataaaataatgcctcgagtgtccacagggccggccctagggagggtcaggccgtgcggccgcctgaggcccccaaaatctaggggccccctattgcacatataagtatatatactacgtacttaataattttagtcaatgggctataggcctatattaagttagacagctaaatagctcaatacagaaaatgaattttagtccatcgccagacctgtttcagtgaagccgaagcgattttcatcttactcccgtcgcttcgcctcgatcacatcacgccactcacgtcgcgccacctcgatcacatcacgccactcgctgctcctgcgctcttggtgactcgcaaacggaaacggcaaatcggggctcgctagtagtcagccacgctcgtgtcgatcgtccgccggttgccttctctgctcgctaccactcgctgcccctgctgcctgctgcttgcactgctctcctccaattcatttattcatttgatttcaaggtcctacactcctccaattcatctcatctggtaaatttctctatcacatcgaatattaaatgttgtgtatttataagactatataaatatatatatattagtttatgtataggggcctccatataagtttttgtcctggggccccaaaaccacaggaccggccctgagtgtccagcagctaattaccatatttttacagtgtccataagcaaatacacgatttttaggtatctcacagcaaatgccacaatatttgagtatcatgtagcaaattttgccaaaaaaaacagacatatagtagtagttatttttaagatggaatttaagaattaatactccgtagttggtaaccactaatccagtgcacatgttgactttccaaaccaacaataggataatatatgcacggatagactaatgaatgaatactaatttcattttttgcggtatcttccagaagaaaatcttgcttgtaaaaggctcattaaattacttgcttgctacccgtcatggaagaaaacgtggagaccactgtgacatatatagtgataaaaaaacaaggacaattaattgcatttgtaaattcgccatcgatttttttaatattgcaaggatgccactcgaatgatagttccagtggtatttttataattttctagtgtcagttttgcaataataatttaaagtagtggtaaatttgtaattgcccctaattaaaatgactaaagggatgacaatcatatactccctccgtcccataatataagggattttgagttttttcttgcaatgtttgatcactcgtcttattcaatttttttttgcaaatataaaaaacgaaagattgtgcttaaagtaatgtagataataaagtaagtcacaaataaaataaataataatttcaaaaatttttgaataaaacgagtggtcaaacgttataagcaaaaacataaaattccttatattatgggacagagggagtactaggaaagataagctaaggttcccctaactatgaatgacacatggtcacatgtttactttagcccaggcacttgagatatattaattattaaattgttttcaccatctactactttctccctcctaaaatgttgtatctagattcattgtcataagatgtgtcaaattccatcctactccctctgtttcaccatgtaagactcatatatatgtagatgttaatgaatctaaacacatatatatgtctagattccttcacatccaaataaatatgggcaatactagaaagtcctatatggtaaaacaaaggaaaacatgg

SEQ ID NO: 14357 - DNA, 36261 bp, Oryza sativa
ttcctgccggaacagcaagctgccctcctcctgcaactctcgcaagtaaaaacaggttgctcccccttttctttctttatctgcatgcacctactacagatttcattcacttgcatttcgtaataattttgcttcatcccaaacggcactactaccttgttgtgcaaattgacttatgggacaaagacactgcaatcttctagtggtggggtctggggtggttcgtgccttggatcactctcttgttttagcctgaaaatcagctacattaaactgaatgtggaagtaatccagacttttgttctttctcaatgcattgcagttggaaatggtacaataagagtaaaaggtccatgacaatcactgtcaccactttagcatgatgctgtatggctgtactttgactcaagtagaaggataactgttatgttcctacccagataattgcaaatcttgtcaaggaaattgtgggcatcctatctgcattactgtgaagaatctgtatatttcccgtaaaaaaaaatctgtatgttgagattgtaaggctcattatagtccctgagaaagggttgtgctgttagttcattcacagccaacaaatagttacagtgggtgcactttaatatctgaaatactaaattgcacttttctttgttgtttttctgaattctgactagcaaaacctctgaggctcagggtactcggcctatttcatcctcggctccttgtcatcgatctaaaaaggtcagttgcatttcctagaaccataatacatgttttgttattaggtattgaatcattgtgctattgcctcttggagtgatctacatgatgcactgtccattacatttttgcccacctttgccatgtaataattactaaaagctaaatgtgctatgtatttgatttctcttgcacttccctgaccatatttatatatattctgcaattcaactgtgatactgcatatccagatgttatcctatgaatattttgacacacactgcattggtgtgctttatggatatatgctatgatgctaagtataatatgctcttgcccggcaaagtataatatgctcttggccattttaggaatcacctagcttaggtacacaagtagagtgcactgttcttgttttgtttttgagtttcggtcctagacatttcatcgggtgagccggtgaaggtaatgaaaccagctgcaccagtgtcttcataaacagcttttgcagaaacgcctctcaaagaaaaataaacagttgtcatgatgtttcaccttttttattgcttgaaactttgaacagacgaagagcacgaggatggagaatacatcttcaggtaaacatatgctaccagaagattttgtcaagaagcagagagcctactttgaggaggttgatgcctttgagctgccagaggaggaggcctcagagacggacctggagtgaagactcagttaaatcagtgtatcggtgcagctagcttgtaagaaattactagaatatgtgactaccctacctgtacagaagcacgctcgcatagttttacgacaatgtaactgcgagttagtataacccgtgtaccgtaatcatcaccagtcaaagccctactgacgttggctttgtcttctgcttgtagttgtacaatatcaagtacttagatattaagatgagaccggtgctttcccccgtttgacctaaacaatggctatgatctttgttttttctggaagtaactgctggcttggagtactaatttttcttcaaagttacgtctgatgaattttcttcagtttttttctaagttacctgtgttatactcctacataaatttccttcaatctatgactggcattttactcgacaccctcagcctaattatgctagaagctatagatggagcttcatgtgcctagcaccaacacagaagtcatataacatgtcgccgttcaacatgtgcttttgcagcatgcagtataaggtgtggactgatgacttatcaaatcaaccaaaaccaaacatttgtttctttgtaataatcaattaaacagtgatactgattgcgatactgccattattagaccacgcagatcgaacccccccaagtcatgaagaagattattcttcatacaaggtaccgttttatccacaaacaggccgtctggcacaatcagcttcgtcaaaatcttgtttctttgcagaatccaagataattaaaataagtagtgagtggctttgatgctgcaaatacaatacaaggcaaggcactgaatattctttgaaagagatggctgccatttcctttgctttgctttcgtttctgcttgtgctcaccactcaccaccagcccaactgctcccactctgcatcttacttctgtgtatgcatgcagtcgagtcaacatacatcaattggctggcaagcaccatccatgcaaggattgagcacaattttctgagtcactagtctttggatgcggcttgtgaaagataccaccatattctgcagttgtatgcaaatgcaaatatcaattcgaatgaacggataggtaacagaagcagttgaaaacaccattgacatccggaggaaaagctcctccaaattgaacaacgaaaatattcgacaatcaagagaaacttccaaagtttggggggtttgcatacatggaatgtaggattggttaatgatactcctctatcttcctaatagttaattattttcatgttttaaaataaaagaaaggagatcacactgctaaaagtgacttaaggtgcacaatttgttgacaaagtatctccggctaatgaattagttcacacctaaagttatgacccaactgatcatgcctaaagtacatatattatctcaatgcagccactctaatttgtggactactacagctatttgttgatatcatagttcgagttttcaataaccattagcaaacattttacccaatagtttaaaccacaacagttttggctaggttgtactacaaactacaacaacgatattgtagaagaacaagtcaacctgaacaataagaaataacaagttcagtgataactgataagatcattcacctaccatccagcagaaattcattttttttgtcactcgagtcagaacaccacaaattcaattttctccactacaaaacacctccattatacgattacactattaattttgtcaccataaaataggttaacattcttttgtacagaaagaggtacaaaaccacacaatcttgtttatactaaaagggagcaaacatatgtgcattcatggataatatttacctcgagtctccagagctatccatttggtttttcagtaattcttctagatggttacatcttagtggagggatcaaaagaccaaaccacaaagggtatcttgtcatgttggcatgcccccatctgatcctctccacttgcatgcactttctgactgtagagttttccattaattagcctgatacaaaaaaaaggaagatcaactaacaaaatgcaaagaattacaaagccacaataatatacatatgacaaattgagcacgtgcacagaattctgcctataaatattcgtgtacatttgactggcaaccagcaacagcactcaagcctccaaaccaaatggcttcccctaaaccctttgcttgcagtgccattgccttgttatttgctgcaaacttggtgtcagctcagcttagcgcaaatttctatgacaaatcatgccctaatgcactgcccaccatccgaatagccgtgagatctgccatcgcaagggagaaccgcatgggtgcatcattgctccgcctccacttccacgactgctttgtcaatgaaagtgtcctgaacctgcagagatattcaaaattttctcacttctaagtattacgtaataaccttcagtattctgacaatgcagggttgtgatggctcggtgctgctagatgacactccaacattcactggagagaagaccgctgctccaaacaacaactctctgcgtggatttgatgttatagacaacatcaaggcacatattgaggggatctgtccgcaggtggtctcatgtgctgacatccttgctgtggcggcacgcgaatctgttgttgcggtaaggggagaaaatacaaaggatatcaaactaaaagttagttatttgtctgtcttaaaaagttaacaggaactcctgacgtcagaagatgagcaactgaaatgaacaaaacataactctttatgtatagctatgaaattctataccaaaacaagccttacaaagtattaaaagtcaagttgccaaagatagtaaaataaattaattgatatttataaaatacaatcagtagtgacatatgaaaaccgacaatttatttttcagctaggaggtcctacttgggttgtccagctgggacggcgcgactcaacaacagcaagcctggatactgcaaacaatgacattccagctccaacctttgaccttggtgatctcacgaagtctttttcaaacaaaggactaagcgcaactgacatgattgcactctcaggtactgtgtatgtaaatggaactttttggtatataataccatctataataaaaccataaaataaaacagctatccttgctgaagcttgattgtcaaaacaaactgtacaagtggtgttacatttatgtaggagtatcaatatatcatggtgcaaccccaacaggttgtttagtatcaagatgctactgatcaattgatcactaacatcaaataaaaatatatgccaggggctcacaccataggccaggcaaggtgcgtcaattttcgcaaccgcatctacagtgagaccaacatcgacacttccctggcaacatctctgaaatcaaattgtccaaacacgactggcgacaacaacatatccccccttgatgcatcgacgccctacgcctttgacaatttttactacaagaacctgctgaacaagaagggtgtcctgcattctgaccagcaactattcaatggtggttcagcagattcccagacgaccacctactcatcaaacatggcaacattcttcactgatttcagcgcagcaatggtgaagatgggcaacatcaaccccattactggatctagtggacagatcaggaagaactgcaggaaggtaaactaggtcataaatttttacagtctaagcctgtgtgtgcctgtgcggaagagtgtaatgttcagagaagggagaagtgtccctttcctgatgctgtagtcgttttgaaaggtgtctgtattgctattaaagaacacatatgtgaaagaataaaatggcataaaaaggcaactggtgtaacagttgatatggcctttcatcttttcatccacaattcttgcacttgaaagatcattgataacaaaactcggctccaagcctcttactatggttgatgaatttcatgactaaaacaaacttgtaataataatggttaagaacaactgttcagaatgacttgtcatgctggcagtgatcattacttggcttaattccaatattcagttcattgactatagtttcttaactagtacaactcataaccgtagtatatcaaagttgacaaattacatatcaattgtgtagggttcaggtatatgatcacaggatgattaaaatcaccattaagaaatgtggcaatcatgcttatttgaaaaggaaaatttgaacattagatattttcctaccgtctgcacttgatatgcagatatgcaagtgcctatatcagcaacaaggaaaagctaataatatatcatatcatgattttgttttagataatatcatatagtcatattcaataacaaagtgaaaacattgacaatttgtcatatagtagatggagatttctccttagaaccaatatttattttctgaggtagacaaatatttgcaacaaaatatattgtttcccacggaaggtttcccagtaaaatgattgggaaggttttgtttttcaattgtgtagagcaagccagtcctatacaacagagttgacaactcaaaggggaaaagaaaaagaacaacagtgccaactgagtagataaaatcttcctaacaccatagtcgaaagcaaagtcaggagtggtgaatgttacggatagctgcatttatacttttacagtcgaaatccatgatcttcatccagttctcataatctccaatttcctgtaacaaaataaaacaacagatgtttcagcaacaagaaatggaatatgatcgactaaggaaactacgcaaattgcccagcattgtactatagaatttatcatgttattccaaacgcagtgctgcacatggatacttttggggaaaatgaactgcaccaaaagaaagcaatccaagcaatgtcatctcattttttattatttgacgataaaagagcatgcgattggtgctctagtaagagtagtatccatgaaccggagaaaagcatctaaaaaaaggagatgaaaggaagatgagtagaccttcaagacagagttgattgcgttggtggcggcaagccactggtcagtctgcttcttgtaccgtgcgattgtagcaagcagcgcgcgggcttcaatctctatgcgcctctcgttgatgtagagctcctgcgctccgccatcaaccgtggccacgagaagatctgcaacccgcgccgcgctcctcactgcatcgatcttttctctgtctgtatgtattgacggggaacaaaaaaggtcacttggcacttgaaaaatcaaaggtggaaaggaaatttcatcaaaattttggtattttggcgaaatcaataggggatcggatcgaagggggttagggttaccggttatcttgcgctgatgaagggaatggtggtggtggcgttgcataatgaggagcagcgccgcttccagctgcccgcccgccgcctccatctcctcttcaatccgtggatggaatggaagcgaaggggatttgcaattatgacactgcaagcattaatattttctataataacactgaacccacatttcatagacacaaataggtccatttgtcatccacacggagtgtcaaaacagcgaagccaccatatttgcagttctaatattgcaattttcttcgcgaggggaaggaagggaacacgagaggcgatctccagtgagggccggcgcggcgacgacagattggcggtgcttttaactatttgccacttttagatttggcaaataactatttgccacccctatctcaatgacatgtgggtccacatgtgtctatgacatgtgggtccagtggcaaaaagttaattgccacatctaaatgtggcaaatggttaaatatctccagattggcgggtgttttcaacggacaacctcgggttaagatgtatttttcttcatacccctcgcacttcacaaattttatgatgagttttttgtaaggggaaaaacaatcattgtgaagcgtttgatcgaatatgcatcagatatgtgctacaagggagttcaacataaatttgaggataaaattttgtaaatttgtgaccttccaatttactcctcgattttatgtgcctatgatggttaagtttcgcaattggacatgtgagtgggatggagactttgcgagggtttcctcatttagagggacatcaaggtggtggtacaaaatactactattgtgtgacgagatggtgaggcagcggcttcagcgttgagttggcgttgagaagtaagaaaagtagtggatgctctaaaaagacagtgagagaaaacaatcatgttatgatagtggatccaatataatagcaaaatatgttgaaggcggaggaggccaataacacgagagaaatgaagtagagatgaaaatagagatgcaattacgaggggataggttatgggtaggtagcaccaacgaggtgtgctaacgagtgatggagcacgtggtagatggcatgatatcgttgcatacattggttaagcttctcgagttgatctaccaacttaccaagaaacaatgaaagagcgtgagaagaagaatgcagacatatctagaggttagtagaccaagatttataatctttgtacttcaattctcacaaatcaaggtccatatgtgacttataacaaggtaggtaaattatactccctccgtctcataatataagggattttaaaaaaaaattatgacacatcctagtactactagttagacatagatagcctatctagatttatagtactagaatgtgtcacgtccttttaaaatctcttacattttttttatctcatctaagcaatagccggttttagttgtctttaaaaccagcttagaaactgaatttattgcttgattgcatttgcatagtgtataattaacctccatatgtataagaacatctgaaacttcagtatattaaaatccgttttcacgattttgatgaacgcctagtctgtaaggatataaatgttcctgatcgtgtatgatgaaatttataacaaatatggttgtgggttaccggaccaaagtttataatctttgcgcttaaaaaaccgataggtttgcatgtagtgggatgtgcatctgtacgccttacctctagtagccaaatcttttcagatgcaactccttatcatgtgtcttttatcttgacaagaatgcatgatggaacttagtattagccttgttgcccaatctccatcttttgattgttgaccagtctctttacatcttaacagctctttaacttttgttaatgatgtcttgtcaagctaagtagcttaactagctagcacactgtaggccattgacttgttaatatactgtagatgcatggtctctgttttccttctgcagtatactagagtactagacatgcatgcagatttggtcttgtttgatcagccaaaacctccattgattgcggtccaaaagcagataaacccactacctgcatgatcgaatgcattcggcagccatgtagcactgaattcggttgactaagattgtgtttagttcacgagaagaaaattttttgaatgtcacatcggatgtttaatcggatatcggaaaagatttttggacacgaatgaaaaaattaatttcataactcgtctgaaaaccgcgagacgaatttttgagcctaattaagccgtcattagcatatatgggttactatagcacttataactaatcatgaactaattagactcaaaaattcgtctcgtgatttccatgtaaactgtgcaattagttttaatttttatctataatatattatatactacaagaaacaagctagacgtcttgtcatggttaattagctaggtaggtagttccagaaaaggtttcttgccaaagtgcagccttctcataaaaacatctccccagaaaacaaaatgagacatttgagctaccggaaggacattttgacttatctacattttgtattggttaaatcaagacctgaaatgccattgtccatgtcactacttcaattgataacatgcacgtatggcaatatgatgtttttcatgctcaatgcatgattgatcatcctaaaggtcctaaaggtaaataggtgattaaggatggattatttgcagtttaatctgcgatgacggagtacacgtacgacgttgagttttaggtttgctgagtacgatccaaatcgaatctttgtactgcatcagctgcttgctttgcctaattgattcttaattccgacactccatctaacaatcctgtactgctagttaatttcataatgtacttcctatatcgaccggccttatatatcttgctcgtcctttccgtagtaaggatatttactactagtcacttataagcaagcgattatagtcgatgccattaaggcgttaactgctaccacgataacagataggttcgatgatgcgtccatcttaaggttggagctgctgtgtcaattagacggcaagttcaacaatgatgacacgtatatatcctctgggaagtctgttttttaagtacgccacacccctacatatcctcgccagttaaaaaaaagagcaaaataacattaattatatcctttagtaaaaaaatagaaaaaatagcgtaaataatactttatatttaagtttaggtttccgttgttacgcacgagcatccaactagctagtatactaagcaactgagtatcatcatgagtaatattctaatcttcttcatgtgtgttgggcctggtctctctacggctacgtatacggcatgcagaattgttggggttaattagcgcgctcctacatgtacgtgttattctagctgatagcagagctactagtaactaggaagaaataaagcagacgaaagataggtgaactcaccgtgctagcttttctaatgtttcccccctgtcattcgtttagcttaaatcaagttgctcttacactagctagctgatcgagccgtgtaaactatatatttatcttggattttggttggtgatatgctatagctcctgcctcgttctccataaaagaattaaactggccaatgatcaaatatggtgtgtgcacttgtgcgtgatggttattgatcaactatataggccatccagacagaatctcagcaaatcagtgactgacatttcatctgcatatgcttctattgcagttgctagttaattagctactagacttttcgtaagatcagaggaacatgcatgtacgtagtgcaatatactaagctgatctttttctcatgcatgtttgcgtgtgtcaagtttaatttatagtatgtatatatatatatatatatatatgaaaaacaacaacattagctttaggaaacttctccatcctctgctcatcaggtcccttggactaaaagcaagatcatggagatcgatcagtacgcatgcacttgtcaaaggcctcaaattaaccaataaaaaataacctctctaaagtgggaggttaattagggttgtgtgaactgcactaaaactaagtaccacagtagtactatactttgacccaaaacaacacctacaaaatcttacaacagcattacataacaaacaaaaataatgatatatgagcagatacatctggtacatggatgttattataacaaaatggagaagcgacatctggtacatggatgttgttataacaaaatggagaagcaaacctaaccggaatggacgtatgcaggtcaaattcgtcagctaaacggcttggactcctgcctaagctagcacccatgctccggcaggtagaaatgcatcatgtcggaagtaaaactaattgcattatattgcaatatactgtactattttaagttatctgagttgttagtaaaagctaaagaatttttgctgactgcatatgatagtagtaacttggaaggtgagtaatctatagtgtattaaccaacgaccagcatgatcttctttgactagtatatactaaacgactgaattgtcgatcctcgtagacatattttgcccatgaacgtccatgtagctactttcgagtttcaatggcgctttccaaggccatgtactttgattaccatgatcgatcatttgataatgagcagcttgctaactgcatgtgttagcctagctcccttaggaaaaaggggaaaaaaaaagaaaggaacaactacaaaagacacacatatatacatagtacaaaaaaccagaccggaccgacggttgaaccggaaccagaggtctggatggctcggtttgctgtaaagaccgcccctgcatttgaaccggaataaaccgcttgaaccggatggttttcatgtgaaccggtgaaccagagagaaccgagccggccggtttgtcatgccaagagaggatgggccagtcaatgccttgtgcgcgcaaagatctcaaggcccacggtgaatgtgtactattgaaaatagcaagaaaaatgtggggaatggggttcgaaccctggttggctggctgttttcaacggaggatatgcaacaatataacacttccggttcaacattcgaaccgtgtgaaccggcggttgaaccgctggaccggtgacccagggacttgagcggttcgatcaccgattcggttttttcaactatgcatatatactccctctatcctaaaatgtttgacgccgttgacttttttaaacatgtttaaccgttcgtcttattaaaaaacttttgtgaaatgtgtaaaactatatgtatacataaaagtatatttaacaataaattaaatgataaaaaaagaattaataattacttaaattttttgaataagacgaacggtcaaacatttttaaaaaagtcaacggtcaaatatttagagaacgagggagtactatgcattatgcatatatatgtaggcatgcatgatgatgctttagctttacttaagcgtgtataactgttggacgcggtccaagtgttctcacgtaccaaatcctagctaaaagtacgtgtacattcttttctcttttttttctgaaactgcaaaaaagaaaagagaagaagaaaagaaaagaatggtgcactagtatacgtggctactccacaatgcctaacaatataaggaaaaggcacagcaaaaggaccgacacggcaagaaagatggtatagacagtgcagctagctgaaggtgcaggctttgcatagtgtgaagcgtctgattctctgacggccagcagcatattcagcatggacggtttgattgatgatcaactcaaagtccaacagagtaggtgaacattaagacacagagatgaccatgacgcaatctaatcatgaagacaccatgtattttaattcatactctaattagctacatactcttgtgcctctgtgaagctctaactcagctataaatacatgcaccaccacagctctgctatctccaggcactggtgcactcaccaaatcaacaagctagctaactaagcttaccacactcacatactcctatatattttggcacgcattgattacctgctagctccttgagcaatatcaatatggctcagccgacttggtcagcaaggcgcgtcactgccgccctggtcgtgatggtggtggtggtgctcgcggtcgccggcgggtcgtgggcgcagctgtcgccgagcttctactcgtactcgtgcccgggagtgttcaacgcggtgaagcgggggatgcagtcggccatcgccagggagaagcgcatcggcgcctccatcgtccgcctcttcttccacgactgcttcgtccaagtaaccatcctctacctagtacaagtatacgcacgcacacattgatcatgctatataattaatctgtgcatgtatgaatgccagggttgcgacgcatcgctgctgctggacgacacggcgagcttcaccggcgagaagacggcgaaccccaacaacggctccgtcagagggtttgaggtgatcgacgccatcaagtcggcggtggagaccatctgccccggcgtcgtctcctgcgccgacatcctcgccatcgctgccagggacagcgtcgccatcgtacgtactccacttcgatcgatcgatctctatatactgaaactgaaactgaaaatggtacatatatgcagctgggtgggccgagctgggacgtgaaggttggtcggagagactcgcgcacggcgagcctcagcggcgcaaacaacaacatcccgccgccgacgtcgggactcgccaacctcacctccctcttcgccgcgcaggccctctcccagaaggacatggtcgccctctccggtaaccactgctagctgttactagtatttttgtttccactgagcattcaattaagtctagcttgttaactaacaaaaataaaaatttataaatgcaagcatcaattcattcacataactaaacgaacaagcatcgtcaactgttccatttttcaatcccttctagaagggaaaaggaaaaagggttcggaacaacttcatttcacactctgtttctgaatagtatcagtagcttttgtgtcgatctgcacacagctgggtaccacgcaaacggaacagatagctacgttttcaatttgcagcatacttggcattctccaagcctatactactttgacaagatgattaatttacgaaagtctgcataaacatctcagattcaactagcagtataacctctgactctgagtccccacttgtctcccctgtttattttttttaagaaaaagaaagattcagtgtcatctgtttaacatgcaatttgttaacttacttgttaaccaaacaaaacgtagtagcaaagtcggtaagcatggttgtcgatgggatggcataaagttactttgaggtaatgacgtactcctaaccgtgtctgcgttgtcggtatgggttaatttgcttctgaagaaatagtacaggcttttctttttaaggttcagtaatcagtacagactgctgccgatcgaaaagatcagtctgccatcacatgccgtgaattggctaaatcacaaaagcaaaaattaatttgtttcctaaaaaaccaaaagcaagaataaagttgataaaccctggctacccatcaagttattaattacaaccacagataatgttccttttgttctgtttgttaataaatgtgatcgaataatgttgattttttttctgtattccaattaatattagggaatgatgaagaacctatactttctttctaaaataaaaatattcacaatactatacaaaagcaaagacctaaaagctcagctcttaaatattctaaattattcttacacatatgctcagctcttaagtatagcatgatttcatattgtacctgcaggatctcacaccattgggcaagcacgatgcacaaacttcagagctcatatatacaacgaaaccaacatcgacagtggctttgcgatgaggaggcaatcaggttgccctcgtaactcaggatcaggtgacaataacctggcacctctggatcttcagacgccaaccgtgttcgagaacaactactacaagaacctcgtcgtcaagaaggggctcctgcattctgatcaggagctcttcaatggcggagccactgatgctcttgttcagtcttacataagtagccagagcacattctttgcggattttgtgacgggcatgatcaagatgggggacatcacaccgttgacgggatcaaacggggagatcaggaagaactgcagaaggattaattaagaaatgattaagaggcaagctgtgttcatgtccagtagtgcaaacgcacattgtgtcgtgtttcttgcggatatgtttgcaacatctcccttaatttctttcatgtgtttatgtatcattatgttcgtttgaaataatgaaagtactatgtgatttgttttaatgtaacatatgcttagtttatgtggtggtaaatgatcggttaggtttggactatagcacgatggaacttgactgaaagactgaaaaggagtttataactaaaaaatgaattggatgagtaaaacgaaaggcaaaatacattcaaaagaaaaaaaaagaaaagaaaggcaaagtcaatatcgactcttgtacgtggaagtatagtgtgtgtttaacttgagtaggaattgatgtgacaagctaacaaaatttatggacctttctatcatcatcatatacgcggttgatctttttgttgatggtgtagttggttcagctagttaaatagtaatcacaaaactcgaaacaagagcgtcgatatgtccgagtggttaaggagacagacttgaaatctgttgggcttcgcccgcgcaggttcgaaccctgctgtcgacgaccatttttttttaggctttttaatctttggaaaaggtacaccgaaggtcccccaacagcccaacttatcatcgaattaaaaaatagtccccctaccgcaaaatcggatacaacgccaacaacccaacttatcatcgaataaaaaaaatagtcccccaaccgtaaaaccggatacaaagcatcccttaatttacaaaacaactgcaaactaggtctctcgacggcctagaccgacgtggcagctgacttagcgtgtgacccgcgtgggccccacatgtcagcctctacttcccctcctcccctttcaacgggcgataaggctgggtacggtgggcgcggcggacggccaacgcggaggagctgggcggcaccgacggcgggggaggaactggacggcgtcggcgatgggggaggagctgggtggcggcggcgcggaagaactgagcggcgggggaggagctgtgagccggcgggcgtgtgggggaggagctgcgcgcgtgggccgccatcgtcgtcgtcgtcgtcgtccgccaccgccaccgcctcgccggccttctccgcccgccgcaacttcgccggcttcacgcgccgtcaccccactccgctcgccgtcgtgcttgagctcgtcttcttctatctcccccgtgctcccgccgcccgacgccgccgaggtgctcgcctcgcgcctcggcatccacccctccctccgcaccctcaacttcgcgatgcgctccgcgccgcgcaccccgacctcgtcttccgcctcttcttccccgacttcctaggcgacgccgccaccgtagccttcctcgtgcgtgcttgctcctccgaaggctgcccgctcgacggcctccgcctccagcgggtgaggagctgggcggcgttggggaggacgagagagcagtcgagcgacaggaacgcgtcgatggcggcggcggcggcgcggatgtgccactcgatggccttgcttggttggtcgacgccgaggcggtcctggatgtcgtagaacgcgatggccatcggcaccgatagcctgacgcagcggtcgcggagcccccgcgacgtcaccaccttgctgtgcttgtccttctcgcccgccaccacgcacgccacccggctcgtccgccatgctgctgccatggccgccgacgccgacgagcgtgcagcacgggcgctagcgctccttgccgacgacgacctcctccatggccgacgcttgcgctagctcatgcgaaatccgcctcggcttcgtctgctcgattttaatggaggctgctttagcacctcgtgcttctgccgtcgcctccctccccttctcccgtgtcgccgccgccgagttgctgtcgccgcatcgctggccggctgtccgacctccttgtcccggtgacctcctccccaccgccggccggcttgcccagaggagatgagtgagagagagagaggaggaggaagggagaggaggggaaagaaagagatgatgacgtggcgtcctgacatatggggccaatgtgggtctcacgctgactcacccgccggttttgtaagttaagggacgttatatatctagttttgtggttgtgggacgattttgtaattcgatgacaagttgagggaccttcggtgtactttttccttaatctttttattccttcagtatcaatgggcctttgttttttactcactccttgagtgggccggccttaatttctattgggccgcatctcatttcatacagctgaagcccacagttgtgtcgaaatccaacttccaaccgcatgagctaatccaatcactgttcggcgttctaatctgttttttttctccttttcctccacgaattcataccctccacgcaacggaaaccacaccacaccccgatacgactaggatttcctctctgcttcttcgatccccttgttattacaatcgatcctgcaagagaagcactctataattgcagcggcaagatcgattttttacaaaccaacaaagcagaaaggattcacgcgccgccgcttgcgatttgtgagttgtctttcccctttcgattccccctcctctcttccttcccctatcgtcaactagctcgagttgcttgcttgttccctctgctgcttcctctcttgtgtggattggattcccggcctggccctttctttttcctcttctctcctagattagaatcgtcgcgatttgattcctcaatctctcgatttggccgccctatctgttattaatccccaattgttcttcacacacatactcaattgcaggtcaattgcagccagaaagaggcgatggatttcaaagtcgcttcctttctcctactcctgttaatcgtcacctgcggagctgctcaaggtcaaggcaatgattttggtacgccctaatccaacaccttcccttcctcccttacctatgctcctcctggctcctgcatgcagtttggaaccaacatgtcaaacattctcaagggaaaattggacaagttttttattgtgcgtagtaaagtatcattctaaaatttatatatatgggcagctgctgtgggtattttatttggttgaaattcaacttgaggataacctgctactgatcctcttagcttggttattcattgcctgcaaaatgcatccattatttttgttcaagctttgccatgcactcgttacaaagtcccatgttcatctcacaatggtacacaatgataaacattgtggtcacaataaattattgatagagaaaaaggaaaaagaggatagcctaatctaattgttggcatctctgatttctctcgtatgttaaacctaggctagttattatttatttatgctagttatggtatgttttaacagtgttacttttttaaaaatttctgcaacaccaattattggttatgggtacatacttctcataaaaaggattatggatacatacaacaaggctagagatgcaatatcacataatgtgacaggaattaactggttccagcttcacagaaatgagaatgtgcttcccaattattggcaatggtttacttttacttcttaatatgtaatagaaattattattttttgctgacgaccttcatgatattttattcaggcaaaattagttatgtagcaccgaaatttcacgatcttattttcattctatttatttgtttgcaccgaaattaccttttgtttattattcattccttctcagttgtccttgatctaaaaacaactgaggtcggggaagatgctagcccaatgtacaaggagcaaattgcgttgaccaagatacctgtaactcttctgaggagcaagcacagctcactgtgctcggcttgtgaaaacatcacaagcgaagcagtcaactttcttagtgagaaacaaatacaagataagataatgactatccttcatgacacttgttctcagacattctcctttgagcaaaaggtaattgttcccttttgatttggtttgttagatcttatatattgtgtctgtatattagaaatacaaccaatttgatcaaaagatatgacacatgtaggaatttgattcccttactaaagtaccaagaaggaaagatattccatgaacaatagtagtttaacatgatcactttgtatgtctgcagtgtcttgagactatggactcctatgcaactctcgtctttgcaaaaattgctgagattaagccagatgagttctgcaaacagtatggcctctgcagggacatggctcttttatcagctatgaaaagtgaaagcacatgcgtattctgccaccacatcatcgatgaaattatgtccaaactgaaagatcctgatgcagaggtgattgattttccctcgattacacaattacatcgataaataatgagcatacatttggaccctaacatcttgtgtgtgatgtttgcagtttgagatcattcaattactactcaaggaatgcaacaagattgaaggtcatcagcagcaggtaaaacatttgaagtagtttgtaaaaattctctctctgacccaataatgcttgtttggttaatgtacatgtctacatgagtgatatgggttgatgaaatcgtacgttttcttgttgacagtgcaagaggatggttctgcagtacgtccctctggttctagtgaacggtgagaagttcctggagaagaacgatgtgtgcgcaatgatccaagcctgtgatgcaggcaagaggaaggcattcaacttgttctctgcacggaaattggtgcgtgacgcatgaagtagtaggaagcgtgcatacacgaatcaagttgtggtaggcatggagaagacgaagaagtgatggcagcttgtacatatggttgttattaatgatataggcaatactactctgtgaaggggataatccgataattgtatgcacacatttgaactgtttgtctgatagtaatggctatacttacttttgtgtgcttgcttctggggagtatggagcagtatactccactatttaagtagtactacctcagtttcatattataaaactttctagcattacacacattcatatatatgttaatgaatctaaacacatatatacctagattcattaacatatatatgcatatgggcaatgctagaaagtcttataatatgaaactatatatgtctagattcattaacatatatatgaatgtgtgtaatgctagaaagttttataatatgaaacggagggagtactgaattgagcgagaatttgtacacgaccagaagaaactaaatttacatagcacatacccagagatgttgatctgcactggctaggagcaaattaactaaactgtgcaaagcttggatccggccacgaacataacagactattgatctctctttacgagaaaatctatcgtgtaccactgactttgctctagatccacaatctgccactgactttgttcagttctatagtacgccatcgccttttgtttaacttctacaatttaccatcgccgtctagttagtctccgttagtaccatacaattgtgttctaatgacgaaaatacccctaagatgaaaactttcagaatttggccgaaaattcacaaataccatactgtaacatgtcacagaggttgcccggctcatattcttctatgataatacatgattatctaagcatacatatgattgttttagcaacttgtttgacggcatgttgcacttacaaaaataaatctaatcacacgcttattttatattatgtattgactaatatattacttcctccgtttcacaatgtaagtcattctagcatttcctatatttatatagttgttaattaacaactatataaatatgagaaatgctagaatgacttacatttgaaacggagggagtagaattctagcaatacatacgtatgtatgcggccgccacgggcttgtggaccacggacacagcctgcaatattgcacgtgtacttgtggccgtaacagaggcggacatgaaaatatattgggttaatttttttattctagaggtattttggtcattagtacgaaattgtaccgtgctaacggagacttaactgacggcgatggtaaattatataagttaaacaaaagacgctggtatattataaaattaaactaagtcagtggcagattattgaactagactaaagtcaatggtatataagtagattctctcatttatttatacatttacactgttcaaaatcatcgtcattgtcgttgttttgttgttgccagtttagtcaattacactctactgatactgataccagaatgctttttttttttttttgatttgacaatacgaacgaacagctcctctctcgtcaaaatgaaaagaaagaaagaaaaaaacatatatataagacgtcaaacctcggaatcgggggattgtgtttgtgagtgacttgtttgattagatttgccgggacgggaggacaagcagagtagacgacggagtttggattggaaatttggaatgacgacgacgacgacgactcggcaccgcctccgggatgcggcggtggcgtcagtggtggccgtcctcccccacgagatctccccgctcatcagcgccgcctccaccttcttcttcgtacgtatcgtatcgtatgcttccctctctctcttgcttcttgcttcttctcatttcatttccttgattcatctatggctttatggctgtgcagatcctcagcgcctactttgccgtgctgccgctgcgggacgagggggccatctccctgggcctctcctccctcccgggtctcttcgccggctccctcctcctcacccttgtcgccgcccccgtcgcctccctcgccttctccctcccatccatccccaaacccagggtccgtattcttcctcacttacattatctatttttattagcttgctttttatgccacaagccaaccggttagatttcttagatgcaaacttcggtaatgctttgtacctttacggacgcaatttttacacacttattgtagtcaatcacgcaaaaacaactgcattacattctcacaatcatgaaaactctttttaacgaatatgaaaacttgaattggttcagatgaaaacttgctatttgctctaagttcagatgtaggcacacttcttaaacctgaaggaatgcaattcttaactcaactcaattatttcaatgattgtattgttcttgctttagtgtttcactagttaaaagtagtatacctttattttgtttcatttgatcaagatgctagctttgccttctgtatgactggaacagttgatgaattactttagagtaccatgttaatcattgaatttgtgttcttttgtctgttgagaagaaaaaaataattctggtctgtgttgtgcgagcttctgtatatttaccacaggaatgcaataatttgggtatttcttcagtaaacccctttaatttaagatggttcagctagcttttccttgactaaataccagattcttgtcctcagctttcttccgtttgtttatcgatgatgaggtctacattttaagaatttgaaatattctgaagaacaatacaggctacaaatatccttgcagttatttcttattcactgacatcagctaattttatcatctatattcaggctttggttttcatacacagattcttcagtttatcccttcttgtcttttttgttctttggtttgcctctacccctgggcattccccttctatctcccaggtaatatacattgctattaatcttggtttttgcaattatgtacaatatagttattaaatttcaatgaaattgtgaagggaaaaaattaccgtaccatgaattttcactcagctgcttcgtctgtccccctgaatttcctaatctaagaatcattcctcacacaaaaaaaaacttatttttctctgtttcttggtgtacaaatcaagtcaagcgaagatgcttcaaataaacctcctggatggggaaaccacagttggttctacatattagtgagaataagcttgtttctttgggtacgacttttcatgctacatgggcatgttcatttattctaattctcaaactgattattgatttgagtaattatgtctatttgaaggtttccttgcttaatctcattgcaatatcatcaacatgggcaagagtaattgatatcatggatagtgaggtatcatttacagctgctctaaaacttattggcaaattacctacaactgattacttttgcttctgatattcttattactcttttaattcagtcaggttcaagattgtttggttttattggggccggtgctacgctcgggcaactttttggttcattatttgctgcaactatggcattgctagggccctgtacgtatgattttctgaacaagaaaacaaattcctgatttaaaatttctagaatgcattttcacatctccgaaatgtgcctcagttctgctcctgttttcatccctattgatggaacttgctgcattgtcatcgaaaggaatctgcactgatgatctacacggctcaacggaattgtcttcaacaatgtatgtatccttctgacaatggtttgcaatatcctgacttatctatgactgttacgttgaccggggcaaaacatatcattgatacggactaatgtccagttttactttcatttttaattcttaaacttaagtcacattatagtttgtaaattctttcttttataatcaacctcaaaacccttgaatggattttgttagtttgaacgtctcatagcaaaacagatagattgcctgctgattatttgatttgatattttggtgattccttgttttgcttatgattgcatcccaatctattaccaactgcagagccgaacaaagccaaaatacagaggctgatgatgaaatgtcttcactggtcacttcacaaggattaccgtcccaagtctccgaatctcagaaaaccaaacctgagatttttgtgatgtttgaaggtttctggctgattgcacgctctccctatctgatgtatatatctctatttttgtggctgagcgctgttgtgtcgtccttcttttacttccaggtatggttcttctatatatgtctattgacatgaataagttccacatcactgtgaccatgttgtttccttagttacatcgttggaaggatccaccatttaccatccatttgaattctacctgatttccagaaagtgacgatagttgctacaacaatatcaagcccaactgccagaagaagaacctttgcactcataaacagctttattgccgtctttattcttgcagggcaactcactttgacggtatttatccatctccagattgtccttggttttattattaatagtacccctttttgcagtatgaataaatcttaacctgacaaattgtcctgcacaggaccactatgacatgcgtcatggtgaagtagctttatatgttgcaaactgaacattttgactcattaggctctccctcctttttgttttggtggggaaggctcaattagaaagctcagcttcatttctaacatctatttgatcatgcatgcgtatccccaaagtgcttatttttctcatacaacattgaacttattatttagtgatatcttcctttgttcttttgaagacaagaatgtgtcaaaatttcaatagattttccttctgaattctgatgtaattctgatacacgcatatgttcctcagtttgacaattaagagataattcgcatctcatatcgtcaaaagaagggaagagttcattacgatgtagtcaaaatgatgtattgcatgtctacatcactacattccaagtactgagcaacttattagcattggcaaaaacaatataatttaaaaatgtcctaaccaacaagttgttagaaaactgcaatgactgaggaagttttgctaattttgtttcttctttcatttcgaaaaaaaaaatctcgaaatttcgttactgattcctgttatgaattaaacaactatttcagggtcgtatccttaccatagctggtgtaacagttgctatctgtgcatccccattcattgccacattgaatatggttgcccttgctctatggccaacttgggttgctgttgctgtcactgaaacaattcgaaaggtacatatagaacagggagctatgattgaacttttggtgtaataaccgttttttaccattaaatgatactttccaaaagtcacatacaaataaatatgcatatctagatgtgagcattcattaccacctggatattcatatttgagagctgagacacattaatttgaatttaatctggaattttcgcatgtcaaggatatctaatcactcataatccatttttgtgcaatttagggttttcgatgttagctctaaattgctgctttcccaatctcatcttttattctctgtaggtaactacttatgttttgacaagacctggaagggaattgctattcacagttgtctcacaggatgagaagtacaaagccaaggtaaaagatatgtcattacctgtttgagtttagtgaccaataagaaacgaaataatacatttgcttgaatgcaatagatgagttgtgtcagtagtacacattatcatgcaccacagagaactaacaaaatttctaatccctggattgctcatcaattttcatcaatttgcattgtgttatagatgtctccggtagatatcaagcatatacacatcaacatatgtgatgtgtttttgttctcaaccctggttcaaggtggtcgtaggcatggcgcaagaggccgccctttggcatcttgcccatcctctgtcgccaacgcttccttcttagcgtgctaggtcatttggtcgtcccattgtaatcgcgagaataggattaagtccttgttttcctctccccccccccccttttcttcccaaaccccccttcttttctttgttttgccttttgtgtaaattttattcctcttaatacagaagtccgcaatccttttgcgtattccccaaaaaataaaatggctctgttttgaattcacctaggcacatcagagttagccttgtctcttaaaatggagagtgggtgattagcagcgaaatttgaagttgaatttccagattaagtaggctattgtagaaaaatagtcagtttttcagttgccttcttagtcttatatttaaaatcatcttaaatacgtgttcacaaatgtatgacccatttcagttttgactatttaactaatgaatatgattctaataggtttgatagatgttgttgttcaaaggcttggtgatgcaacagctgccggaatatacagtttgttgttcagcagccttgagaagaaggcatccatggtcaccctctacgcgttgccggtatgtgtcatggtttcagtcattgtatttgtaccccatcaccacataagattgcatatatcactgaaaaactaattttctcccttctgataacagctctgcttcgtgtggcttctaacggcatttcatttgggccggctccagacaaaccttgtcaaggttcaggttgcttcttttgcatcttcgattcctagataggtacttggttacctatagtaaggtgattgtagcttacttaattcacttgtagtgttcttaacacaaatgcttgatacggggaactgctgcacgtacccacagaaatgcatactgtaagtaaccagagtgcagaaagaaatatggcacaacgacaagtcaggttgccagtggcgttgatactccttttgccttgtaagactaatagaagatttatcgagaaacatttttgttttcaatatagcattaggattactacaggaaggatacaacatgcatagaggaagaaggaatactgtatgactagatgaataacagatgagtatgtgatctctgcgtctattgttagaaacaatactgtcttgcagacggcagtgtatgtgacttgttacattgctatttgctaatgagaaaacaaggctgaatttgttgggcatttttgcttcttttgggaactcaatatgatcttcaggcatgtacaatttactgttaaattgatactatagaagtgctctcatggcaccttctgataacttattgatcatgttcttcgattttcatactgcctgattaatttctggaacacacacacagatacacgcatgtaaagacaagctgcatttcttattactgtattttctttgcaaagcgagagcccaagattgaatggtggagagtagaatgaatattgccttgcgtgatctttgtgctaatcctttttaaaattgcgcgggaagaatccccgcgtgagttataaaacgatacgcgcgccacgccggatcatcaagctgcgagcctctcgtgcttaatactagtcactaattaagtgcttaagctagtgcttaacactagctagctaattgctcatcattgatcaagcgaagaagaagatgatggcgtcaccggcatccaagcgcgccgccgtcgtcttgctcgtcgtggttgcttctgtgatgatggcgacgccgtcggaagcgatgagaccgaggaggaaggcagccgccgccttggtctcgtcggaggcccgcgtcctccgcttccccggcttcccgggaagccgccagcgcttcccggggttccccggagccaggccgtcgccgcgcgcggcgccgccgaagccatcaccgccgccgtcgtcgtcgtcagtccccgccctgccactgtctccacccgccggcggctcgctgccgccgccgtgcgggaggtcgtcgcagacgacgccgccgggcaccttgatcccgggcatgccgggcagcggcggcggcggttcgtcgccgacggactgcgtgacgtcgctggcggggctgacgacgtgcgcgtcgttcctgacgggggcggaggcggagaccccgacgccggcgagcgagtgctgcggcgggctggggatgttcctgaacagcacggcggcggcggcggagggtgaccggacgttgaggtgcctgtgcccggtgatcctcggcgacgtcaaccggatgctgcccaagccggtggatcccgtgcggatgatgtacctccccatcgcctgcggcctcgtcctcccgcctcaagtcctcttcatctgcttcagtcagttcttaccttcacttgcactcattgattcatcattctcaaattctatcagattaattcctttctgacgaaaaactgatatattattgattctttgattgattatggcagccgggcagcctaacccaccggtgctctcgcgtgttcctgtctcctggtcgacgctctcttcaggttcttgctgaatttgctctcttggtttcctgttaattcacacattgttcaatctggatttttttgcattctaatgtttttgttgttgttgttttcttaatatgcagcaatgtcgccttgatggttcacgataagatcgattcaaaggttactgatgattcagtgtctcactttaagcttacaaagctgttgttggtcttgagtgttgtgttttcagaaacagctgagcctgtacttcagtaaaccacagagttagctaccatactgctatataaccacataagattggttggtacatcatgcgtggtgtaagagcttatttcttatttatagggaaaaaatatgtaagtcatttcatcaaatattctttctccacaactaaagagtgtgaaatttgggacaataaggaaactgaaaatacaggtcaactgcacagcaaaattccagtaggaatggaatgctttgtctacaacattacttgttataataatcaaattgacaggaaaacataaatatcagtaaacttaaacatccgcagtcaacctctgaacatgcatacatcacatttggcgatgatatgatgaattttcactttcagcaatagtatgtgtttcactttcaacagcaatagccgtacacatgagcaaagtgacagtctcaagacggccttattcgatactctgaatttacaaggcactatgtgcgtgtgggtttcccaattacacaactggtcgccattaagactacgcaattgcaaccaagaaccaagatcatccagaccagcaatgccatcttctggcacctccttattttgtcattcttattattatcagatacctactaaattagatcttgtctgagctttattctgaggataggtgaatcaaaaccttttcatctgcaccagctagcaatctggcagcaaagaagaatactactagaggagctaaggttctgctgttgtctgttccataatgaattcaatttgcgcagatttgtttatttagttctatcatatgtttactgcatttcctgacctgtaggcttgaatagaaggatatggagaagttttcatttacttctcaagcctcccgaagagcacggacccgttcttgaattaacctcctctcgagtcagcaatgccctcaaaagcatgctctggcagactgtcaaaagactctttatgtggatcattcttagcaagatcataagttgcagcacggatcgctctcttattgggtccacagggccttttagaagttagtttctcataagctgtcttaagctgcaagcaaaagataaatgctaagaatgtggcctggcttataaccctgacaagttaagaattcaagaagatgaaacctacattcatattctcgaaccaaaacatgtaagcaattgcaactgcaggtgctctcccaagtccagcagtgcaatggacatagacacgccctttgccttccgatatagcccattctagtgatgcgactgctttgggcaattgagtcctcaacgaatctggatcgaagtccactggctgaaaccaaataaatgcaagcttttaactcactttcataatcaaacttgcactaacttcattggaattaattatttcctagacttttatagtttacttttggcactcaaagatagcagcttactgttacttttacgctcttctgatgtacagtgttggaggtcaatattttatacttttcacctatcttgtcatatagtggaaatatgaaagcttgctaggtggatatgaattgtgattatctcaaatgaattataaagtccaatgcaaaggacaaggccagctgtgctcattgcagtaaaagaacaattaccatattttctcattaaacaacttcttagttcatctgtcatgtttatatgaataaaaaaaatgcaccggtgcaaaagaccagacactataaaagttaatcaagcttgaaagtaggaatgtaaagtgctcattttttgtttgaagcagaatttcataagcaaattaagcatgatactagctcagtacataaataagcgtctcaccggtcttctgatgtgttttatgccaagttctttgcacctattgacaacagtttggaaatcaatgccccaatattcaatgtccttgtcctgctgtaagcaaagaataaaggctactttctcctcatcttttaagtgatcaatatcttctggtttttgaggttgcgagccaacaatcaagctatcactaatgatagcataattcatacctacattccaggagtaacagagtgagaattgcataaacacaaagtagggattttgttttgctcctgttaattgctgtatctatttcagtgacttataaaaataattaaagcaagctgtgcaattcaattaagtcatgacaaagtatgacaccaatgtttatctccacatcaaattgctatatcttcagcaagaactttcacagaacttatcaaagaatggatatttcacaaacatttaatgtacaaaagataagggcctctaccatcttaaaaagatacatttttcacatcatggtgtaactttcattataatgtaagtgattctcaaatagttatgtttagggtaacacagtgaaactgccatatgaagataataaaatactaaaccaccaaagccctcaagcccaccaaaaatgcagaagtaatttccatgcagatcaacaatgcagatttgatcactatttgaggggtggtagatataagaatgcaagccctgtggagccctgttcccccaaaacaaaaacacttcatgtggcaggctattagagataggattcaatcagctgcaaaactgaagaacataagttgggtaggatcagagttttgtcaactgtgtggtgaaattgagacctctgtgcacatttgctttagatgcccaaagaatacctcgagatttttaggatttctttaccatggtcattgtgaatgatagctccaaagaaaaactagagttgaatacatgttactggcggctgagagtttgttgctgtggtctgtcagaattgatatgatttttagaagcaaactcatcttgacagcactaacaattcctgttcgcattatttgtatgttgttacagtggaagccacttctgaaacctgaagaacttccaaccttggagacattggtgggtgctcggtaacaggatgtttagcttctttttacataccatggtttttgacaatcatcacaaaccattaccgactactaacatttgtagcaaacttagtactgaacatgaaccatgatgcatcataagcaacagaacaccaaatctagacttgacctacctcccacaatcttctttttcttttctttttctaatagaaatagaaaacctcccacagtgttctcactgatttgacatttccccaggcctgactcaggaaagaacccaaatctcctcggacaaggttgaatctttaccaaaatgttgattgagtccagtgtagggctcaacatccacacaagaaaaccttcatgagtcatgacacagatacgcattgatccagcagttatagtatctcaggctcatggatgggacaatcgaacatcaactgatataaacgcactaatgtagtaatgctataacaagacaacgcgtgcacggaccaaatcaatcatttcggcgggacgaaattaacaatccccatcccaaaaatagaatcattatctaggtaggatcaaaagcgcgtagacgaggaaaaaaatgattggtacggacctaaatcatggtggtattcgtagggattgcgcatcattctcttcatggcggtgttgtagtcctccatcctagtgctccccgtcgtggaggagcggcacaggaaaaccccagaggaactccgccgccgttggctcctgcttcctccggcggccatcctgctcctagcagcgacggcgccgcgcgctgggagtcccggggtggccggaaaacacggggcggtggccatggcggccatgtttgcaggatgtggatgtggcaatgcgacgatgcgagcgaggcaagcagaaaggagaccggccggtggtggtggtggtggtggtgggattcccggcggatttggcgcggcttctggatcccggcgacttgggacgatgcacactcgtcttattaatcacgtaggtatctgaaaagcaagaaatcaaagagcgtttgagcaccaggagaagagaaccttgttgtctagcctttttgcaaaaatcaaagagaatgtgacaatgttgatgtttgccaaagagaagcacttgctatagtttaaccttatgtagtcactcttttttttctcttttttttattccaggatgtaatccttttttagatatattcgatgagatgagcattgtctcatacggttcattggaaaaacgtttaatcttaaccatccatttattttaccttattttatcttaaccctccattcgttttcatgtcaagaccataaatgggaagaggtaagatggagttgcgtctagatgctctatcccatgctttgcaagaagagaagacaaaaaatagaaaggcaaataagacaagaaaaacaaaaagagggggcaaggcaacccgaaggctaagctagggtttttgccatggctacatccggactcctgagctcccccttctccattccgatctttactaatcctgcctgaaggataatatctctgatacgcaccaaaaagttgtctttaaataggttccctctcataactagtttaggtttgattatatcgttagtgcatactatgtgtatctaagtaatcaaaagagtataatcttcttatgtatacatttataatcgattatatcgttgatatatgtttttagtgtgcagccacacgatttcacaacatcactacctaaattttatttcattttggtttgcttttgcttattgatagtgctaattgtaagcataagctttctctatagaaaacacataccacaataaaaaaagagacactttcatgagcatgagaaaacttcatgttgaagaaactatgagtgtgtgataggcaaggtggcaattctaatataacaaatggttccatttcaaaacctaggacaatatactggacaataaaactaaatactagactctctttcttgaaagcaacccatagtatttgacaaacactttgatttaacaatggaaagtgaacattttgtgtacacttttagaaagcatgtgcttaattactcaataggtgttataatacattaatactatggatgttaatataattaaaataatatttaggaccatggtagtatgatacacttaaaaatatgatgatatccaaatattgcatttataaacaagatcttaactggcagccttatttctttcttggtgtaggagatgaatcctatttttatatattcttttcaccgacttgtaatacactactatgtaaatactatactcttaaattaagagaagaacaaacatgtactcacttttagttatacacatagggagaactacaatacttcaccattcttttcttgatctcttaaaaaaggaagctctataaagaaagtaaagctaaggataagggtaaaaagaaagtactatgatgaatagcttggaataacctagtatatgctaatattagttgaattgaaaacaactactaaaacaagaataaaatgttgcattaatagtcaaaggctgagacaaagcacataagcatactctagaatatacaaaacttttaggaaatctgaaaaattttcaatacaatttctatgttaaaaaaattatatattgtgttttctttaattgtgtagtactagtagtcggagtaaggagaagcaaaacatgaggagggagcgacacaaaattaactagaggaaagaaagcaaaaatggcaaagaaggaagaaaaaagaaaagggaagaagaagaagagacgctggcagcagctgcgtcgagacgctttatcccttgcctcgcgagaacagaaaaaagaaaaaaaaagaagaggaagaggggaaggcaatccgaaaggaaattaggctagggttttcgccatggctaccacccaccacctcgagctccccctctccattcccaatctctccgactcctcctaattaatcccgtattcccaccccccaagccaaggacagcatctcgcatccgcgtccttcaattgatttgattgggttccccccctccatttcagggtttcgtttcgcatcgcagcaatcttcccgacccagcaagcttcttcttcccttgggtccgttagggtttgagattgagaggggcggcgctggcgatcgagattggtacggcggcggaggcggaggtgggcggataatgtgtatactgtgcgccgtgcaacggtggtcgcggcgcgtcgcaccatgctgccatggctggtgctcccgctcatcctcctctgggcgctctcccagctcctccccgccgcctaccgcttcgaggtcacctcccctcgcctcgcctgcgtctccgtcctcctcctcaccctcttctggtacgagatcctcctcccccgcctctccctctggcgcgcccgccgctccgcccgcctccgcgaggagcgccgcgcccacgccctccagctccacaagctccgcaagaccgccacccgccgctgccgcaactgcaacaacccctaccgcgaccagaaccccggcggcggcaagttcatgtgctcctactgcggccatgtctccaagcgccccgtcctcgacctcggccctgccgggaccctccccaccggctggccctgcacccaggattggccaaatgctgccggtgaccctgcctactggctcgacctccgctgctcctccgataacctgtactcggggttctcgtggcgcttgttctcttccttctgcgtcagcatgaggtggttctggagggaagtgctcagatttggctcctcgggggacggcgatggcttgggccgagatggtaaaagattagcaaaagaaggggagaacggagcaaaggctgaggagagcagagtcgagaaggcgaaaaggaaggcggaggagaagaggttggcgaggctggagaaggaaatgctagaggaggaggaacgcaagcaacgggaggagatggcaaagctcgtggaggagcggaggaggctaagggatgagaaagcagaggctgaagagagatccaaaggcgccacacctgttggggagaaggatcctcggaaggaagtggaacgtagacggcaggagaggaggaggaaggacgagaaggataagggatcaagcaagagcaattcagattgcgaggatatcgagagaagagtaaccagggaaggggagagaaagcgggattctgatagaagaaatgagccagagaagcgggatgcaacaagagttggcgctgagggtcataagccctataattttgatgctaacaaccagggtagtaagacagtacagagcaaggcaaagtactttggccgtatgacaggcggtctgttatcttcttcaagaggttttggtggcggttccttttttggtagaagtgctcagacctctgctcctcaagttaacaaggtgactaaaccgcttg

SEQ ID NO: 14358 - DNA, 1473 bp, Oryza sativa
cccgtgagtaacaaaggcattattaattgctgcagcagtctatctgttacgattacgacatgtgccattaattgttttcaccctgactatcgtcttacaaataccgtttgcatttttgttatgcttttatgcaggttagtccaaatgtgcagtcacagcctactggacttaaaaagtcatggcaccagctgtttagtcgctcagcatctgtgtcaccttgtcctgatgttcctgctacagcccgtgaaatgaacgggcaaccagaaccatatggagcacaaattagcaatgctcaaatcttcctatcgcagtatccccctctggacagtaaccctagttcaagccgctgtatgcaatttccaggtttcccaccagtgaatggagcacctgccaacatgtcactctctcattttccagctggacatatgccctactattgtgagccagaaccaacagtgtttgaagaaccagaacaatttgaggacccatgctatgatcctgatgcaattgcgttgcttgggccagtttcagagtccctagataactttcctctcgacttggatagcgggttcatctctagtgacatcaccaaggaaacacatgcgaagccttcaccaatcgaatctcctctttcaagatcacgtacattcgaggataatcctattaggcactcaactggaaaagggcctaatggttctattttgcctgaagctagcaatgaacatgggggcacatggcaaatgtggggcacgccattagttcaagaaagtttaggtctacgaggtcctcagactgagtggctcctaccaaacacaaatcaatttaaccatggtgccagtcatttgaatggtggaacaagaagctcagtgggttctggtttggatgacaatgatttatggctgcagaaagcgcctttccagcaaatgcctcttgatacaaggagtctgttcctttcacatgatgtctcagagaatgctatacacaacgatttggattttggatcaccaaacaaatcagcccgtttgcaccccattgggccacctggtcattcttggtccaagtaagtatgttgtgacattcttgtaccgctttcagtattttctgcggcgatgaagcatttgattccattatagacaacaatttgataaccttggtttgagctagaaacatggtcataacttacaacagaattaccctaccccatactttgattatgtgagcataattttcatttaggtcataaaaaatcattactaatgtagcttcatgtatcaatacacataaggaccaaatgagatcaaattcacatagtattcttacaaggaataatcatatgccataggggactcctaaatttcttttgtcataatgactaggatgggtgctaccactttatctataaaaatggggcaagagtgataccagttaagagcaaacaatacactctgaatctccaatttagaaggaatcaaa

SEQ ID NO: 14359 - DNA, 953 bp, Oryza sativa
cgcaccccaagaggcggcggtcggcaagaaagggggacgagaaaaaaaggaaggaaggagagatcctcaccggaagcggcggccgacgcggaggaagaggacggcgacgacgattgcccaatggcggcttgcgaggacggagggcggacggggtcgcccttgaccttccgaaggagaagagggagttcgggagaggaggaccgatgcggggtgactggaaacgaaggccgatggcgatgacaagaggtagagctcaccggcgaccgaggaaggaggagctccggcggatttccggcgaagaggggcggcggccgaggtcctcctcgtccttgcggagctgagggaggcaacggcgcggcaacccctagggcggcagtagcaggcggctggaggcggtgaatggcggtggtttcggcttgcacggtgggaatggtgctgcgggggtggaaggagaggacggagcggtggacgaggtgcgcacggcggctgcggtgctggggagggcgacggcgcagtgcggggtggacgggagcggcggcgcggcgctgctggagttcgccggagagcggcggtgcgtgggctcggcgcggggagagcgagggagggcgcggcggcttggggaaaatgggggaaatggaggaggggaggccggggattgtttttataggggaggggaggcgggatcgagccgggagaggcggagtccgggcggcaaccgccggtggcgtgggccgcatcgtggggtgtgggtggcggttttggaggggagagatgggggaaaaccgcggcgtcgtggggcggctcgggcggccatggcggcagttggagctggaggaaggggatgacaggtggggtccacggggtcccacctgtcggggagagagggagggagagctggatgggggacgtaaaccagacttcacgagggagagaagaaacgggccgacggccca

SEQ ID NO: 14360 - DNA, 3390 bp, Oryza sativa
catctgctcatatacttactatgttccttgctagaatgcttgttgagttctttgaccagatgaatgtttgtagagttatccctagtaatttaaatcatgcaggtgatgtctaggtttaaatgattttcatcagatgtagaggtcacagccttccacatgccatttttcattgatatacccgtgtatcaacacattaagcaatactcttagtctccaagtcatgatatttctggcatatctcttcttctcagttttttttaacataaagctttgtccatatatatattgtatagcatcaaatagatgaatcttttgtgcacttctcttcagaatgtcgatgccagacaaaattctccttttgtattgatgctcatagcatagctatgatattttgagaattgagaacctattagtccagtttgatctaagaattatgttttgttgtttttcatattggcatttctgtgtggatgcagctttttaaagggctggacttggaggcactatctgttgaacttataatattagctatttggaacgaggcccttaatgcatgtagtttatccacggatgctacacatgatggattttttttgacccaagctcatgtcaatttcctgcctaagaatgaccatcgtccatctcgaaatgtagtacaaggattggatttcaccaggctcgtttctgtctgttcctgggctgaaagtggctttatcaaggcatatgaccgtgcagagaagatatcacataggttgcgggacaacaatggttagaacattggtatcttcatgtcctagtatagttttgtttttgttttttgctataacccttgtttgtttccagataacaccgagatgccagatgcagtggagatcatattccagacagctttaatatatggaacaactggtgctgtaagtatcagtattctaggttcttgtatggtttctttacagctttcgtttttccttgcacttcatggatttggggggaaagtgggggagtggtgtatgcatttcacgattttgggtaacaagcaatgatgctacaacggaaaggaaacctgtagacttgtagttaatgtgtaccagcccaggatccaccgctgtgcactggttgtccaggcggttggttagttattatcactccatattctgttagaccacgaacaaggggcagaaatgaatactattgttttaggctgtgtttgagggagagggaattgagaagattgggaagatacgcaaaacgaggtgagccattagcacatgattaattgagtattaactattttaaacttcaaaaatggactaatatgattttttaaagcaacttttctatagaaaatttttgcaaaaaatacaccgtttagtagtttgaaaagcgtgcgcgcgaaaaacgagatacaatctcccctttctcatgtgaacaaacgcagccttagactgcagtgggaaaaaaaaacaactttttttacaaatgagcaaaaatgtttatagccagccagtctctgctctctacttctattaaagcgctattcatgggggaaagcggtattcatggggaaaaaacttttatgaaagcactccaatcatgagttcaagacccttgctactctttttcctccatctgttttattttctggccaatacttaatcctgcccttgtaaacagtttgtaacattttgatgatagtaatatattcatatgggctggccttaggccttagccctttgtgaatctttcaaaaaatagcccccgtcattccctagctggggaactctaccatctttcataaaccctacttctaaaagttctccaacatgtttcttcacttagagctgatgtttataattcgtttgtgtataccttttcaggcaaaggaagttttgggataccaaaatagatcggtggcgctatactcaaaagcaatcatcttgctcacatttgtattgcaagaagcaactaatttgccactgaatccgccgttttccctttcatcatctgatcagcaacgtatccataggtacatagctaatttgaggagccatctatgcagtgcccagctgaccggacaacaggagagatatgtccagaactaacttttacatgggaaatattggtgcacaaagaagtgaaagttaaattgattccgtggtaaacttcaagcaagctttgttttgttccccacgagtattagtctttgcctccaacttttttttgtctaggagatgcttacttgggggaacttttgtaatgttttgtttgcatgatcatagtccatgtgttctttttgtatataatatataataacacttctaagttgtacagttatttgccatagaactgaaatgacctcttggctctgtatataagtagcatgtaaaaagagcaaatagttttttatttttccaagtcttaaaactgctttgcctacttattatggactgtccaaattctgaagtgagcattattttgagctatggtgtttggtgtatggaagctgacatgtacaagaatagcaggtaatattatctttaccattttacaatatattgctgagacatggattatagtttcagttttttctaggtaaatttcctgcttctgcttctgcttctcacaattggttgcagcttcatctttctaacttcgtacaagtaggtctgatgctttttttgccaaccatatgtccatatcccagacaagatgaaatggattgcatttccatcgctacatctgaaggtatgcggtcataaaactcttgtccttttccaagaattctcgtgagttatgatagaaagagatacaactatgacaaaagtgatggttccacctgatgtcataatactagctttcagtattaaaaaaaaaacctcactataaaataactcagatttactgaagaaaatttgatcaaatcatttccgactaatgcttccactatatagcatttcatttgtgcacatattctccatgtaaggttggagtatttctaatatactccctcattcccaaaatataaggatttttagagttggacactgttattaaaaaagtatgtagaattaaataggtggaatgattgtgattgaatgagaagtggaggtaggtggaaaaattgaatggtggagagttgtgattggttgggaagagaatgttggtggagaagttgttatattctgggacaaattttgaaagctaaaagttattatattttgggaattgggacgaagggagtatatgcttatgggggaagaattcttttttggctgaattcctccacttaagggtctgcattcttctggatattgttgagtaatatctaaattactgaaggtttaaatcatatagttgatcccatcagtttcgtttgtagtaagtgggaat

SEQ ID NO: 14361 - DNA, 3554 bp, Oryza sativa
caccccctctcccaaacaccacctacacctacaaccgagtactacaaaccagttctcgactagatcaagaattcaagatgtgtctgtaggtgttgttctgaagagctccaagcagtgttcttggtcgaggtttctgctccagaacttcttgtagtactcgtcgtaggtgtagttccggtagacggccggggagccatcggtgatgagcttctgagctgggccgatgagcacgtcgttgcaggggcacaggaacgatgcgacggacatcctcgctttgtcagagttgacgacagcacggtgccacacgctcttgtatcttccgttgcttagcgcctgcaatatatggaagttacagaggttacaaattctgctgcagagcagaaccaacacttggaaaatatttactgaataaaaaaaatacagttcagtgctttgcagttcagatttcctgcaaatatttaactactctttgcaaagtataaaccatggcaattggcatccgatagaagaatcttcatttatctactcctagagaaaaatctctgtgtgcgacgtatcacggtatcgatatcttttagtactatactcaatccattatatctggctgtttagggcctcttcgattcataaaaatgatagaatctggccaagtattttcatataatttaaattcctatgaattttttcctacatgtccctttgattatagaaaagaaaggaaactttctataagattgtattacttgtttcatatttcttaggaaaaatagcaatgaagtaattttcttttgtttttcccataacactatcaaaagactcatattgtttttcctgtgttttttatattcatgtaagatttgagaagtgttactaccctaattcttgcggtttttctattcttgtgtttttcctgtcctgcaaatcaaaaaggggtccttattggtctttttctattatcacagttattataatgttggtcaacagctcgtcttttttttttctgcaacaagaagtgtttgtcctaggtgacccaactatattctgccgcactagcattgtctgccacctagcctgatcgtttaccaacaagctatacctgaacacacaacagcttcaattgccatggttaaggctgtgtttagttccacgctaaaattagaaatttgactaaaattggaagtttgaagaaaaaaagttaaaagtttatgtgtgtatgaaagttttgatgtgatggaaaagttggaagtttgaagaaaaagttgagaactaaacaagcactaagattttcagcaatgttatctgaacacctaacctagtccattatatactctgataaaagaaactgatatatgcatcacctgtagctgatcaccaatgttgatcaccagcgcgttgggctgtggattcacggcgatccacctgccttccttgagaacttgcaggccggccacctgctggtccatgaggaggatggtgagggcgttcgggtcggtgtgcgccggcagtccgaacgtcagctctggctccgggcacttggggtagaagttcaccgccatatgctgctcctgctcaccaagaaccttcttgatgtagtcctgttccaagcccaggctctcggatatcgctccgtacagtctgaatccgagctcccgaacttctttgcagtatgtgcttatgatctccctgcaccatcgtcaaagtaaattcatcttatggttaataatataaggattaacttaggagataatgcgtgattaattcccttgatcttttgtcctactggtcctaagttcgaccttgtttttggataaacaaaggataactttcggcctgagcgaagaatgcgcacaagtgcacaaccatatttatgtatatcaggatttgaaataaagtcatccaccatcacaccaacgagctccaatgagctcccattgaaatccccatccaagcactgatgagaagggaggtcctacgaaaccgacactagtggattcttagcaggtgaaatgatcccagcactaggcatggatgcacgtgaccacttcatcgtttctgatgttgggatcttcatgtgattgtgtacatgactgatgcgatgcgactttttcagtaggggaaaaatgtggttctcattgcattgtcttactagtagctccaaccttctttctgtttcctcgatcgatgtctgtgctaaaattgcctcttacagtatatgagtgcagagacataaaaggcattgctagcatgacaggtcaacctcactagttcatgttgttacaatatataaaaatgatttgtaatactacttatcccatcaataatttattttaaatctcatcttacctctaagaggctctaactacctcctgcctcaagttgtttcttgttacacaaggggcaccaaagtgtttcctcctcaactttaatctttgctatacaatctagaaatccttatattttaaaatggagagaacaattgtctactgtctccaatatcaaacaacaagtgtaataatatagccaattattagtttcaaaaagtggcacatcatctacagctaatctaatactctatccatacaatacttacacacaaatatatactacacacaccgtcttatagcccgtgctactgttagctacacatatgtaacacacttttcttctctatctcctctcttctcatctctgcttaacctacccataaatcttatttgccatgaaaatcactttcatataattatatttttaatgccagagtctcttcttctcaactttaatctccactaagaaacctagagatgctcataatttaaaactgagaaagtagttgtttactacctccgatctcaaatagcaagtataatagtatagccatctattattagcttcaaaaattggcacatcatctacagctaatctaatagtctatctatataatagttacacataaatatttactacacacgatgtcttataactcatgctatagctggctacaaatctataacaccgctattattctcatcttctatcatctctccacctaatcacaaatttgatgtggcaatttttgaagcccgctacttcaattattgcactaactcaaataaatagcattatagaatgcgtgcagtcaaaccttgaatcttaaatgattaattcatgcaaaaatactaaaatttaacatgagaaaatggtgttggtagatttggcatggaaatctcttttatataattatatttttaatcctttttaccgatagtagaaccaatctaaatcgtatatcttattctaatccaatagatcatatctatttctactaccaaccaactactagtagttgtagcgcccgttccgtcgtggcgcctagcgggaaaactatctcttaaaaactctatttgcgaaatctgtttctttgcttgttgcctagtgtccgtgccatctcagatctcaaatccccgatctatcgtcgagttcaatcccgaatccaaaccttcccaaatcgatccctccgcaaaagtttatttttcctccctcgggttcgatgggcc

SEQ ID NO: 14362 - DNA, 8470 bp, Oryza sativa
tgtccaccggtggccgacctcgacctgctcgagagctgcgtcacgcaggcggcggcgccccccgtcacggctccggcgaccagggcggagcggaggaggaagaggccgaggccgcgcccgcgcgccgcgccgccgccggagaagcgcaagaagcccgaggaggccgagaaccagcggatgacgcacatcgccgtggagcgcaaccgccgccgcctcatgaacgaccacctcgcctccctccgatcgctcatcccctccaactacatccctcgagtaaattccttcccgccatgacgccgcaataatatctcaattctcaagcaaaaagaaacatcaaaatctctcgcaagttcttagcgattactacaatgcaattgcggatatagggtgaccaggcgacggtggtgggcggggcgatcgactacgtgaagcagctggagcagcagctggtggcgctgcaggcggcggcggcggagcggagcggcgtcggcgtggtggcggcggcggccaccgcggcgtcggacggcgtgttcgtgtccccgcagtacacgagctactccgaagcgcgcggcggcagcggcgtcgacgtggaggcgacggccgcggtgggggggcacgtgcgggtgcgcgttgccggcaggcggtggaccgggcggctcgtgcgcgccgtcgccgccatggaggacctccgcctcaccgtgctgcacctcgccgtcacctccgtcggacatgacgccgtcgtctactgcttcaacctcaaggtcaaaacaacgacaactcttcatcaccttttactgcatgttccctcgtttttttaaacctacatttgatttgccacaaaaggtagccattttctaactatatttgattgcggtttccatcacaaggaaaaaggaatatttcgttgctgatttcaatattgaaaggtcactattactaaaaggcaattttcagcttaattcacctgtaagctactccctccgttttaccatgtaagtcatttagcatatcccacattcatattgatgctaatgaatctagaaacggaggaagtatttaaagcagattactctagtttctaatggttttctcttataacacgtttcaattagacattttttttaaaaaaaaacgtagatggcaataaagtataatgaaaatattttatagtatttttttcattatagattgcgtgcaatcttaaatataaactttgaaatcagtctttgtccttcttgcctatgcaaatagtgatcgatgtttttctctttttttttttaagaaaaagaggattgagaacagttatatccaacaaattaaaatacatttgtacaaagagggaaaaaaaggtgagctatttttaaatatattttttaacctactagacgcatgtgctcttttttacttgcatccgattgagcatttaggctgtgggccacacgctaaaccagatagcttattagctattgtaaacagaaaaaatgactgtttatttttctttaaaaaaattctatgttgaaagcatttgaaaaaaatacgccatttaaatagtttggtagctcaagaaaagcgatggagtggttaaaccaactaggtaaatcaaacggtgtcgtctaattaggattgttacaactcatggatataaacagtaccacataccaataaaataaacaaaatagatctcagaatcaaaatatgaggaatgcaaaatatgtgccattactttgctagtgccgtctatttttcttgcgagaaccatttaatgatttttagtttggatatatatatactactagtagaaagaagtgattatgtaatagtagtatttgtagagagatgtgtaatgtagcatgtcgtgctcggcgcaccagtgagaaagtgatgggtaagcgaatcgattaattgtccccagctcgttgcagagtgttgcgtgggatttccaacagatgaggaccgtggctttcgtacgtttctgttaaaggatttttggagtatgcagatggagtgttcgaatacgatgagcatcccagtacttgggtacagacagactgtgcttaatttccagacaattactaattacaagctcctgctttcttacgtgtccttttctctcttgtccatggggaaaacacaggatcggaacaaacggatacaaccacaagccagtcttacgtatcccgaaccatgcatttcagagatagtataacagcttttcagtactcctccgtactgtctaatcaaacaagtagtttactgtgcaatgtgaatattttacctccgtttcctaatatatgacggtatatcaaacaaaaagaaagaaatgaagagagtatatatatatgatgggtttattattatgtaggagtagctgagtataatggtgtgtgacatgtttgagtgcagatggaggaaggatgcgagatggcgacggcggacgaggtggcgacggtggtgcaccagatcttcgcgtacgccggagcatgctgctgacgccgatgtacgggccggaaccaagagaagaagcaaacggtggaggagggaggcaaatgcaagcaaaacacatgcaacacagccagggataagtcaaattcgccgaggtgggcagcaggacggacgtacggcgatgagctagagagggtgagagagatgagagagattgcttgcttgctatggtagctagaagccgggaagggaccatacatggcaggtgggcccaagaccacggcagcagtggtcactcctggcagtctcaggctcatgccggcctactgctcgaggaagacctctactgtagcaagagggagagtgtaaaagtgcagagtagtgtgtagctcggggtaatcaaaagcaagctaagctaagcaaaagcaaccacacggaccgacctgttgttcatttgcacctttctcgccttgagcttgcttgcattgcatgagcgacgcgacgagatgttctcgacaggcgatcctatccttgtacgctctgtaaatactcctacacatacagtaggaagtagagtactctactgttgtaatcctggattccttgcatgcaaaactttctgcctggctggtgccctggctgtagttgtgtttctctttaggagtggcaggctttgcctcatctggtgctgtagtcactaggagtactagctaggtggagtactgtacgtggcagcgcagggccagggcctgggtggtggtcaacggcgatgccatcattgcggaagcttttgccccgattcggtttctgctgctcgcgcccagtggtaaaaatgctcgcaccggactaccggaggatattctgccatggccgtctcgtctagctagctcccctcccctcccgaaatcatcatcattcttcggcgtgccgccttggtggcgcacgcgcgcgcggtacaatcacccaaacccaaccgaagtctccacgccgaacctacggacacggcccgagagagacgcatgcagtggcaatcgtagttcaggcgggccgtgtgcgcaagacgagggagcaaagtacaggagagcatcagagagagacagggcgtacgcaatagcagtagtatcccatggcatcgcgtcggctattagtgccaaccagggccggtgcaacagtcgatccgtcactcgctcgccgacgccggccggccaccaacttcttcaccaatatgcccgcctcccctccgccttcgtccttgctctccttctctctcgcatgcagtcgcagaccatgtcgatcgcagcgcatctcgctgccaccgctgggcacgctccagtcgctcgaccatgcatgcatcgactccccgctgcaagctgctgctgcggcattatactggaccagtatcgccgattttgtgccggctgctgaaaagcgaaaaggtgatcgatacatcgcccgcgctcgtcaggctctcgcttatagccaatctaatagctcattcatacaatagttatatactacactattaatatatggtcccacctgtcatacgcacactgtgtcttagagtccgtgctatagctggctacaaatctatagtccgttgctcttctctctccttatttatctccttaaaatatgtttatagctggcttaaagcctgctattgtacctgcccttagctggctggctggcgcgattagagcaagtctaatagtatagccaactactggctccaattcatctatagctaatctaatagctcattcatacaatagctacatactacaatattaatacatggtcccacctgtcatacacactctgtgtcacctagtctcacctgtcatacacactatgcgtcttggagtccgtgctttagctggctacaaatctgtagcctactgctctcctctcttcctatttatttttttaaaatatgtttgtagctagcttatagcctgctattgtacttgctcttaccatgcagccaccaacacaccaatgctgcgaccaagcatcatgtgagtaatttgtgcagttttgcctgcgttggccgctcgaatcagcggcaatcagggagcgtctgcgactgcgacgacgacgcaagacgcatgcagcatcatgtgagtaatttgtgcgcagtacgctgtctgctctcattgctattgccgtggtacggaattgtccacacgttgttgcatcctcttgtttttttgcttgcaatcttgcatggacatgcaccgctcctacctcctacgaagcagcagcacaactctaatccagttactacagtggtatcaagattttagaacaagcaactgggctgggccaggagcccatcttgtcactccgtctctgcatatctgcctcttcatgtactggtgaactgagccttttcagtttcagaacctccctgttcttttatgcttaaatggaatgatggtgaacgcgtatacttcttgatcttcttttttttttaaaaaaaatacaatatatgaattccaaatgatttaaattcatttttcaactttataatagttaattaattcatttgtaccaatgaataattatcacaattcagctattcaggcatttagcgcatccactacactgcgtacaagatacacatgaagttcacagttacaatttagaaatgttttccaatgatatgtatatcaaaacttaaaaagtctagcagtgaatagttaacgcagaatgttcagaaatggtttgcatctgaaacaaacaacaggcatgcaattgggcaacaacaacaggaacagtaagatcttactcaggtttgacaagctgagctatgtgcacatgtggtgtatcatagggacttcacaagaaaaaatgtggaaactccaccaaataggtgcagcatgaaaaccatctacagtttggatgtaaatgattacagcttgtgaaaagtagatggtctgtttgctctcaaactgaccacggagggaaaaagattcaagcactaggaacaacatattgacgaacaaaaaggaagtaaaatctacaggtggccatcagtaaggtgattcatgggtgccagagaaacagactacaagagcaccttttccttcttctcaagtattggagggtcaacctcgattcccatattagcagcagtgcccgctataattctcatggccgagtcaatgctcttgcagttcaaatctggcaacttctcttgagctattgtacgtacttgatctgctgttacttttccaaccttctctcgctgcggttcttttgaacctttctcgatacctaagaataaggattggaggtgagaaatcatttgcttaagtatccaaagctcacaaaagagctacatgaacaatagaaaggataatcatagatgtaacaaggtcggttgtttgtaagcgattgtacgcagtcgtgtgcaatgcgttcatccttgcttttagtctgcagacatgcttgaactcgcaaacagcacagatattttgtgactaacgagtccatacaacttattcatctctctgatgtattcatattacaaacttcctcaccatattcatgaaacaagggaaatgacaaaccagagtaaaaatacatataatcgtaagcagagcaagttgcataaatatgtgtgcttaataacatctaaaaacttattggttaacttattttaattgatcaacaatccaatagataccatctagcgctactgatcatataccaaacacaaactagaaatatgcaagagtgaaaagcagtagtcatttgctatttttttaccttgttctcgctgtcctatggaaatgaagaactaaaatatggaaaatgcacatcagaatcaaaatgggcgaagcccacatgttgcattatctttcaattggctgaacaaggaagtaaagtgaataaataatgtactagtgattagcttttcagagaaaacttttttacgtctcatatgcacttcatttcacataagtgcaacattggtactaatgttatagcaaacatctaagtctaatgtatatgtcatggcaaactggcaacctgtgcagttcaccctatagattagtcaaacttttcggataaccatatctaacttgtgacatggaactttcaatccattcttctgcataatactccagaagaacataatattcttatagcattgggccacatggaatacaaaagcaaaaacattgacctagcagaagtgttttcattttattttgtccaaccgtataaacatatcgcaaattcaatacatggacgaaacaaaattatagattcatgctagctaaaagggtgcacacctgctgccttgaggagaaggactgaggcaggaggggtcttcaagataaaggtgaaacttttatcctgcaaaaaaccaggcaaacacacatataattaggagtacccacattagagatgcatgttcacacacattcagtggaattgacgattttaagctcacatcgaacacggtgatctcgacagggatgatgtagccggccttctcggccgtcttggcattgtactccttgcagaaggacatgatgttcacacccttggcaccaagcgcggggccgaccggcggcgccggcgtggccttcccggcctccagcgccagctttatgaggcccaccactgcacaacaaacaaagaacgcacgccgcgattcagccaacgcgagcgcaagcaaatccatggatgctgcagagcgagacacgaacctttcttgggcttgcccccgggcttgggtggcgccatggccctgacggcgagcgccctccgcgagggggcagcgagcggcggcggcgtcggccggaggaaggaggcgggggcgccgagaaaggaggaggagagcttggtggcggtgggggatgggacgccatgcagggacaaggaggtggtggccatggcggcgcgcttggagcggggcgagatgaggagatgaacggcgggagctttgctctctctgctcttccttccctatctactaatcctttcctcccttgagctggtaacagaaaaccttaatacgttttcctttgacagtagcgtaaattacgaaaatacgctttcctcgtccgggtgtgcctgtttttcgggccggacacgtgaaagtcttcctgggcctacgttcaaaacggcctattcatatggcccatgcggcccggctgccgtgcgtctccgttcaaacattcaactgccggccgctcaactctccaccacgtcggaggcgtcgactcatgtcaatttgtttacgtgtatttgtccccttttccttatcctcccggttttatattgttacttaaaaaaatacccgtgcgttacaacgggtgaaagctattttaattttattattgttgtatggtttagttaaggtgaaattcactttgagaataaaatcatgatctgcaattgtgattccgatcatctcaagttaatatgtaagttttttttaaaaaaatatttcttatacaactcctcctgtatttccaaaagcgaacgaatttaaaaccgattgaaatacatttatgtattttcaaaaccgaacaaacttaataaccgactcatacacggatgacgtaccaaaatatcgataaaaacatcttcaatttttataataatagagacaagtcgattgagtggttatatacgaacttatatatgtaaacactggatggctccatctttttttttatgcttatctttatcaactaaaatttgaatttttaactttaaatttaaagttgattttgaggttttttttcatcgaagtttattttctagtctttgtttttagattgttaagaacatgtatatcaaaactttattcataaattgtttttgtttgaaaatatgtcatttggtttatatcccgaatatatgaaaatttattcataaattatttttcatttaaaaatataccgtttggtttattttccgaataagcaaaacgacggaactccagtagtacaattgcgttgcaccgattgatttgattgattactcattccaacggctcgtt

SEQ ID NO: 14363 - DNA, 10441 bp, Oryza sativa
  unsure (1)..(10441): unsure at all n locations
tcctcctttcgtcttcctcccgttccggccttgtgcagagaatctcaactgagatatgttcagcatatgtttgctccaacatcacatcaaataccaagccacaatcaagcaggagtacaagtatgcacttgagatctctcgatttagatttagatgggtagtggagtctgccgatcgaagggtttctgcctggtggtgctgaatgggtgggtgcatatgcgtctagcatttcgcatccatggacgacaatacgggtaagtaaaatatacagcgtggtctgtttttaggatggtttggtgtcattgcatgcctagcatcatctcctttctcaacgcagagatccagcttattcctggcctgttacttaagaatggggcatcgcttggctatcttctgcagcaccgccgctggagcgacttctgccaggcagccctatgaatagctcagtttcgacatccatgttgtcgttggtggtgttgatgttacggtccgggttctcatttcggcccggacagtcaaaggagcagacaagggaggctgattcttacactgcacaaagttcatgatcaagggaagcaaatcaggtaagatgatctttcagtgccccagaaaatttccggcatttatattggtgtgcacataagatatcgcacgaataagttcaaataatcatatgctaggctgggcgatcgacttaagctggctgctggtgtcttctcggcagtaaaagtttcactcgtcttaccttttcgcgtaactcttcattgtccttgcgcagcttcatctcctggtcgatgttaatgcaaaaaagagacaaacacgacattaggaacagatgattggtcctgcgtttcaggttatatatatatttatttatttatagtaagtacgaagttggtgaggtaccttctctctcagtttggcaacctgctcctcaagcagctttgtctagtatgcagagaattggttgtaagtttgtgcacatcatatatatagataaattaattgctgataacgtagactgaaatggaaaatttattagccaaccttccttcccctgatgctaatgaggcttctctccagcttgacctccaggctatgcagttcttcaatagaacattcatccaacttttcacccagcagttttctgcatatcaacaaattaaacacgatgataacagcctattttttgacagctacaaggacggcacttctgtaattcagctgaagggggtaccttttgtaagtttcaagagcttcaaagttttttttgcccaaaccatcaaggggtaagcttttacctttgttacaattcagacaaccaaacaatctattgaaaattgtccagctacaataaaacgactagaagcacattttatttcagaacacattttttcattgcttgtttagtgctcatgttctttatttatttctcaccaaaacattcctaccataatctcgaagactatgcacatccttggtgaattgaaaactgattcttaaaagtctagaatacatctgattttctttgtcttaaaaatagtactgtccctgcttcagtgcagggatcttatatatgcttatttatacataaccataatctactgtttttttattaaaaaaaatacaatctatcagatatagggcatcttcaaataaaatttgaaaacagagttccccaaaataactaacttaatatacatttcgttttacctcaatatacaacgaaatctattgatggagcagcattgacactgccaacggaaattatacgcacacatatgacataaattatactaaaatcagtctatcagcaataacactatggtacaaggatgaccaagtttgtcaacaagaattatatacctctatatcttgctgtactgtcttgttgccgatattttcctttgtatacgtcctatagcgttcaattgttttctgcgtactgaagtaaagagaaaagcagcaagattatgtcagaatagtgttagaattctgtttcaattacaaaagcacaaaacgttagatatatctcaattaaatatccaattagcttcataaattgttaattaagaaaaagaacgcggtcaaaggttgacttctttctgcaactagagaggtttttcgcctttcgatcttctgatgctacataaggagaaaagatcaatcttttagatcatgaaaagatcaatctaactatacatgtttgatctctgtcatattgatatcttaagccagaacaccccacatatgtatcaagaaaactcatgaagttggaagggcatttacactagtactatcaagaaaacataggagtgtttgttggattgttgcatacttttcgagtcactgtgtgacctatatccaatataaattgccggatgataaactacagacatatatagataggtagatattgttcaaaagaaaaaaaaatagatatactagctacagataaaggtagtcctccaacatcttcctgacttaaatgcagaataaaatttagggcttatctgctaaaaacaccagaagaatttataaaaggtataactgttccagaacttctagtagtttcattctgcggtctcaaactttgcccaagcttatcattgaatggtctttattatccacagcctaataatcaaattaatgtggtaactggtacaaatggaatcgtgcgaatgaaataatcatatatacagctgctgaacaaaacaatatcacattgttgctcatttttttgataaacctaggagaacattttgataaaatttgaggaaaaccatgaaataataactaaaattaacagacatatgatacaaaattcaagacagaaacttgcgtttatttgatttgaactaatcatcagacattttcaacagttgcctttttagaacttggtaatggagtcttgaaaatgaaaaggagttatggttaactaagtgtatttgctgctgctgttaaagtcatgtaaccagttaaaactggggtgcttttctggtggcnnaccgtattcttcccaggcgatgccaatataaagagttattaaataacaagtcaacttcgccataagatgtgctaattaatactccctccggactaataatattagttgttttgaataagggtaaaatcaaactttaaaatcttttactataaataaattataaaatatttatcttaaaaatatggaaatcatatgtatagattagtcttaaaaagtacttcaataaaatcatatgtttgctgatatttctatatatattataatagaaaatagttggtcnnaaagttacttttttgggagaaaccgtgctcttgtccaaaacaataagtattatcaatccggagggagtatactttatcaacaaaataaattgcagaaagaaattctccattcatctaaaacctgatgcacggtaacataagatcaattagccacatgcatatgcacttgtcgggacccatttaaaataaataatctatgaaatcctttggctggatggaagtagaatacaccaacacctaacaacttctttagtaagagtaaagaaataaatatagagtaaattatagtatatcaactgtgacccatgatggcagcctcccgctactaaaattctttatgaagccaaagaaggcttctcacaattctagtgtatcgaacttgctatttgtctaagtagcttcacttataagttgttttccaaagggctcgtgtgtattgatgaacgtcttatgaaaatttcttcagatggaaatggttgattttaccaaaaatgatgtggcttaagtatataaagaatctagaaaacatggtaaaaacgtcatttcagaaaagctttgtagaggcaagtcactcttggaggttagaatcattggtaaacataaataagttgtaggaattttctcccatgtatccatcctctatgagaaggtcaaggaaaacgtccatattcaaccactcaacttggccttgatctgaattttgaccttcgactataaaattgctcagttttgtacctcgtaataaagctatccctaagcccaaaccaggttttttttatgacacggtgaagtaattggtggtatgatttggatgccacaaagcatctactccatcctttccatattgtaagccattttagtttgtccaaaatcaaattttaaccaggtttatagaaggatgcaccaacatccataatatttcatggtggatttaatgaatgtgatttgatgttatagaagttgttacattttttatgaatttggtcaaagttaaaagaagtttaacataggacaaaactaaaatgactgataacatagaattaagtagtagctatcaaactaaaataaataagatacataagagagaaaggtggtgagcatgacaagtgggtcccaatattttctacatttctttgttgtttattgttgatttgtgtggtgaacaactcttttcacaagtaggtaggggtggcattttccccattggaaacagggcctcggtgggtccccacccctacagggccggggacagggccaaatcttcacccgtgggtgttactgagtagggccctgactttgagcggtgttagggccgaggtgacatcttcactcgtggagccctgaagtttaagaaatagtcacctcatgtatgtatttctagccatcaaaagcccataaggccaaaaatagaatataaaaggacaaaaaaacaataatccacctgcacaattcgatgctcccatcggctgcatgatttgtgcgatcgcttcaatgctctgcgcatgcaacgagtcacgcacgtcgcccatgcgtcgactttatcccgcccgccgctatcaccggagtcccacaccatcttgtccacaggtgccccacaccttcttcctcatcttgtggtcggccaccggcgcccactccattcctctccctcttcggtcgcctcccgacgttgtctcttctctccatacgattgctttatttggttgaaggtggcacttgtcgttcttccctccttccaaccgtcggcaacttccgcttgcttaggggatgttgggacttggctgaagtgcgaggccctataggggccggggtttcggccagggactaatttcaacctgttctttctttcggggtcgggaccgggtgaacctgcaagcgaacagggatgggagtttttgtccaacacgaaccgacccaaccccgttgccatgttggatccatctcaccacatcaatggaaccatgttgatgaaccatttttaaagttgcgggatcagtaattaattgctttatagttaaaaggacaaaaattagatcaacgcaatagttgaagggctaaatttggactttaattgtaggataaccaccatttatatacccattgtcattatgatatagtatttattctcgtctcgaagcatcatcttaacgagataaatggtatatttgacttgagtctaatgtatacacatttttcgaccactaaaataggcttattgcaaattacattttgaatatacacaagaagcatgctaagtcaaattacacctttttctcactttgagtcaaagggccaaccaaagaactacaacatatttgacacgtacttgggtttatatcttacattggtgggtctactctcacaatggttcaactgatgcacatgtatatcaactgtgagttcaattcatccttcttgggtcaagggtgaaaaatagatatacatacgagtggtaaaggctattattttatgacttgtacaatggtattgtagtagcggcaaagtcgtgtagtgtggggttgttagcttgtgaagacatttattgcatcttggaaaacattgaaacaaaacatttatcactaagcattccaagtggtatggaaaaatttaattacttgccacttttgcaattgttcctatatgtttgcttctaatgagaatagttcttaaccttgtgccacttttcccactatgggtattccaacatggaagattgacattaaaagttcattttgctccagccccttcccccaaggtctggtacccgtggaagtcactgccgcaaccaccagatgctatggagctgtcgctggggaccctatgtgagccatggttctttgcgacgacagtgaaggtggcgggagctcagtagaaccattgatgatgttggggccgatggtggacttggagggtcaattggatagagaagggcatgtggcgaaagcttccaccaagaaggtcgatggggatcatcgtccttgccagggacgtcagcaacagatggtgagagggccttgaagaagagtagactagttgtggcggcgggaggcaacaaccctccttctcttcctcttctttcgcctcctttgcttccacaactcgtagcatggtttcacgtgggaggatactgttgctagccattgagttcttaggcacgactatcttttgtaattcgatttgttgccgtgtggcgaggggctatgatagtgggcagtggttgtggggtgttgcatcaaaaggaaggaggaggccgcgcgtgcttgcccgatgttacgggggttgcgaggtggcataggtggatggtgaggtgcatagcgaccaataagcaaatggataacatggtggctcacccgagatagagttcatcgacaaggacttacatcaacagcatagtggtgagctcctctacatccaactacaagcatctaatttcatgagggtggagtttgtcgacgaggactacatcaacggccacggtggtcagctccgctacatgcaaatgcagatctaaggccaaggacagccatggacatccttaatcgtttcttccttttgatcggggcaaaattgggatctcacatcaacaatccatatgatgccaatgtgttacacatagtggcatagtatttagaaatcttctctccaacggcaaacacaggacgacgggttataagagcacaaatagttaaacttcctaatggtatgagcttaccacttccatgttataaatgtcttttgttgatacaaacattataaatacttggctttttatgaatcaatgtaaaatgcatcgtaacccattaaaccatgcattgaccatgttgtgtttttgtccttccccctttatctatgtgagatcaaaagaacggtgggggaatattctaaaaccaggtctatgaagctaacttctcgttataggatccaaatcctgtcacaaatataccaaaccgagtagataattagctagctaccaatttacatggtgatcacacaaggttagttcaactaaacttccgtcattcattgtggtccaaggctcaaagccacaattacaccatagcgtatgacgtctattattgattccttgcatagaaacttagtagttatggatatatgggttttttcatatccacaaatcttatgttttaagaaatccgcatcatgcactgattgatgttgtataatgaattaaggtatggttggaactttgatgtgatcaagttggaacaatatatactaattttacatctagatttccaatttataggtacatggtaaagatgaattagttttttttttgtgtgtttgaatccttctctttcaccaatttataagtatgttttttttacatacaaattacaattatatgacgaaatcagaacttaatttttctctaggttgattgttctactgtttaagcctatatacataaaaagaaatacatttgcttgtttttgtctgaatgatataagatatatgtatataaacctatattttaaacagaatagctagttacatgataattttgatgataggtgatttagcaaccaagttttataaccttcagtagagaactataacaagggattagtatgagaaatatatatttcaactaagtaggaattaacatcaatgatgaatctaagcataacctggctatatagttggccataaggcccgaggcctgaaggcccggcccacggcacgcctttttggcccggcccaagcacggcacggcccgacttgggtcgggcccatgccggcccggcccgaccgtcgggcccgtgccggcccggcccgaccgtcgggccgtgcctgggcctccccaccagcacgctgggctggcccggcacggttgggccggcccggcacgatgggctggcaggccagacccggtacacaaagtatagggactaaaaatagacatataaatgtcaatgtctaaagaatagggaccttaaatagacttattttagctatttatataccacatcacaaagaagagggaggtaaaataccctttttttagctatacaatgtcacagcccaataggagggagaaactttagacttattctgaagaaaagcacgatggcccatcgtgccttcgggccggcccggcaagacccgaggcgtgttgggccgtgcttgggctgtgagtgcggcacgtgggctggcacggcacggcccggtgcgtcggtcgggccgtgccggcccgacaagcctcggcccaggcacggccgggcttgggccgtgccgtgccgggcggcccacatggccatctatacctggctatgatgggagttgcaccaggcaactagtaacacagaaagaccatgaaacgcgcgagagtagagttgtagatagtggtgaagggagacaatatttaacatgcatgattttgggggaagagataagaaaggaaagatcaacacaaaaatttgtcggactttgggactagtgtagtttggattagaaaagatgagaagattatcttttgagattcaaattacatgcaaaagaacataacatattactagaaaaacaacaatttcaaactatttcttatgcatcaatgctaacacatctttcattctaatattaaattctttaatcaacctatgcacatattatgttatgcaaattctcaattttccttactcagaatcgctcaaatgattttaccataaattagcaacgatctatactaaccaatttaccttgatgatatatatgcttttgggtgtaacatatctgaagtaagaaactaaaggatttgttttttttaccttgatttctattttatccttgatcacattagtgttggagtaatagccattagaatattttttttgcacatctcttggtttatgggtattaaataacataatttttttgatcaataattagttatccttgagcaatatacgacataaagtaaggttctagcaagggtatggtgtgttggtattgagccaagcataaaaactcttgcattatagccaattgtgggttaattcatattcacaaagtcagacaatagccggactttggttgaaagacaatgcacctacaaatgggctagatagatcttggaagctaatgtgcacctttcctcttcctaaatggcagttaattatatataataattgtcatattttctatctaatactaggtaccatatataatctaatatgaatctcaaaggaggttgactgcataggttcaagtacaaataaataactcaacctagccaaggtctatgaaaaacaagagtacaactttactgtctttgggagggtatggcctcatatgggtgaagctaactcaaataactatggaaataaagcaaattttataattttaaattaataagcatgcaccacaatagcgaattttaacttttttaatgcaaatactgtgtaattaacataacaactaaaaataatgaggcaaatattttatagagaaaaaaaaaacaatttacatcgatagttacattttttttttgctaagtgcttaagacaaacatcacatgctacatatcaataaaatagcaaaaatgtggtagctattttgtgtatcgagcatgttctctcattgacccaagatctccattttgagctaagtagtgatgctgtcaaaataagtgcactccatatgagaaaatagagaagatagacataatagtataattaaagcatctaaaagtaccattgccaaaatacacccattttacaaagatatgtccacaaataaccacaacggcagccaaactggagacaaaataacaaagattttcaattctagatttatcttagcactaatatgttttttttttaaaaaaagaatgactattcttaattacactgtattcttttatgatgataaaacaactattgttggtatatcaaaaagaccaaggacaaatgccatagaaaacgataaatatgttatcaagcaatttatcttcaattaccatgcccaataaagatgagactacatcaagacatgcaaaagaacatgaattaagtagttttattacaattgtggtcacaattgttaacatatttagcatgctaagtagttttcttacatgaattaaatagttctcacaattgtggtcacaattctaaaaaaaaaggggcaacaa

SEQ ID NO: 14364 - DNA, 1360 bp, Oryza sativa
atcccttatattgtgggacggagggagtagtacttactagtgctaggctgctagctagtactaggatttttgatgtgaaatagtagtggagattctctcggaacagtaattttggaacaatcacgagtaaagcacctgttaggatggaacttttcgtaatactaatacgttgtgaatcgagtgagcatgatctttttataatcctcgtcgagcgcgagatctgattgtccggtacagtattttattcaaccgaacatgacaaagtgttttaacgtcgaaaagtcactagtttacctcggggtgaggtgagcagccaatcgggtggggtgtcaaagacagaaaccaaaaggcagccagtcatcagagcggtcactgcggcacacgtcgtggggcgtggttggaggttcgctcaagtcgtggtcgtcctcgtcccggttggatggactagggggtgcaatgcaaatagcgtatggttacgggcgggtaattgcaaaaaatgcggcgcacccgtgttgtggcaccaataatgttgggcttctctccccgagaagagacagccaatggggggggggggggggggggaagcggaaccaactttttcgcgggatgggaaatttcggcctcgctttccttgtttgttcggcccggatgcattaccacttctgcccctgggtgcggtggccatgatgacgataaaaaacggaaatgcaaccgcacgcactcctcctgttgccgtttgcctctgtctccccctaccgcgcggtggggtggccactacgcgaacaaagggaaacggcaacacccgcagggaccaaaaaggaaagccgaggaggagagggaggggagagaagggagagggggtcggggagaaagaagagcgagcgagcagctttggctacggccaaaccctacagcgcctccaccaccactccttgccttttttggtgagtcgccctttgccgactctcagatccccttgcgttttaccacttttgccttgtccgccgcccctccaattgggataaaaaagaaaagagctgcatctctcgctgctcctcctcctcctcctccgccgtgcaggccgcagccgctcgtgtggttggttggttcatcggcgatcgaagatggtgcgggggaagacgcagatgaagcggatagagaaccccacgagccgccaggtcaccttctccaagcgccgcaacggcctgccaagaaggccttcgagctctccgtcctctgcgacgccgaggtcgcgctcatcgtcttctccccgcgcggcaagctttaggaattcgccagcgccaggtacgcaccccccctcccccctcctcctcctgcccaatctgctcttcttcttgtc

SEQ ID NO: 14365 - DNA, 5526 bp, Oryza sativa
tggtgatcgcacgccatgaaactccaagctacaggtgtttataatattttcattatctcgattctcttgagctacgcacgcagacggagcaagttactaacactgatggggactgtggagtagtttgatcactgctgcactgtacgcaataccacgcatattgcaatcggctattctcaccacaaaataaactcaaccggtatacttatgcagaatactccggattatttttttcctttaaaaaaagatacgaacatgtaaaagaattacatatcaattatattagaagaaaacataatttttgatatactaacacaatcagcccaacagatctatgcctcgagacgagaagaaaatagaaaaaaatctgttaggagaaaagactactacaaaactctgctccaataaaacgggaaggtcgttacggagccgggctacaatcccaaaagaccacatttacgaaaattcatataatgattgtttttaacagcgggctataagtcgtatatatggttctcttcagttaaacctgaatatagaacctccgaaatcaacgtccgatgttgtgtcgatcggatgcctggagtataatcgcggtgttctattttttggacctgtaagctgattacaaaataatgttaatagtacgaaacaatgttatacttgtatatgattgtatatgattgcttcttgattaagatatgcatgatcatgctccatattaatattagtatggagtaagggcccgtttagtcccccaaaattttttcccagaaacagcacatcgaatctttagacatatgcatgaagcattaaatatagataaaaaagaaaaactaattgcacagttataggggaaatcgcgagacgaatcttttaagcctaattagtccgtgattaaccataaatgctatagtaacccacatgtgctaatgacggcttaattagtctcagaagattcgtctcgtggtttccagacgagttctgaaattagttttttcattcgtgtccgaaaactccttccgacatccggtcaaacgttcgatgtgacacccaaaacttttcttttccccaactaaacacacactaattgcttcctcgccgtctgtatagtactactcaaataatcaccgctacaatcgctgtcttgcatcattgatttgattaattagctgattccctgaagagagagaagctagatatacgtggtcttacgtaacaccgattgcgtcacccgtgccgtatactccctccgtcaaaaaaaaaaaacctgttttccgtgtccaacgtatgatcgtctgtcttatttaaaaaaattataaaaaatattaaaaagacaagtcacgtataaaatattaatcatgttttatcatctaacaacaatgaaaatacgaattataaaaaaaaattatataagacagacaatcaaagttgaacatagaaatccagagtttgcctttttttaattacagagggagtacatactacttcgtacttttttttagagagagaaactactctatgtactgtgtgtaccgtgtacgctactgtactgcggttgggatctgccgagtgatcgatctgctcatctgatccagtccagtcctacagctccttgattgttttctttgaaaggatgtgcaccttgattttttttttccccaaaacactacggacgacatagtgacatactagcacacttatctgcacgaaaacacattctcataactatgcacgttcgagaattagaccgggaatgctccatatttatttttcgaaccaacgtatttgtactaaacatccctatctttacgcatatgtgcacattcgaaaaaattgcaccagcatattttaagattagcaaaatcactacgctgcgtacttgcgtctcactgtcaaagttgttagtatcccgattcgtattctaatatcatatgtacgatactatgatcctaccaaaccgaaacaatattgatccacctagtatcttaatttttatagtaacccgatcttactattcattttcacacgatcatatgaaatcttagatagtattttgatactacgatccctacgatcacactatatgttatttaaaattaaatgaattgaaaataatataaataaatatgctcaagtttacataaaaatcaattaaatttatcaaaatcaatattacgcacgaaaaacaaaggagaaaattttgaaaaaaaagcttataatagatttgcggcttggaagtaaccctcgttgatctgtgtatgtgcgttaggcaggtcaaataaatgtagaaaaatgacttttctccttaattttaatctcaatactcatggtgatttttggcagccggcagctaaccattgatcataacaatagcaataaaaattccctccgttctaaagtagttttatttattttatttatcccaaacataccaataaaaactactccctccgtcccagaatataagaagttttagtgttggacatgcttattaagaaagtaagtagaagtgagtggtggagggttgtgattggatgagtagtggaggtaggtggaaaaatgaatggtggagggttgtgattggttgtgaagagaatgttagtggagaagttgttatattttgggacaaatcctgagagttaaaagttgttatattttaaaacagagggagtaataattaaaatactcaactttatgaaatttcgatacagttattcttttctttgtatacttccaatgcatttatatccaaatttcacaaacttcgatataataattgtttgagaaagaacttattttagaacaaatcgtaaaagggttaaaaacaaacttatttaagatgaaggtatttaggtggtgtttggatggagggactaaagtggggctaaactttagtccctctcacaaaaacataagtccctagttatatttttgtgagagggactaaatttagtctctagttatcaaacacccccttaagatggagctagtactctgcatgacggccatgtgctagtttatctctcgccacgggagtttgtgggccatatgctacgtagatgttgggccatcttcgtgggctcaggctccaccagcacgtccgctcacggcgcatgggatgcacgcggcgccgtttgttcccccacactcccgtgggccgcatactacccaggacggtggcgcgttgggccgtatcgtccccaagcccatcacggcttttgccctacatcgcctcgatcgcgtttgggcccgctagtccatgctagtatacgcgacagcgacgtgtacgtacgtctccaacgcgaatacaacacctccacgtggcgtacttgcatgtgaggcagtcttcaacgtatgtttccctgtcaaaattctaccgattcctgcggtttcctgcatcctttttgcctctaattgcgtgtgaccactagcttttcgcctatgttcccttccgtgcctccgcgtgacacgagctgtttgagcagcagtgtatatcaactgaacatcgaataaatactacttcatccgtttcataatataagttattctagcatttttcacattcatattgattatatatatatatatatatatatgtgtgtatgtgaaacggagggagtaatgatttattactaccatatatactgaatttttttgagaattaatattatttttatggaaaatcgcaaaagtagtggtcaaccggggaaaatcgcgaaaataggtccctgtcgaacgggtgcagttcgataggccgcctatcgaacggccagagcgcgactggcgacgagatcggaaggctgccgttcgacaggacctgtcgaacagcccccgttcgacaggcagggctgtcgaacagcccccgttcgacagggtcgcgttctccatttatttgtaataagttattttttttaataatatgtaatttattttagtgtgtaagaaaggaaaatatttttgtaatgttatatgtatgtgatttagggttttgataatgtttggtcagaaattgtagtatttatttgttggttaaaatatttgaattatttagtttcattatttgtatatttgaatgataatttgtcatgattcattcgaagggtatgctactgagtaattatccgaagaagtttatgaaatagtcctgatagtactaagttaatcgtaaagtgtttctcaaatagtacggacagaacataaatgactaaaagtttaatacaaatagataagtcaaggacgatcagtgcccttcgcacgcttgctaggtcctcccttcttcctacgcctaatctgctcagtgggatatgtcaaattatcaggggggtgcctatctctagctgcctgctgtggtgtcacgtctggcccctgaccggcctccgtctcctgcgtcggctgtgtgacctgaggtgctgcgtgccagtaatccatccctacttccccctggggaggatcagtgaaaaagaagtcctcaatgaatgctgtgcgaggggagtaagcaggcactccgtgatgcgtcgacgccgaaccgtactcatcgtctgtttgtacaagagggagaaaccaaaaaatatggcgtagttagtaacgatacatataattagaaactaaagcgtgttattgtttaaaatgacttacatgtatgctgtgtgtggccctgctctggcgcacgcggagtgatatgaagtccccatactggtgtgttcaacacgttgtcccccgttggcatgtaagggaagtgtgccgacccagaagctccctgcgaggggtgaacataaggcggagtttggaatacctgcggacgtggtggtgccgtgctcgacgtgggtacccctgatccggctgaccccctggtgtactccggtgctggggtgtgctgaaaggaaggacgaccgtgagatgtgtgggccgcttcgtacccgcgacgtgaagaggatggaccactccgatccacgctggaacgtcggggtagtggtggtgatggccgttgtaacgccccgattttcgttcgggaataaaaatcaattaataatacattttctagaaattaaataaaagttaaatcaatttaatcaagtgaaataatgggagaattaaaattttcccttaaaaatcattggccgggaatattttgcaatattctttgtgccctaaaatactctccggaattttccgtgaattttcggagctcaagaagtaattttaatggcacaaagttcatcgaatcaattaaataaaaaaagaaaacaaaataaaaactccccttcctccttgggccattttcggcccaagaatccttcccctcccgcggcccgcgccctctctctccctctcccggccggcctccctccccatctcttgggccgtcggcccgtttcctctctccctcgtgaagtctgttttacgtcccccatccagctctccctccctctctccccgacaggtgggacccgtggaccccacctgtcatccctttcctccagctccaactgccgccatggccgcccgagccgccccacaacgccg

SEQ ID NO: 14366 - DNA, 11006 bp, Oryza sativa
  unsure (1)..(11006): unsure at all n locations
tcctgcagcccgtataacatctgcactatgcagatgccatgctgccctctctctctcctcccccaagaatctgcttatcttgattatttcttcgagctctttgcctctttcccccaaccgcacgtctccgcccgagagattctcgcctggattttgccgacgagtgcgtttctgatctccttcctccaatcctcatgcttgcttgctgcaatctgggctcaactttaaagtgtccactgccgtctggctataaggacagttgctactacatgtaggggattcactattatacccgataaatttaatgacgacggccaataggaaaattcggcctgaaaagacggcaaaaactatatttccccgtgtggcgattgaggtcagtctagaaatttgtcgagaacgaacgcacttaatgctttgtctgaacgaacgcacttaatgctttgtctgaagaaatatttcagaatccctagagcaagtttaatagcagagctcactgcttattataagtcaatgttggagctaacttgtataacaggttagctataaggttaactttattttttccattctctctctttctcactctatgaatttaatgcaaattttttggagcttgtgtggagctggctcttgtatgagagccaacactacccacttttttttatctctctcttttacataagcatatagcttgcttatagcccattactattcttgctcttactgtattttttgggggtccgggctgcttagacgtacggctagttaatcagtgatttgttttgcaatacatgttctttcttgggctacttgctgttgctatcatttgggctgacatgacgtgcagaaacaaaaccaatgcatgtgatagtgtactgctgctgtatgcacgcactgtggtggattttatttcctggccacgtactgtattaactagatagaattatcggttccacatctaggggtggtctattgcttcattagagagtactactatgttgtattcagtggtacataaccaccggttctttacatctcaccggctaatcttatcaatttccaattacacatgacttaattagtatacgctagttaactagtgtattagaaaagctatgctaagctactgaattgccaaacttcactttgctttgttcagttgccgtctaaacagtcacactacttccataaagaaattagttgtgagactggcaaggttagaaattctgaaaacataggcaacttagtactggcattccggagggcaatatgatatgagcactaattagttaatgataatgtacgttgcagtaatcttgccgtgcatatgaatttctatgcgtaacatgcatgaaagcacactaacgggagtttccagggagcctccaatcttattaatgctgtacaactaaaacaacatgtagcttattgccaaaactgcatacatctaaaataataatggataaaagaaaaccatgaaattctatgtctctgatctttctcgtcgtctgaggtcattacctgaagataatatgtaatgcacccatgtgattgaatacaaggtaataataatatatacatgaacatagggtgggcactgactaatatgaattaaaccaagataatacttggggtggaacctgagaaccacgttattatttagatatggcagccgaccataataatccagaatggtagaatgaaacaaacatatttgcttaccctacgattgtctattagtcaatatggatatttgccataatagacataaataagttaatgtggttcattggtcttcttgaatagttagtacaactagcatgtattcaggtttgtgcagaaattaaaacaggacacacatattttatctgtcagttattgttttgagttaaccttactgaaatatatgtgtaaaattgtgtactgcaagattattttcagctgattttattgatgcatgttttgaattagaaaaggcagcattatctcctaaaatgtgtcgtataaataaatatgcattggatctgttttcaacaaaaacatagactatggcaattgtaggtgttgattgaaagcatgcaataacaaaattttcctgtcccttaggatagaaaaggctcctcttaccttgaatgcaatagagctctttgtcattatggtttctttgagaagaactttgggttgttggtttcaattctctaatggaattagtaagattattgtgtgatcataatttggagtaacatttcccattacccctatgtacgcaataccctttcgtttgttacatattcccttaacttgcttacttatcataatgccacttgttagtttccctttataacaattgtcatagaatagttctttgtcgcatactccatagagcaacaaataacaattttagttagtttgaataaaaattctgtatttaaatttcaagatttcatacctataggtgtatgtatcttttggcatgtttgcaaccttttattttggatatagacattttagtttttagcatatacatcaaaggatgttatagcttccttatccaaactaatagaataaaccaaagaatctatgatagagaagacattacatttggatcgctagcttatatttcttttatcatgcatagcaaagagaagcaaataaaattatttggatgcaaagtctgctaaatgacgatatgcgtgtgtgagttcgtcattgtttctacgttttcttgctcttgtgggtgtaggcccaatttggttctctaccagcgcaaggtctttgatgtcattattagccttttcttttctagcggagcgagaatcttctagcattaccaaatggcatgcctttcccatcaaggataggatttttcctttctagatatccaagcgtaccctacattatctcacccaatgatacttctctatcattgattattcttacttaaatttcaaaggattgtaataaactttcgttttgtgcatgaaccttcatactaaaagggtaaataacacatagtttgttaatattaattttatagataatatataatgtttggggctttgcataacatttgggtataacatgatatcatctgataaaagttggtaaccaaaagaatatatcagcatgcatgctttcagcataaaaaaggaacgcatgagtttcgtaccaaatttagtgaaccgttacatgtagagaaatgtggtctcaaactcaacttcaagatcataaacagtgcacgtatcacttaaaaaaatgagagacaaaacattaaaaaaattatgaacacaagttacaatatattatcttgaaataccatctcatttagaggatgagttccttaactcaatatccaagtcttcatgatcatttgttgatgaggattgagaccacacttccttctcttttcctaattggatcaggaatatgccccaaatctgaaaaaaaaaatcattgaaaaaaatcaccgatatgccaatacatcattggtaaagtctataaatttatcaacaaattttcaacgccatgatattactaatacacgttgacattgggcctttgttgatgctatgttccacatcaccaatctattgctgatatatacaagcttggaaatgataatgaccaagccatatagtatcctcttcctaagagagtatctaatataagatacgacatcaccttactttttggtacttataatcatacattgatgtgtcaagtatttagatactagtgatatgcacttttggatatattcatttaaactatatccacattttcaccatgaatcatacaagatttagcataaggttcattttggctgaaaattataacttaattctaaagtttttagagaacctaacataattgtggacatcatcatggtcttgtgactttgattcaagttggttgggtgatgcacatcaattgatatctatgatagtcttatagtattagaaaaagtcatgttcatcctagacatttgcatcatgctccaatgtatttttaggtgttcagtcaaagatcatgaaaagatagaacaaacacatatggtggcttccatggatgcccctatgctacttttagtattagaaggaaaaatatttctggggccttttgaggtgtagatgatttggtaattccaatattaaaaaaaaattaaatagttgtatccaagctaattcaacattcataaataagaacatggaaaaactagagttggggcaaatccatcttgtacctcattttgtgccattgccatacaatattcccgcggaaaacgtgtgtagtttcatctagttttatttagattgggagaacgaagtactacaaagacaacatcaagtctgatgtcgatatatctaagctagcgttgctactttgacaaataatgagctaggcactagtttgaaactgccaggcactattgccatatgttggtgattggtcccactagccttgtcacatgcaaagtccacgaatcctcgttttcgctccgtgctacctctggtgaacgacacatcccctaaaagacgagcatttatctctttctagagaaaccaagaatagtgtatcgttgcgttatccaaaacctatcgccctattttatccaaatgataatgttggctagtgccattgcaccattactctagcatgatctagcctcctaaacacggagcaagatggtcagtaatcctttaaaaaaatctcggaccacatataaatgtaatagttatagctaccactctttgatgttcgaaaggaaaaattcaacactttataaagttcaatacctactttacgtacataaaataattaacactatcttttgtatggtaggtatttcattctttttcaatgaattgcttttggatttctcatctaaccattactctttaatggccacacaagaaacttgtcacaccctgccctttcaccacctagcagtgacacctgagagggtacgccgtaggaaatcaacgcaagctgactcccctggaaccacgataacggtactagtctcaggatacaattgctggtaccgcggtcaatcgagatgcaccatgtcaactaaacgcggtacatatatattatacctttaagagttcacactttcggagcaacttctggagtgtaataggcaatcagggtagcaacagcgaaaccttgtgtaggtagacccaatccacaaacaacggtttgggatttgtaaggaaaccctaaccatcaagttcacttctcttctcgagaaggaaaaaacggcggttgagtacatacgtactcagtaagtcatgggtaactgagaatgcaggctggaaaggagggttgggtttgtttcgcaaattttgaaaacatttttccaaaacactaagtgtggcattgtttaccaagtggtcggaaagaagcatatgccttgatcttgtccgcgaattgctttgcaacaactcaagcggacaaaacaaatattagttggttaaaattattctgccggttgaccttatcatgacattggtggaacaccatcagccctcaggcagcttccaactccttatcatgacattagacaaatattagttccttttcactttcaaaccatcaaacgttagcccatctcatcaactcatctctttgggtcctaaagccttccatagtctccaacacacaatgctttccttcgggaaacctaatatatgacgctaattgacatcctgatctacacaagattgtttcagaccacgtaatggtcctccatcagtcaccacgactgattctggtaatgatttccaaacccacaaaccactttcgcaaagcataggcaaacaaatctacgtgagaggaatcgccacacattcgcccattaccatttgtaagactcttcgaattagtagacctttacagaggttgtaaacttcacccacaagatgcgatcttactccttcactggccaagctgggaaggtttgtgacaaggcctttccaaatccaactaggggtacctcatgtcacatagaaggattctctttgaactgagcatcagggaaacttcggccctcgtctactaaagaatacgggatgccgctactcaatcgtgcataacacgttaaactttgttttgtgcctagcgcaacaaatcaactcacatctcctcatccggggcattccccaactattggaaacaaggcatacttggccaactatttacttagccagaggtgccccataccacccatatagtcgcactatgagaagctcggataaaattaccaaggaataagtccttatatgcaaaatataaaccaccgcgtgtcagtttttaaaaggattcacaacatatttttccacatcaacaaacaagggtgatgtgagctcatgagcacggtttaccgaggtaccacggggtggagcgacaagggattgggggtcatcagcgtcctattggagtaatgcaactactgggtaggtctgttggttcgtcgtgcgaactgagaccagtcaaatttaacgtgctcactagcaatacaattcgcaaacaaaacatttctaaaacaaggagcaatatgatgaaaaagtgccttgccactgtcttcgtcttcgaagtcttaaaaaatcttcgtccgaaataaattttgtcgtcgtcgactacgtgcatcaaagagaaaaataaacaaaatcctaaaataaaataccattgttaataattataagtgtcatttggtagatttcaatcttagaaaaaaaaatggagacttgaatgggatcgatcggagttacgaatagggatatatgattttttgaacatttaaatgattttctggaaatagaaaaggaattatttgaaatttggaaaagaatattctttggatcacaagtagggatgcaagcgggctgaccggtgaacctacttatctgtcaaataagtagtaacccacgggttcacgcattgtggtccggtttgtcgcacctagagatacaagtggattgatccataaacccatatatagatcaaattaataggtaacccgcgggtcaatccgcgggttatccactattttgcttataagcgggttcatgggttggcccgcttgcatccctaatcacaagtgggtccacaagtcattgagtgggtgaagaaggagataaactggatttttttaaggaaactgggggcacggacttggtctttagcccaaagaggaagaagggtgacgagggtcataaggacttggaaatgcagtgggttgaagtcgacctatgcacacgtgtcctaggtggtgagaggctggcgagtgggagtgtaggggtggtggcccgcagcggccgacgtggtaggccatgcaggctttgaccaaggaaggaggagactagctagaaatatcgatgacaggtggcactcactagcgcatcactaatttacggtggtttcaagccgacggagaccattggcacattgagtgggcaggtgaagaagggtgaatggctcggatggggtagatgatgcatgataggggctagtagcgtggagccaagtgtggcggcgagcggccctcgctgtgcggcgaccaatagagcggtgacttgggtgtgtgatggttcgggtgaggtgtgactcttcaccaattgaagatagaggggagaaagagggctcatcagaggagaagaggagaatggtggcgacaaaacatcgacggatgagatttggggaaaatagctccatcgatgaatagggctcgggggatggctggagcgtggtcgcttagtggtgatgagtgtggtggtggcgttgagttggttgttttgaggttggtggtggtggaaccgcagtgggcagagtgatagcgactgacatggagcggcatcgtgaaaaggtaatggtgtcggtttaggggctcgatatggagggatggacgcgcgtaagacgttgagcgggaaggatggaaaagaaaagaatcgagagaagagagggaaggaaagggatcataaaagagagtaagatgggaggagagagtgggcttgacaggtggttctgtggggagcacggtcgctaacatatggacccgcgcgagaggtggtgcatgcatgcatgttgggcgtgtgccgacggccttgcgtgagttaaggagaggggatcgggccgttgctgatctgggttgaggggagagagaggaggctagtgttgggctaggcttgtggtgcgcgggagacttgaggaagagggaaggggaggagggagaggaaatttttagggaagcttttgaaaatttctagggaagctttctagaccatgtgcatagtaacaagtgaaaatttctagggaagcttttgaaaggctatttgaggatttcgagttcggatttgaatacaaatttgatatttgaactcaacaaattaaggggattcgaaggaaaggaactcaaggaatttgttagaatttgataatgagaaattcaagaggatttgaaatacagaaagtaattttggatcggggtttttgtggtcgagggagagattcaattgagacctttggcacctatgtccttaatcacacacaatatttcactaatgtggtaatgggcaattgcatccattcccccactttcaatcccaactgttgttttacccccactttttagggtttgcaaatttgcccccacttttttgaaaacaaacctgacggttgccctcacttttgacggtgttagttccaggggcgaaaggacatttatatctttagtggttgttgcatttttgccccctttttttcatcgtgtgattttaccctattatgtaatgatataagattgtgataaataattcaaatatgagcacatctcgtgtgatgtttttgtactttaacaaaaaaaatgacaaatactagtcaagtatagaatttgaacataattctagcagcatttcaacagaatttcgacacaaatagcacaagtaacatatatatagcaaacattacaaattgtccaacacaaataagccacaatacatagatgtcatagaccacaaacattacttagtgttacatagtcataacaacacacattacatgtgcacaacatagaaggcacaataccacatattacaagtccagatcatattgcaagtccatattagcacaaaagtgcacaaaattatttaaaaggggcatatagatgtccaaatcatgcaaaccatgaagctagcctccctcctcttcattgccttccccttccacctgcatcgccactgccacttccccttccacctacatcgccactgtcacttaccctttcccttgcacttgcacttgatggttaagagagatcaacaataacaaaataagcataagcaaaatctgaaataagcaaaaattgaagataaatataaggaaagagcaatacatgactcactttgatgtgcaacacttggttcgttgttcccctctctactgttccaatttctaaagatgagtgcctcctcttttgacttgctgtgggacctccttggcaagtcttggccgtgtggcctagctcattacattcagtgcattattttctcttactagtgccagcctcatcacttgcctttatcctagccattcttggtctcccagggttccgtaacaatttaggctcttgattttatatcctatatcaacatgtccatctatccttcaatgtcactggactgaaagtccctacatatgccttcttgaacttctcaatggagaaccagtcatccacaaaatcatcgatatggacatccctactaagcttcgcaatgaaagctaaagcatgaccgaaaggctttccagtcacttgccaaaccctacaggaacatgtttgttactctccaaatgtactgcatgcctaaaggtgcccacagttacttcagctgttccagcttcacatatcaataactcatgttcctggatanttctttggccctttagcattcagagactttgtaatagctggaattattctttcctccatgttaccaacaatattccatcttacaacaaacttgtttgtgatgatctgtcttattgcatcatgcatgtccacaatccgtcgatccttggttgttgagacccaactattgaagcattcagaaagattattattgatgtaatctaccttgcactcttcagaaaatttggttatgctctaaatgtatgaatgattgttatccaaccaggaaagtgcatcggaacacttctcctctatctcactcatgaagctgttggtagccgctcacatattttgggcaaatagagggccatggaacttctttttcatgttcttccacaagtgcctcatgcattctctatgttccactcctggataaacatcatctacaacactctatattcctttgcctgcatctatactaatgaccaaacctacaataggactatagttcttggttattcagttgaaattgaatagatggagcatgcaagaaacaacttaaagaatagacaacttttggagtaccaatagctttgttcatgttctgaacaaaccaagtccaattttccttagattcggtctcaatcaccccatatgcactggaaaaagtcagttatgaccatcaattgcaacagctgatgccaactggcctctagaccttccagtcaagtgagtggagtatatatctatgtaacgcctacatcctttcaaaaacccattgatatagggtttgagagcaacagagaacctcgtgaagcagacatcaccattgcactctttactgtccaactcatctaagctgcttggcactgatcttaatagctcttcacgataggtaggcagaagatcgtagctgtcatcccactttccatttatcctctgaagaccctaaattataggatattaatatggtgcttgcagatcctatgctccccgttgaggggttatcccgcaacaagtccaccactcgatcaactacccacttagttgaggccatcatttcaccatacttgttgaaagataaacaagtgcgctttgg

SEQ ID NO: 14367 - DNA, 5213 bp, Oryza sativa
tttccatgttatctttttttttggcggaggaaatactaccaacactccatcatttgtcattgcacaggaacaatatgcttacaagtctgatttggaggagtagtaaattattggccacgccgccctccgtttcccttcgtctctctagcatcctcatggtggctgggggaagaggaccgctctcttatcgcatcacataaatttgagtttttttcaaaaagtaatagatatatacatttatcaagtagtctagtgtttgtatttcatttattcgccgttgtcctagcggaaaaaaaaatctatagtcctttttgcctttaaatctctgttgttatatctactttatctatgaggttctcgatggagactttcagaaagtcttttgttttaattatacctgctttattcatgagattcttgactgagactttggaaaaatcttgtttgtagggctgctgacgatacagttgatggtgttgtggtattatgactattattacaaagttgttcgcatatttctgtgtatgttaaatttgatcagttgtgagattacatccgtctgcttatattcttgcagttacgaacaatctacgaacgatttggagtctcttttatcatggttatgtggtccattataatcacacaaaataaaggatacaaacatggacggatataatgggaagatgtacccactcagaggcacacctcatattcgagatcgcaaccagaccatgttgctaattggagcaggggcagagatatagaagttggtcaactagagctgtagttatactaataaacctaaatatatatccattgaaatcgtattaaaatttcaacaactagaagataaaggcaaaattatgtaaattacactaagtgtgttcttgagcctgtcgaaatcatagtaaatgaacagagatagagaggacgaagaagaggaggtaatatatgaatgcaccactgggacgcacgttaatatcaagttaacgcatatcatcctcattgtatactttcaagaaaatggtgcaatgagaaattaatggatcggtgtttcaaataaaacatcgtgcaagttttgccactttctgaacatataagatgaatgctttgattatttgagttatactctctctgttccaaaaagaacccaattctatatttaaatccggacaaacactatatcaaaatttaaatccagaattgggttttttagatagggagtagtagaaaaacgaacaaagcaatcctatatgttttatcaacggttctagaaagcctatgataaaatataaactatgttgacaaaaaatctaaaattaagttttattttttccatgactaataagccagatagaagcaaataaacaaccacttgacgaggagagagaaatatagaaatgaagttgtaaatagtagtacttaaaaatactatgataactttacagttgagtcgttctgaattattttaacatagcagtataatatataaataatgatgaatagtgatctatacgatgcgtacgggatacaagtgggtgcaccacggcttccacttgcactgatttaaataggagaggttgtccctccgtcgtcctttgggggggcgttggcacgtgaaagtctcgtccgcagacgatccacccagctacgagacggcagtgggcatgaacagcgttggtgtgggctggcctgtccacgtggcgctctcggaatgggcattccgtacggacgctggtcctaggacaccgacctgtttgctccaccctcggactcgctcgggattggctaatgcctctccatcaaaaagatgtggtcccaggcaaggagtagtgttgttttgtccatcaaaagtttactccaagactgacatgtggccctatagatgcatgggaccacgatgtcattgagcttgcctagctggttgcacactttcatgtggtaatgtttgatgaaaagtaatggagagaataagctgacggtgtagggccatgccgtttaggagaagctgatggcgttgtcaaaagaataatttggacctgccgttctaacattggcctcgtttagttggggaaattttttttagtttgttcgtcacatcagatatacatacacatatttaaagtattaaatgtagtctaataataaaaaaaattacatattccgccagaaaactgctagatgaatttattaagcataattaatctaccattagcaaatgtttaccgtagcacaatattatcaaatcatggcataattaggcttaaaagattcgtctcgcaatttacacacaatctgtgtaattagtttttatttttttctacatttaatactccatgcatgtgtcaaacattcgatgtgacaccgtgaaaatttttgttttggaaactaaatagggccattgtagatcacctttttcttgcatcctccaccttgtaaaacaatgaaattctacttttttcatcatacaattaagaggtttggtttgaaaattcaaagatgccatttaagcatccaccaaaaagacacgaaccggcgtgtgaggctagtatcaaagcagaccgggagtggaaagtgacatgctagaatctggaaggaatggaaaatggtatccgctgtaacccctttctattccatttttaattgctcccgatactttaggtccacgaaaaatatcccatgtagagcatcttcaatgtgtttgctatttttaactccctatctaagcagcaagtagcactccagagggctacctaaggctgagtttttagtgagtttggtctgaaaaatccttattaattatgaggacggttcttaaatcgataaacagtacattatatctaacacttttctatatataagttctttaataaataaataaatctattttttaagtttgtaataattaatactagattaatcatgcagtaatagcgtgttgcaaattagctcatgcaaatcgctcggtccaagggagcctaaatctcacttcctattttcatccacatttttctacaagtatcttgtaactaccatcaacaatttattcgcaccaaacattccactcgatttatagttcactaaaaattcaacaccaattctctagtatatttaactatttaagtacaaatccagaaaaaagaatgaagcaattccttagtacagatttactatcttcccatgttctgtacacgttcatcagtatcaaattcggtacaatttcatcgttataaaataaagatcagcttagctctctcgagctcagagctcccctcctgaacgccagttccctacctcaacacttctcctctttctcggctagagctatagaaggtccctaaagcctacccgatgttcgaagtggaggagatgcggctcatacctagtccacttgagctttgtttttgggcaaatcaagctggagtttggtatgaacttcatgacaagacttgtatgtagatactacccacttacaatagtatagttgacacaagaaagagccagaccattaatccacgggaataattcctttttattattcttcactcctcttcaaaaccttctaaaactagcaaaatattcgtatgccattatatatgggtttttttttaaaaaaaatatcatggacatattgcaaataagaaaaaaataatttatttctaaatttagtcatggttttatgtttctttaccttttaatcattgcttttggaccattaaaggtagatgttaaaggtgtaaaatatgtaggatcgaatcacaagaactaagccaaccatagggggggtgaatggttggtatacccaaaaaccgaaaaattttagcggaaataaaagttaccctcgaaatcgatggaagtcggtctgaccgagattgatctgccggtctgaccgagtcgatgtcgccggtctaaccggtgatgaatctccggtctgaccgccgagatcgcctgccgcgcctgtcgccgctgtcggtctgaccgccgtgctcccgccggtctgaccgccgcaatgccgccagtctgaccgccggtgagttgccggttagacctccgaaacccggtgaaacacaaatcgaagaattcttaaagtagatgacgactttattgattctctctgtgtttacaaagtgcaccaacagcactccttacaaaaatttcgactaaactcgaaaccctaactcaaaactcaactcaattgctctcaaaagcaataccgggaagcctcacgctccccctctatttatacatgaggtaggcagcctaaagccacgaaccaaactcatactaagagtcctaaacaccttaggaaaccctctagtacaagaaagaaactttacataaccaattgtaccaaatttggactccttccaaattcgactccgcatcccatacgcacacaataactccatcgtatgccatatggaatctccatcaaccacgtgcatcaactctagcctaagtatcccgcatgatctttgaccaccacggatgtcgtcttatccccaagccgactcccggtccatcaccgcaaatactctcccgagacatcgagtcacctacacatggaacaaacaaagaaaccatattccgagaccaagctatctccaacttgactcatcagcagcaaacaatagtattacatacgtatagtatccatctagaagttataatcatgaaataaattcggacatctaaataaacaacccgaaaccgaaaccgacacagaccgcgggctgcgccggtctgaccgcgcattacacgccggtctaaccggctaccagagctcggtctgaccggtcacataaaatgacgaatcctgcgatcacgtgtgaaatccaatcatatccaaaaccacttcgtgaataaattccaaataacaaaaccaataatctccaatgcccaattgttcatcacaaaataataataaaaaacacctttgattttacaaaatatttaaatgcaaaaacgactttcacgtaggttccatgtgtcagtttaggggacttggtggtgggagtggcagactcaccatatccaccactcttttttttcttttaaagtagtatagatcttctctgaaagtccactaggagtcgatgttaagcttaatataacatcggcttttatctcatctcttgatccaaaaggaaataggagcacatgtgatttgaaatgtcacagtaaatcccagtgaaaaaagcctaaggaagtga

SEQ ID NO: 14368 - DNA, 4990 bp, Oryza sativa
ccccttgccgctttccccttgcggccgcggcgtcatgtttcggcggagccgggttcatgcggtgcccgtgccccagccgccccgcctcgtggccgtccgatcggctttgggccgatccgggccgtcggttcccgtggaccggcggtggaccgcctcggtggtcccggtccacggtggaccggcgcccttgtgccgctgaccggtggggcccgcttgccggcgccgcccctcccccttgatgacgtcagcgaggtccatttcctttgtaaaaataaataataattgcgcaataaatcgagtttaattctagaaattcattaaaatggctcaaaacttctaaaattcatatctaattcattcgaactccgaattgagccattcaacttgcaaaattcatctaaaattgagctctacatgtttgtttagtttttatgtactgtttccttggtttttattagagtttttcctcgttttgcgtgccagcgtgtagtttccgtcgtttcggaagatcgcggtcgcgaggaaaagagttcggaaaatccaagtgaagaagcaaggcaagtcacacattccccttgagcatgttgatcccaatttataaatgttttaccgtttgcaaataaacatgcatgtcttgctaattacatgggaatagggtttacctatctgctcgcttgtgccatgtttacttgatatctgttctttgtcaaccttgggtaataaattgactagctcatgttacttatgtgacctagctagaactatatgcttagccatgcttaattaccactagctcagtcgatgggataattgcagtattagacattctagtatcttgttgagccgcgtgctcgagacatctggccatgttttatggtcgtaattatccaactaaaatgcgactgaatggtgggctgtgggtgcatggttttgtgagtcgcacccatggcaattaaggaccggttcacgggaaaccctggaagacttacagcgcttgccacaagcgggaatgggtaactgcttgatctgaagtatagctcgaccctttcctaggcaccggtggcgagggtgggcgtgatggagttgggtcggctggggtgtccggttgtccagctgccggattcaccgcggcgcaagaggggaccgcccactgccttttgaggggtgggggtgaaaccttagcgtggtgtggatggttaggggagggttatgcgaagggtctcgtcacaatcactcgacatggtgacgtgtgcatcatgggcacatgatgacgcggtgacatgtcggtgggttgtgtcttgtgggtacagttgtgcacctctggccagagtaaaactattcgaatagccgtgcccgcggttatgggcgatcgaccagattcaccgtgattagtctcacacttaataaatcgacccaatgcactgtagtacaggtgggttggttgggcctgttcaacgtggtgtagcgttgatcagtggagattttaatgttactttaattactcaacagttttactgttttgctcaataaaatgttttacaaccgcctttatgcaaatagccacaaaccgtccttgtgttccccttgcacgtctgcatcgttggtgtggcttgctgagtacggtggttgtactcagtcttgctattattcccccttttcagaagtgtagtgcttctgagctgaagatggagttagaggaccaaggctcagaccccagttgagttttgcctgtggagtggagctgaagccccgctaggatcgcctttttccgctgctgctgcttttgtttcggtgtgaggactaagtgcctcttctgtaagtattttacgctttatttacgtttggaactgtttattacttgtcgttttgtgtaccctggctggtcctggacagggatttaatacacaaaatagtctggaaatttgggctaaatttctgggcgcgacagccgtcggcccgacgtctgcaccacatctgccgcgctccgacaggagacacgacgtagtagtgcggcagcacgtgcacggaagttgcgaaggacactcgccacgtcgtcagacctgacgactggaggtctcgcctctagtctttgcagcagggtgtcggactccacgtgaacgtgctcaacaaattccgcctgttccacaaataatcaaggcaattaaaattatttaaccagttgcacatttattaagagtatttaacaagatgcacatttgttagaaataatgaaccagttgcacatcatttataaatactgaactagttccacatttatgtaagaaaaggaactaggtgaaccaattgcacatttattagacatactgaactacttgctaactttttaaaaatattgaactagttgctcaaattccacaaataaacacgtaccattgacttgtaagctgatctaggctgaggggcaaacgtgtcagtaatcgctgcctggtgggggacggtgctacttctcgtttgtaggatggtataaagcaccgtaccactcgtagatatacatctgcgggtacgcaatcgaagagtaatgctccataataactcccatcgtctggaggtgtctgaagtgccaagttatcagctgcgtgctcccactcttgtaccgtcggctgaaccgtggtcacaataactagctcgtaggaaagcccgagcccctttctgaagtacctgcacaacaacaaattcacacatcagaaaaaatgttgtgcagtgatttattttaaaaaatgtaggattaaacaactgtgatgtgaactaacctatgaagactatctgccaaaggacgaccatctctcggagggaagtcctgatacatgcccaactgtttgagaaccctgtggacattgtgtggctcgacgtgcacgtccagcacgaggtgacaagtcgtcctccagagttgcatatctcgcgtgcaaagatccgcgagaccgtgcggtgcacgatcattgacatcgtgctgagtgtagggagtccaccgaacacggtcaggcgtaagctgatcaaagtcagctacaaactgagtgtagacacgacgtgtcgtcccgctaacccactgcggctgtaacaagtagtagttttcattagtcatataaggaaagtttgtgaactagtattcataatgataacataaacgaatttaacaaaaattacctcacggtgtgtccacaaggatcccatagtgggacgatcgtcgatgtcatcaacaccagacctgtacatctctcgcaaaccgtagtttgcgtacgagtcaagctgaggcctcccaatgtcgaagcgctcgtgcgcccacaacataagtagcaacgggcatccagggagtgaactttgcttgctggttcctcacgcaagcatcacacagtccggcatatgtcgccgcaagtaccgccgacccccaactgtactgtggaatctccgcgataggtaactctgcaatctgctccgcaaagtggatgaagtgcttgtccacggagtcagcgtgagttcccgtgaacatcacccatccaaacaaccacaacaggtaagcgcttaagtgccgctgcacgatccactcctcctggtcatcagggaagacatcctgtcgaaactgattcaaccaacttttcgtaggcccgtgcccatctgtgagatcctccagtgcaacaggcagcacaccaccaaaactggccagaaggtcatccgcccatccagcattcaccattgttgggccaactgctggcccagctatcggcagccccaacaaataagacacatcctgcagagtgggcaccatctctccaactgtgaggtggaaagtgtgggtctcaggcctccatctatcgacaagagcactcataagcgccgcgtcaatgtggattcgttcggaccttgcacgtgaaggctcgaccaaccgtgcaaacgtcaacaacccagctgctctcagcctacaacatgacagagcgcaagttattaatacatgaaaatataaacaccttgtattagtaaaaacaatatattttcacacaccttggaacccaacgaggatcaatacgccaatattgatccggtcctcgcatctttagcacattgcagaaagttcctgtagtaagacgtcgcgatcgatggttcctatcgatctccttgtctatcagctgcccatcattttgatcagccatacctacagatcgaaaaccacattagtacattgcacgtatggtaacagtgcaataaatgtatgcaacataattcaattaacaaatttgcatgccatttcaatttaaaattacagtaccagcacacatagatacagataagaatagttcagtacatttcaatttaaaattacaagcccacgacacatatattacgatattacaagtgcagtgcagttcgaaatttaaattacaattccaatacaaatacatgacgatattaaaagtgcagtgcagttcaaaatgaaaattacaaggccattacaaatagattcgggtaataaaagtgcaagaaagttcaaattaaaattacagacgcactaaacataaattgaacgataacgatcttcaaagtagggagtccaccaaggatagtagcgaactaaggattatttttcttcttcgacttcccctttggaacgcgacgaacatcagcgcctgtggcatcatgccctacattgtacatgctgcaatctttacgggaatggttctccccgcaaagaatgcaagctttcttacgacgagaacgatctttcactttagcttcatccataaggttcttgatcctgcgtgactggcgacgacccttagtatcaactaataaatttgagtcaggaacccaattggcttgtcctggaggaggacgagtgaaatcacacacggcacgccaaccacgcaattcaccacgccaagttgcctcccacgattcctttctaaagtagggagaaacaaaaatgtttccatcaacacccccttttgcggaagcagcaagaacatgggaacatggccga

SEQ ID NO: 14369 - DNA, 1867 bp, Oryza sativa
aggtaaatcgtcgtcgtcgtcatcctcgtcaactatttcttgatcaggatcaaacttagggtcagagcaattagagtcagtagattcggccaaatctgaatcatagctactatcactatgtgccacaagtgattcagtgtcagagtatatgccctcatcatcaattcctaccgcatcgttatcatttgaaccctttttttttatttcttggctctcttttgtgtgtctctcatttgtggctccctaatttgtagcaatctcacttatccatgctctaggccttactgaaggatgacacctacattttgtgggtgaaaattgcaatggaccattgaaattattggcttgggcatcgacgcacacaacccccttatctacattgagtctaaaccactctagcatatgcttatgtgattttatctcaacaataccatcatctaaagaacgccgcaaaatcaagtactgtttagaaccccaaatgtagtgttcagctataaaattaacaacttgcaggagatcatagttatgcatatcaatattttgggttggcaaggttttacattggaggtttttctttggccctccatccggcaaactaaaaaacgacttaactctaacaactaattccaagcgcagttttcagtgaaaaattgaatggcacagccagcgacttgattgaaaatctaagaaagaaaggatgaaaaggaaagaaattggtagacgtgaataaaaaaattgaaaaaaatagtcttagcaatatattgggaaattgcgcggggaaaaagagtaattgatgttttcatgatatatcatgccccgttaaactttttcatgtaaaaacttatagttgagaaaaaaatgtcaaagaaaagagtacaacctacagatcaatactcaaaaataaaaaattagctactctaatttttcctgatctaaatgaaggttttgaactgagtgccaattcctggttgtcagccagtgtattgtgtatgttctgcagctagctcctatccttttatgcttagtagtatttcttcgtcctcgttgctcaaacatgttcttcggtcctcaataatttgtccgtagaggtttgaaggccgatttggaggatatcgtagatacaggtaccatcaatacatctcgtgctagttttgaagaggatatgacatcctgtgattattccacaacctgtgtacattgaagtgcgacgattcatgtctgatggcgatgctatccaaatagttggacaactctatcgtcaacacttggttgaactaccattgccaccatggctggaagatgagcctccacaaattctgctacactatgatttttcttacctgttgcaagggcgggtgtgggtatttgcaatgtgactccctaaaactttaattcatacttttggaacacctaaaatgatttagtattaacatcagaataatagttggaataatcaacatatttagtttctccaataagtgaacaaagattgaggaatcgatgtatttccctctaggatcaagaataaatgcaaaagcatacaacatggggaggtttttccaatatttaagataattttgtttcacactaaagactgctggtcctataagttcatcactatcatactctttgaacaaagtggcaatttcaagaatcttatgcaaatttaaattagctgttggataatatactttagaagttcagataaaaagaaattgaaagaacctctcaacaacatactaagtatatgtctatcaatagcagttgcccatcacttgtcaaaacatcacgtgtttgaagaaaaataataagcaaatccttataatgtaatacactttaacattagataagtggcattccaccgatg

SEQ ID NO: 14370 - DNA, 507 bp, Oryza sativa
tttatgtgtggatgaaagttttgatgtgatggaaaagttggaagtttgaagaaaaagttgagaactaaacaagcactaagattttcagcaatgttatctgaacacctaacctagtccattatatactctgataaaagaaactgatatatgcatcacctgtagctgatcaccaatgttgatcaccagcgcgttgggctgtggattcacggcgatccacctgccttccttgagaacttgcaggccggccacctgctggtccatgaggaggatggtgagggcgttcgggtcggtgtgcgccggcagtccgaacgtcagctctggctccgggcacttggggtagaagttcaccgccatatgctgctcctgctcaccaagaaccttcttgatgtagtcctgttccaagcccaggcttctcggggggaaatttaattttccggggcccccagacagtctgaatccgagctccgaactttttgcagtatgtgcttatgatctccctgcaccatc

SEQ ID NO: 14371 - DNA, 1755 bp, Oryza sativa
tactttttaagactaatctatacatgtagtcaccatatttgaaagacaaatattttaaaaataattcataatcttccctaaaaaaatgattcataatcaaagattctaaagtttgaccttacccttgtctaaaacgacaagtattatcagcccggagggagtaatagataaactgccataccacatcctccttgaactcggtctccactagataaacttcctttaatcgattaatttccttaaccgaatctaccaagaatccaactattggccaccagataattcgcatcggtcgatttcaggactctgaagccgatactgactctagattgatgatgacttcggggcttacaaaattttgatgttaacaatcgaacactagataaatacttcctaaagttaaaaggaaagttactaaatcttgcctaattaataaatagaattaaactatcatgccgtggtctttacgattcttccttgaactcggtcttttcaggataagtttacaaggattaaatacaagttggttttagctgattgctacaaaggtttcactgacatcagaacaccagccggtgtatgcttaacctttggatcaaacaattattctatcatatcattattgaccgattggtttctattagattatatcattgtttaattacattatcagttgattgtctatataccattatttactcaagtgtcaaaatatacattgaacatatagccgattgatcaaaaccccatcgacatcgactggtataagcatcggctagtatcggcatcagctggaactattccatcgacttcgatcggctatttgatctgttgtttgcatattttgtcagctgcaggatcaaactaactggcacgcccgcatcttatcaatttttggaccttcactagcgctaagcagatctcccaggctgttgctgttttcaacttagttcgtgctaacatagatctggcactatcggccgagcctgaatttttcgtcaatagaatcttaccaaattttggtgttaacacggtgctggcacgacctagtagctcgtgggcctatgccgagttagggcgggtactgtagcaacgtgcctggctcagcccgatagagcatgacccattttgccagctttaggtgggggtgagcttggggccctccctctggacaaaggtcaagacacaagcttagggtcttgccttgggtcatcggatgggatcaaagctcaggatacggtcatccctaccttggggttagaatccatggactggttgtgacaacagcaatgcattaactactgaacgtgacttgttggtactgtcatttgcaaggcaagctttgcattaaatgctaagtgacgcatatctacacggtgtgtgatgggagttacgtggtagcggttgtgcggctatcatgcgcaccatcatcacccctacgaatagagcaaggctttcagatggcatggttgactgtcttgccgcttagacggtctcagtgcatgtccacactttcttccaccttaggctgacagtcggatccagaaagcgtcaatagtgctctaggtaggacatgcggcaaagcgagaagttgtctttccaacgagcaccgagagggccacacaaggtcccgacgacctggtccacttgtcaacaagcgaccatatttcatatacctaatccctgtgcgctgccaggacctagccgttagagtttagccattgtggtattcctcgactaactgtatggcaaggt

SEQ ID NO: 14372 - DNA, 585 bp, Oryza sativa
ttgctccatcactccacatggttgagcttcgtaaaacgggaggggacacgctggagtttcacaatgtatgttatcaaactttgtatattctatcatttcatagtgggtcattgaaaaaaaaaatcatttcagtagtacccagcatctagttgtttcttgatgatttcacaaacgattaacgtcatttctatcaaattgcatgccagttctacaacaatttctcgtcagagttaaaagacatagtgtggaaatctgaactgacgcaaaagcagcaaagaagaggtgatctttagtattccaactatccaatgctcctggatgtagttccccctttgtagcgtttgcaccatttctccaggtgataccaaaggatatcgtcctcctggtcttgtgcacattgatgaattttctgtggggtcacatcttgttgtgccaatccttgcaaaagggagcgcttttttttttctttttacccttagcgcaactgtagacatgctcacatgcatgtataaggccctcccggagatgcaccttgtatttgcagttgggatgtcaaataggtgtcctacatgctttggtgaccag

SEQ ID NO: 14373 - DNA, 8969 bp, Oryza sativa
attcctgcagcccatagaagacatagacactcatatgctacatcaggacaatggaaaatagtttcttctcgacctgggtaaattttctgtaggtagaatagggtggaaactccatcctcattttcctcctgcagctcttttatcgaaaaaagaacaggttcattgtaatacggggtcaacgcgctgcagatagaaatagacattatcagtttgacaagggtgccatgagaatactgaacatagaggcactgcaaaagtaatgtcaaaaggaactcacaaaaaataatgagcagcatacaaggacttacgaaaatgaaagcatgtttctgactttgggagcatcaggcatgtccataaacaaagaattggtgaaaaaggtaagacgccttctagcctccagatttgaggggacatccatagcagactctttcacagtgagtaacagttccagcctttttatctgcagcaagaaaaaaacattgttgacactcatttagaattaggaagtttagccaacaacagcaaatggttcagtctaagatatagtaaacctgaagcacacaggcaaacacaccttctctatccaggcatctgtgaattgtacgggaaacttgatagctccagccggttgaaataactgatattcttgatcccatgtcgttgtgccttcaggcctttggtatgaaccaccatgacttgactccaaaatactgtcatgttgcaaacaaataaaataatgacaaactgctggaggtttgaacaggagcaatcatgtcatacaaaactcatagcagcagaatttatttcatatctcgtctacaagcctcctgcctctatattttttctttccttcacatccatgagtcttgtttttctaaacctgcacaaatattgcacatggtagtgaaatattcactatcatttcacccacgctatcaacaagcatggttggtccggaaaccttgtactaagacactaagtgatgatggttctgtgcatctccgggtgcagaagccaggccattttattccactatctaaaaatagcaaaatattccataattttattgtccattgaaaaatgctacaacagaagttgctcatataatgatattaaacagtaaatcgtcatggttcagtacttcatcctcatgatatttgcacatgtttaaaacaatagttgtacctagaaagttggtcttccattatatctcttgttacaacctccagcatatcttgaaaaatctttattacagcatccctatcattcttatcattcttctcctgatatatataataaacagacaatgagacaaactagaatctggtatacagacatatggacagactccatgaagtttgcatgtataacaagcattgcgaatatgagcttaccaatcatcatcagtaattgctaaaaaaaggtcatcagtagacagacagtcaatcatgaaaaggcaagcatgtttctttacgcgttgcattcattaagataaaatgcctagcttctcatcaatttacgtgccagaatgccaactgataatcctttgtactaaaatactttccggcaatataactatcttttagatattacaaaatatatttcgattatctaacatttgaggaaataaacagtacattttgcagtaatttgctgataaatggaaaataagctacatttctttagaaagataaataagctacatgttatgatgattggttagacaaaaaagatgttgaccttaccaaatattttaccaattcaacaaacttattgtaaagatctggcaaagcgtgcatattcaaatcagtaataactttgtcatcagcaatatacttttcaacttctgcaaatatagtatttatgaccctgaaaagcatcacaaaatgcaccatggatcaggaaattatttcttcacaacaatattcaagccttttggatattccttagaaaggatacataacttaatagacaaagcctaggagagacaccttttctctggttcaccttgtacaagatccttgatgatatttttaaatgatgcatagcattcttcaattgcacatttaaaataatagtcgttctcaagcctctttttcaggtcacggtctttgccattgctatctttagccatgtcaacagctatggggatctaacattcacattattcaaaacaggagtgaggtttgttcaaataaaatataaccaaaatgaaaaaagaaagagaagagaaggaccttgctggcaagcaaaaaaggaggccactgcataatctcaagagcctgatcagccacatacggaacaagcagcagctccttctccctgtgttaaaatggggtccacaagtttaaaggtagaaaacacaaatccaattggaattaagtagctatccatgctatgcactcacttgttatttataaggtcctcttctcgaaagctcgtgataatttcgttccacatctgtgcaaatcttgcggctatcttctccttgtctgtgtgcttcctctgaaatgttgtaacagtaacataatatttcagaaattagcgaaccaataaatataaaaaaacaatgtagaaatatgtaaaagaagaatagagagacctcaaaacgactgtgcaaataagactttagacccttcttcctttttgcatcagattcttcagccggaattagacaggcattaaaggctaaaggtattgaaccaaagcgagatcgcagcattcctagggtgcggatctgtctcaccagaaaaggaaaaaggaatgtaaataatgtttaacagatccgcagtcattcaaatgaaacccataggcagtggtcatgctggggttgcacctacaatttaatgactgttctcattttccacaaagaactaattcaattaacagaaagtcagaaggaagtacttaatcaagttattggcaccagttatctcaataagagtaaatttcacaaaactacatatactttgaccaaactatcgcaaaactacagatttaagaagatgtatcacaaaactacagatttagcaccaaatttatcacaaaattaatacacgttttcttttggtctaaaggtttccagttgtttcataagcgaacaacaaaaatgatttgcaaattgcattgaaataagaagactgaaataaataaacagctactcccattgttcccacaaaattgtcactgtttcaattttgaccatttatatttttaaatggttagtctatcatgatatgaggcttaatacaaatgtttacaatgcaaaacactttgataatatagaatatttttaggtacttataatttctttttgcagaaaatacaaatgatcaaagtttaaatatgaatagtgcttgggataaatatttaagaacttgagggagtattgctgttagcatgaaaatattgggaagcaaaagattttaagcgtactagtgtactacaaatagtaactggtcactgcaacatggacaagctgtcgtacaacaaaagaaaagacaaatataatctgtttgaaagatctattagagagagatatatattatgttctttattttaaaattatgtgaggggttttgttgcatatttgcctgtaccaatacgtgtatatatttgagcccagagccctttgatgaatacaagtgatcttcgcaacaagatccagacatagatatacaaaagtataaaaaggaaaattaacctctccaagtcgttggaaagcaccataaattccaccaagcagtgtcgagaagattgtataccaaatttgtgtatccatgaaatagacctggaaagcaaacaagaatgcagaaaataattgtatacttccttctacagcacaaatctagcttatcacaattatcttgccacaaacaaatggagcttcctaagctaaaacaatgcgagtgcttaaaaactttctaggaaaacaaaggagaaggtcgtaccaaaatgattggagcccaaagcgcaatcacgacaccaatgtttccgttcgctacataacaaaatttaggattgttataaactaatatacagctgaaaatgttgagtgacatagttaccttttgggaaaaactcatgccactgaaaagtgtgtataggtaacttcatgatatccttggtaggttcgacaagaggcttgatctttaagaataaatgcaagattaagttggttcatacagttacttcaacagaattgatttctaacaaggtaagctcacaataattgagaaaaaaaaaaggcattgctcaacatgaactagattcagcataatcccatgatttcaaaatgtaagtccccttaattgaaaggttcttcaatgatcagatcgtcatggttaccagttttattaggtgcatcttgtgtgcgtcaaataaatttatcataacattacactagaggtttctaaacttgtagagaaggtccaagtggtgttaaacttggaagcagaaggtcccaaaacatattgagtgctgctcaagtctgcaaacttaaaaaacgccatttatgtcataaaggattattttatctgacagaagttataaaatggaaatagaacagattattggatatgtgaaactaatgcggatcatttaaattgatgttttctatagccatattgggtattgtgactttcaaattggctgaaagagctgacacagcactagaaaatggaggtaagcagcgcacagtgcagtttcatacattgtgacactacaccaatactattttagctctcgtaatttaggtaaccaagcatgtgtacttgctctatcattgccatctgctaaccatgatgagaacatttagatattacacataaaacatatactatcaaaagcattaaggcagatataatgcaacatgctcttaacagtagctaaaacagtcgaaaaaaatcatatagcaacatcaccgagcacttatattccaaaaatatatatctatatctaatgtgtccaaacaaaactgcagttccaaatccatagtaattttggtcaaatggagttattgagataaatcaaaatggaaagtaaacagataattacctccacataatagctaaatgcaaactttatcaaaagaagagcaatccaaaacatggtgtacctggaaaaattgagataagatccttttgttaacatgcaatgttgtatagttactccctccatcccaaaataagttcatttttcacccatcccacgcataccaatacaaaagcaaaagattaaaatacacctattttatctactcccaatgcaattattctccactttcacaaacttcgatgcaataattactcaaaaatgaacttattttgggacagatgaaaggagctaaaaatgaacttattatgggacggagagagtgctagttagtgtgtattcatggaatattcacatactcagttatcattgatacaatataatgaacagtaatgtcaagttcttacatgaaaagtgagaaggcactttcatgcattcccctaccaacaaatagacgaggctgcaccaatacacacaacataagttcacaatgttcaactagatcagaaaataactgcaaaacctatactgaaatttccagagaaaatcagtaagtggcaccaatatctaggactttgatacaagaaaggaattgtataaacaccaaacgagttgctaaatcaatgaaataataatttaatcaaaataatccaaaaaagttaaatagtagtgcgtccaagaatactaatagaatatttttaaaataaaaatgatattaaatgtaaaaacagaactgttagaaggttgtaatttcaaaaccactgtttcctcatattataattgtttacacacagtattatttctttatttctaaataaataatgtttttattttgttaaataagtttactaaataaataatatttcatcgagagttaattacttatatttttgacccaaaaatacattttgcttcgtcatatcaggtctccttctcaggtagtagctcacaactatattttccacattatcttggtcagtagttaactgtagtttacaaagaaaaatcgagaatatcaagttaattccctgcaaaagagattaacaaatttatgcctaaattttcttgatgggtaaaaatgatatgatttaatgagtttaaaatgcaatgttgataaaaaacgaagctatcatgcaattcactaaaatgtaattatgtaaatttacctgtgaccaccacatgacgaacctcacaaacttgtagtctgaactttcaagtatacgccgtagaaatgggagaagaaaaagaatagcagctagcaaactgggagacaaatatataactactgcaaggacaaagagtgatgggtggttttgaccatttccaaaccagcctttgatggccctgataattcctgttggattctcccaggtgtatgcatatgtaaccggcagtaatactacccacaaggctgctagtgtgaactttagaacatatctcagtttaactgcaaattccattgttctcctggccttccaattaaagattatatcaagtgtagctgtaaataccaataagaattattcaaataccaagaaattacataactatggaaatggttgtgctgtcttgtgctcactcaaagatcttatcactacacaaatataaattggaatgactaaatatctaaattttctttcacataaaatatacaggtgttatatttcttccatgctgcattcactgactaattcgcagaaaacatattagcttgttggcataattatttcatgtttttcagaccttgcccgagatttagaatagcagaagtaataaatatgctcagaatcttcttgaaaacaacaggatcaaaaatatttcccagcgagcctccattccaagccagaattaccataacctagtatagaaagatcagtaggtagatgagaataataaaaatggttttataggtatctattattctattgcaaaggtaaatatgattctgaaatctgcaagcactgcaaactactagtattctcagaagagaataacgtagaaatggaggttcatacctgaagagctagaataaagaaactccacattctatcgaaactcctgaatatgtgccaaaaggagcgtagctcaacaaagttgacctttcctttctgcttttcagttcttgtggtctgcaaaaaggcaattacactactattgtttcaaacacccgaaaaaagaagacatgatactgaagtaataactaaagtgggctcacttcatttctttgatcaggtgaatttaaatgttgacaaaagaaatcagcatccgcacgcataggccaacctaaccgaaagcactcagcagacctgcaatttaaagaatgtaaaatataggcaacaggggtacaaaggtgtaagataaactaataccagaaatattcatttagatcatcgtagtttctccactcagaatgatttcctttttctcttttgctcctttcagcttcctgaggaatgatagcaaaatactaattttagcaaagtagtgtaaaacatatattgaataatggaatgatagctgagaacaagatatacctttgcaatggtgaggtaaattggagtaacaactttcttcagaaaggcttctttctcacccccataggctggcttcacatattcacccgtcaaggcactcacatttccaactagcataccatacatttcaaatgccatctatagagttgtaagtgctagagttgtcagcacctcaataagctatcaaagtccaacacaaacattgttgtgggcacagtagaagaaaaattctgagctaaaacattcttcgaaggaaaaaaaaacttatactaacacaataaatgaactccacgaatattggttgatatggttgcaaaattagactctccataggatcaactatagtatcttgatagaacaggtcgtagagttgaactgtagattagtataaattttgctcaatatgaatgattgcatcctcatttacataaaggaatttacttaaactgatgttgctcaggcatacaattagcaattttagctactgtccttaacaccttgtgaagattgatcattcatgaaacaacaattacagaaaaatacttcctctatccacaaatataagcattccaaacgtttgaaatttgtccacaaatataaggattctagagtactacttgtcccatcaatcgcctctcgttcaaaattattcccatattacccctaacgacccttccattcccatccatccctcatttagtgaggggcaccaaagtcttttctcctcaactttaacctctgctagacaacctagaaatgtttatatttgtgggcggagagagtaactgtaaattatgagttgtgtgatctcttagactgaaacaacataaatttttaattcgattttagcaaaatgagatgtcacaacagctgagttgaaaggagtgaatcatatagaagataaacatcataattgagttatcttatgatacagggtttgtgtaactgcagtgttcataattgttaccgtacatcaacatgtagccacttccacattctttctagatgttcatatgatcaatggtatcaataaaatgtgaaacagggtaggcaataagaagatggtcaacatcttttttactagagtttacccggaaaacattttacaattgaaacataaatcacacattaatacctgatgactattaatctaataaccccatgtataataaattttacagcataatgtattgcttaaattattgttagtgttattccaaaaaaacattggttggctaattgcaaatgaagaaactatactccgaactgcttacctacatgtttgttcatgcaccaacccagaactttgtttacaggtcaagtggatgcaaaaacgttgacccacgcacggttaagacaacacaacactaatgctttgagtgt

SEQ ID NO: 14374 - DNA, 516 bp, Oryza sativa
tgcgtaccgatgacgagaggcaggagaagtttatgtctggtcttgatgatgaattgactaactagttgatctctagagattatgaggactttgagaagccggtggataaggctatccgtcaggaggagcactgtaacaaaataaaccgtaagaggaaggcagctcagttcaggactccccaggggaagagtcagaagcctcgtttcacgatgggacgtcacggtggaccttccaccatgattatccggcagcaccgtccctaccacccgggtagcttcaacaagaaccaccatagtagcagtcacaacaacagtgagcagcacagcctcaaccctactccgagttcactaaagattccagcttaatcagttcagccagctctgccagaatagcccaagaggttgggagaaaaacccgaactctgcttcaattgtaacaaacccggacacacggttggaaagtgcccgaagccaagacgtgctggacccaagttcgttcaggcccgtgtcaatcatg

SEQ ID NO: 14375 - DNA, 672 bp, Oryza sativa
ggggtgaagttgcttaccagcttgagcttccctccaacatgcttggcatccataatgtgttccacgtctcccagttgaagaaatgtttgagagttcctgaggaacaagcaagtccggatcaaatcgaaatccaagaagacttgacgtatgtggagaagccgactcgtatcctcgaaaccagcgagagaaggaccagaaacaaagtaatcagattctgcaaggttcagtggagccacctctcaaaggaagaggccacttgggaaagagaagatgagttgaaggccgctcatccgcacctcttcgccagctcttcccaatctcggggtcgagattccgtttaaggggggtaggtttttcacgccctaaagtttcccccttttccttgctttaaaaatttgtaagtaaatcgtccggagaaattgttctaattaacctagagttgaatccctaattaataactgcaattattaattggaaatggcattgtgggatttttcttggtttccgcatgtcacaatacattaacaggatttttagtggaattttcagagccttggaaataattttaaccaattaaaaatcaccaaagtgcaatatttaatcccaggaaaatccttttcctctttttgttttcttttccttcctttttctctagatgggggctgcaggaat

SEQ ID NO: 14376 - DNA, 678 bp, Oryza sativa
tctgagcttccattatctttcttaatgacaggttgccaacaattcagcaggaggtgcaacaacgtaaactgctttatatgggtctgtaccttcttatctggggtgaagctgcaaatttgcgatttatgccggaatgcatttgctacatataccatcatgtatggtgtgaataaaaatctttctgcatcttaaattctccttttacttaaatttatatctctaattctttattttagttgccggattcactttatgaatatatttctcttcagtaggccattgattggatcatgtaggataacgactttatttatagcttttgatgatgcatttgctcgttctcttcatctgccttaaggactgccatggagtactgccctgcaacaaccatatatttcatgatgaataaaacaaacaatgaattattttctgtgaatggatgcgcggagtatgccatgaactgatttggttatgtgcacactcaaagcattagtgttgtgttgtcttaaccgtgcgtgggtcaacgtttttgcatccacttgacctgtaaacaaagttctgggttggtgcatgaacaaacatgtaggtaagcagttcggagtatagtttcttcatttgcaattagccaaccaatgtttttttggaataacactaacaataatttagggctgcaggaat

SEQ ID NO: 14377 - DNA, 848 bp, Oryza sativa
tgttcacctcagtaatctgtaagcatgatttgttattttccaggttattgttggctatctactggccggttctctcgttggacctggaggcttgaactttatcagcgaaatggttcaggtaacatgactagttgacaactgtagcttacaggccacacttctatcttcttcgtagcctattttctccatcttctgatcttatttcactttcttcatgtagttctgttaaaggcaatatcttttgtaaaacgtctcgaccaaaaaaaaaagttaacaggcacatttgaaacaccatattttgtgcatacaaggaccgtattttgttagcctaaatgaaacacattccatacctattcctgtgtttattttacaatacatgacagtattgctaaatatagcatagtccataatggtaatgaactaatgacaacacaagagtaatgccatgtcaaccctaagctgtgctacttgatagaagctctacatttatcatgaatttgaactattatgttcaactgcaggtggagacttttgcgcaattcggtgtggtgtttcttctattcgctcttggccttgagttttcactgacaaaggtaatcgtgaattcattgccattatcttttatctaatgttttctcttttctcaaatatgattatgaaactatataatgtgtcaaaggtttactgacttgtctttcattcatcagttgaaagcggttggacctgtcgctgtaattggtggtctactgcagattgttctgttcatgttcttgtgtggcctaactgctgcggtattaatatttatttattgtccgttgatttttttcgttgtgtttgcttcatcatat

SEQ ID NO: 14378 - DNA, 2012 bp, Oryza sativa
taagtcaaatatccagtttttttaatctaatttccttgctcttgaacaaagctgtgaattgaattaatcaagagatatgcacttttctagcattagtgacacacacatatatgtcattcttctgttctttcttccttttgtttcattaggaaaatgaatgggcctcatcattgggcaatcaatacctcatacctcaatgagataatgttccttgttaccccatattaacaatctttttaggacatgttcagtttgatttcctttttgttcattgtattattaacatttagaatttatacaatctgcgctaatgtttggcctagtcagctaatcaccaccacggaaagtggcttgcatatctttatttacttggctttagccgatactaatagtgtatcatccattacagatgttgcatctgatgaagttgcaatttgtaacaatgatggcaaagatgctaaacttgctaatatctccacaacaaaggtacattaagttaatttctgatcatttttatttttcatgagaaatgcttccgataaaccactatatattgaagttaataaggaaattccattttattcattcagggctcttcatcatcaactgctggaaatgattcaggggatttcaaatggttaggtcctgaatcgcattctaaaaaagggaagagctacaaatccttctggcgaaggggatttacattcatggtacgcctatcaatcattcaacgcacattttttttaaatcttagaggactgaatcttggcttacatccattgtgttcatgaccctttttaggttcacgattttgtttacatcttggtccaacatggcaacaaacttgttgcttatgtggaagaactctatgaggataaccatgcaaacaagatggttcagatacgacggttccgcacactcaactccaccggtattcaactttctccaggtgttaatgatagagagatcctccactccgacaatttgcaagacatcggagttgaatgcatagatggattggcttcagtcctgaacgaagaacactttgagatgtttcaggcaattgccaacaacaccaacaggcaaccctacctatgcatccggcatatcgacaataacagcaatgtcaagacctttgacattgcacaactgcaagggtattcagaacaggagatatttagaatagtctcaggcacacctcccgtgaccgtgcatcccgacgcatctgaaggcagcaagaacacaccaagatcatcagccagaggtcatcatcatcatcggaccatggagaaccccactgctagtgatgagaccaatgttcaggccacaacaatcaatgtccttgcacgcaatgctgcaccaacagagtctgcttctgctctgataaactctgccctggagaagtatcttgagcagtacttctctcatggttgccttgtggaatgcctaagccaggacagtggcattaggggctgttggttcatcggttcagtgattaggaggtgcggagatcgcatcaaggtgaggtaccaacacctccaagatcccgaaacgccaagagcaaacctagaggtatgtcacctaatttcagtaccacttcagaaaatgtagttcgttgctgacaaattttatggtggcctctattggtagtagaatgaatgtacaccttttgttctttcttattcattggaccatatcgatttatactactatagtagaatattttcctctactgatagtagaactcataaattaacacttgagatgacttgtacgattgataatattgatagtagagcactatcgttagagattcaatagtaacttctactgttaataatatgttagagataagagagaatcccttatatgccactgaaaattggtctgatcccttatatgccattgaaaattggctcttcccttatatgccattgatccaaatttgcacaccctctcatgccactcccgttagttgaccgtgtgttgaccgttaatcctcaaggaaaaaa

SEQ ID NO: 14379 - DNA, 1096 bp, Oryza sativa
cttacatgaatatatatatatatacatgtatatatatatacatatatatatatacatgtatatatatacatatatacatgtatatatatacatatacatatatatatacatatatatatacatgtatatatatatatacatatacatatatatatatacatatatatatatacatgtatatatatacacacatacatatacatatatatacacatatacatatatatatatatatatatatatatatatatatatatatatatatatatatatatatatatagagtgcataggactacaagcatttgcaccaaattggtatagggatattaagtctaaaagggatatagaaaaaattattcaaagattagaagatatccaaattataggagaaattcctatgaaatattgggaaaaaaatgctattgagtgcaaaattaatataataaacccagagtatattattaagactagcccaatagaagcaactccgaaagacatagaagaatttaagatgcatatagaagaactgttgaaactaggagccataagagaaagcagaagtccatataggtctgcagcgttcatagtaagaaatcatgcagaagaagttagaggtaaatctaggatggtcataaattataaaagactaaatgataatactatagaagatgcctataatatcccaaataagcaagaatggattaatagaatacaaggtagtaaatatttctcaaaatttgacttgaaagctggattctggcaagtaaaaatggcagaagaatctatagaatggactgcatttacatgtcctcaaggacattatgaatggcttgttatgccattaggattaaaaaatgcaccagcaattttccaaaggaaaatgcagaatatatttaacgaaaaccaagaattcatattagtctacatagatgacctgttagtcttctcaaggacttacaaagaacatattgctcatcttgaaatattttttagaaaggtggaacaaaatgggttaatattatccaaaaagaaaatggaaatatgcaaagaaaaaattaacttccttggacatggaagatacaggattatcttct

SEQ ID NO: 14380 - DNA, 986 bp, Oryza sativa
tatgctttatagggtgtctttctggattccttcttctggattccttcttgagtagtcttctgaaatcttcgtttattcttcttccacgcccaaattattgatattctattatcaatatatatgaaaaacatatttagcttaaagaattctattcatctggctgcccatggccaccaagatccattgttatctggaatagtgtagattcctgatcttgaatagtgatctttgtcggggatgacaagatctttattcattatcttcgttgattatcattggtgctgattgtaccgtgtcaatctctgatggttctgttttctgaaaccactgagccaggcttctgtagtaacttttcttggagcattcatttccaaaatccggtttaattatgcgccctgctcccttgaagtattcataactttggttgtagaatttgctgataaaaatccttgtgatcttgttttggaaaaccagctgatattcataatctgtggtgatagcttcttcaatttctgcagcttcagaaaataatctccaattttcatgattagcaactgttgtatatatttcttcctcttcatccgatagtttgctaagaccgtcttcttgaaaattaaattgtcccttcatgatatatatataatgaattgctggacgaacaggtggtgtgaattttggtggtattgaggagaagataatcctgtatcttccatgtccaaggaagttaattttttctttgcatatttccattttctttttggataatattaacccattttgttccacctttctaaaaaatatttcaagatgagcaatatgttctttgtaagtccttgagaagactaacaggtcatctatgtagactaatatgaattcttggttttcgttaaatatattctgcattttcctttggaaaattgctggtgcattttttaatcctaatggcataacaagccattcataatgtccttgaggacatgtaaatg

SEQ ID NO: 14381 - DNA, 5571 bp, Oryza sativa
atataagggaagagccaattttcagtggcatataaaggatcagaccaattttcagtggcatataagggattatctctagagataatgtagtaacttctagtagattactaccagtagagctatatataaaataaaattctttcttttatagtaaccagatggcaagctcccactcatgtccatgaagctcaccttgagttaagggtgcaagcggctacccgcgaaaacccacttataagctaaactaatccgtgaactcgcttattttgacctataagtgggttcacgggtgacccacttgcacccctaccttgagttgagaaggctgacacgaattgattgttctcctgcaggaatggttgcttgtgacaagaaccgctaatcctgacacgctacgcatacgcctctctggaagaacaagaattcgtccccacaatatgtcggagagggagaacccctctacgatcagtgttggcaccgtcattgacggatggttgtatgatggttggtgggagggaattgtgctgaaggtgaacgatgcaaggaggctgctagcttacttaccaggtgaattgtcagttgattaccttcttagtggattcaaatttaacagtccatgatgcaaattcttgcttgtgtttagcttgttgccatgtcaacggagttctttccctcgtctgaatttgcaggggagaagaagatggtgctattccgcaaggatcaactgaggcattcactcgagtggattgataacgagtggaagaattttgctcaccgggaagatatcgcacgtcgaatccctagtgcggaagatcttagaataagagtcattactgcacgagaagttcttacaagagaagaagtaatgaagcaattggaaggcctgaaaacaaacaaaggtggttcaaactctgcaaaaccagctgcagagaagggaagtagcagctctgctactaagaaaaccacacctgatctcattaggcatgcaacaaatgatctaggatctttaaacttcaagcatgtcggtgttcctgcctctgaagaaattagaactgataacaagggatcgcaagttaatcttgaaaatgtcctaaagtcggacagtctaaaatggaccgagcgtaaggctagaggatcttttggtccaagaatgtagtcggatgggatcgttggtagcatcagccatggatacatcaaggaacagagcccctgaggagatcctggagaattaattgcctgatgatgaagtagtatgcaagatcaatggagagccattgccgagctagctgttcatcagatgaaagaacttgcaggatatgaattatgaaggatgatgcatattctctttttcttgatgaactatccaccttctatttttctttatgaattatgttctttggtgtgactttggttcattttctaggttattatgtcaaccacctgaactgagttttggacttctgatgtcaaagtcctgtgtgtgacgcaatccatttggttatattagctccataaaaaacttcaaatatcttttattaatatcatgagtgtagtttagaccatttttatcatccccttgtcatctcatccaatttgaaatgaaatagagtttgtagtcttaattttacccctgaattgctacttctgaagttaatgtcacttgtcggcaaaatttgtttttggcgcaacaaatgaaaaaaaaaagctgagaaagtagcgaagattctttggttaatttggtccatgccactgcaaatgtggctattcagaaaaataccattatcgtctattcgtaaccatgccactccaattttataaaattagaaccatgccactgccgtcaccttttccatccatccgcttcctttccgtcttcttccttccttctccatcttcttcacggcatcggcgtcctgggccatcccgtcggccgccgctctctggcgacagggctgtctcccggagccaagtggtcgtcgcggcagctgccaggtaccgctgctgctccccacgcgcgccggagtgccgccggccgtcgtcgcaaccgtggggttctgctgctgctgctcggccgtcgccgccaccaggtgccagcgcgagaagggaggatacagtgcggtggcttcagctatggcggtgcaaacgacggcggtggcgacgcccgcgctgacatgcggagggagggacggcgcgggctccggcacatggaaggagaaggggtgccgagggagccgggcatcggcgctgactcggcacgcaaaaggagccggggcacggagggatggggcggcggtgctggctccggtgctcagagaaaggagggaggggatggcggcgccagcttggctccctctcctccaagcttgccgacttggctctgggaggcggcgctatcgctggagagtggcggcggatgggctggcccagcagtggaactcggtggcggcgatggccgagcagaagtggaactcagtagcggcgacgactaagcagcagcagcggaaccccgcggtcgcggcaatggccggcgacactccggcacgcgtggggagcggcagcgggagcagcggaacctagcagctgctgtgacggctgctgccccatcctttctctgagcgtcggagccggcgccggcgccccatctccccgcgccacggctccttctgcgcgctgagtcagcgctgcctcccggctccctcgacgcccctactccttccacgcgtcgtcccatccctcctcgtgttagcatggacgccaccccctcccttcgcgcgccggcgccgtcaccgccgtcctctccctccgcacgtcggtgctagaagatggagaaggaaggaagaagatggaaaggaagaggatggatggaaaaggtgaggcagtggcatggttctaatttcgtaaaattggagtggcacggttacgaatagacgaattgtaatggcatttttctgaatagccacatttgcaatgggatggatcaaattaacccaagattctttgcggtcctggtgattcaattgatacagaattttgccgtcacaagacagaagagtctggacaatgatcatgctccctggtaaaactgtcagggttaaaatgagtttatctggttaattgcaactttatacttgattattattcttgaattgctgataccgtgaagaaagaagctgtggaatgatcaaatacatttccatatagctataaaaggtgcacattttctacattatactaatgacatatctatccatgaagtacatccattctttattcttatcaaacttcttgaaacgttgaaaatcttaccacctgtccaacttatcaatttcttgcatccaagtctcaaaccccagatggaacatcatgaactgaattatgaaaagctattgtttttctctgcaccattagcatgtggaggcaggaaaagccgaaatgctctagcatagcttgtatgtacgtatgtcttatcactcacaaagtggcatcacttagtatgcatgtacgcggtgagatcacctagcatacatatgtatgcatactccatggtccatgttttgacttgtgaagaacaacacatgcatatacaataaagaaatcatttattacatgtatctactacatatctattacatctattgtgagatatgcttaaatctatagaaattttaaatatcaatatctctttttagtaaggagtaaatatgagaaaacataaaaaaaaaatacaaacatgggtgcactgggccatgatgcccttgtgctcatctcctgttagctgtacaagtcaagcgctccccttttccaccttgatgacatcaagaagggggttaatagagatagaaacatgtatgcacaaaaataatggtaccaagaaaagaatatcattcaatacaaaaaataaaagtgtatcatgcatgaaaagcacttgttccaaaaaaaaaagaagcaaacatcattgcataatcaaaccatacctacaatacaccaaaaaaaaaagagctgtacatagtgaaacatatattaatgtaaaaaacagaaaggatgaaaaaaatagagaatacatatagattattctcttacattttatagtgattttcttgttttagtacatatgacacatggtagcatccatgcatctgaaaattctagaactttacgttatatactcaatatcttttaaaaagagagtaaactttcactttccacagaaaagagagaacataaaagtgctagtgtacaaattccgtttgtttctctaccactatatgcctactataacacatattttaagaaaatatagcaagaaccacatatatcacctacatctggacttctgcatttttatctaaatgataatcattactacgttatcactacagcagtgctagttttatcatctaggataattcagcacctatattgctttgaacagctgaagagaaatgataaaaatcctggtataaaaagagtgaaagataacatagaaaattgattatgttgtggcatttgcatggataattcttttagtttggccttccacatcatatgctttatgtgattccgtcgtattccatcccttagagtgaatgataagttgctcaaaaggaaagtaaacaactatcgtttgttgtacatttgtatttttatggcggcaccatttaattttccacgtcatatgtttgatctgtaccaccatattctatcacataattaaagaggacaagaacaaagtaggtgtcatatgcatttatccatgcatgactcaattctttatccttccacatcatcaactccacctccaactcattctatccctaagaataaatgaagagataagaaagcttaagatagaaacaaatatcatgcattgtacatgtaaattcaaccatggaccaccaccctcgtccaaatgtagccacataataaatgaataccaaatttcaggtgacctccctaggcatttcacttttaattttggatttttcttatgctagtattaatgccatcaatttttttcattcttgcccttcaatatttctacatattcttttatgaagtactcttacttttctaactacacctctcattttgtctaatggaatataagttctatgtgaccccattcaataattctattgccaaaatatttagaatcaaattacccaaactttttattgattatgacttaatacaaaaaataatcgaggcataattaatgttaagatatggtacgatgctaaggtatgatacaatcagacaaaatcaatattaagtttattcatggaatgtttggattcgagttaacatcttcacacatgtttgtacgatttggttattatttgcttacattgtccctaaatgatgatcttttaagggatgaatgctttaacaacaattaagtatataattgaacagtttcatgaaacatataaacttcatggggttccaattactttatgaaaggcgctcaacatttgctaaaatctgaataaaaccaaaggcttcattaatcaattgagtatatataaagaaaacaaattatgtctatgataaattccaatccaaaagata

SEQ ID NO: 14382 - DNA, 13933 bp, Oryza sativa
aactcaacaggtatggcgtacaaaaaactagctgaatggaaggttttattggtagtacaggggtgaacaggtagagaagaaaagagttcaggactacaagttttctggctacaagttttccataaactgcagaaaatatgatgcaacagctgctaacaaaaagagcacatacactgtgaagaaaagccttccttgcaatgtctgaaatagttagctgactctggctgacaaaaggaaaacaaatgaaatcaaagttaaaccatcaataaaattttcatgacattaatcaagaatgtatcttgacatagtcaaaaatttctaagccaaaaaagattcgaattttaccccttcaagtgctgctcttgcagctgagcctggagctggtgctcagctaaaattccagatgaacccagggctaaaagtttctccttcagaacagcagctgcaataccaaaaacaaattttaaaggatgtatgggctgctcaaatataatcgtttgttaataatatatataccaattatgctatatgaaatcataatcaagagtgacataattaccctgctagaattgttcaaagttcaaattaaggaaaagcaaataaaattcctcttccattttcaaccaatggtcacatgaactaaataagaattttgaatatatacaacaaagtaagaacgaacaatcatttacttaccagtcgatcccctggctccctgaagaacagcaaaaagttgtctcctcccttctcttgtgtatgcagccttgttctttgcagcttctgtcccagacatatcctgcaagtcaaatataaactgtttctataattactgccattaagtaccaaacttatatatggcctggagttaatgcgacctaactgcaaaaattactgcagccaaattaaacttggggtgcactgccaagtttcttattcgaggtaaagggtacactgcttctccaccttgaagagtgagtatcttcgtgatatccattgtttcaatagctgcatagttaaaacagaaacagttgtaaaacttattctcagaagaaaaaaaggtagaatatgcaatcggcaagtaacactgctaaataaacaagatcttgtgtgatcagcatatgaaataaaatagcttagaagctagtatgctattagcccatgacgcagatggcaaacatcaaatggaggttgcacttacaccaacaccaggaggccacagcagcaggggccaaaccaacccaactcagatataagctgattatttttatttgtttgttatctccttaattaggtaactagagaaaagattggtttgaatcagacattttttggcattgcctatctgtcttctctaatgctcccatgtgtgctcttcccccatgttttgcttttcccctgcagcaccactttctcctgaagtcccaacacattcaggtccaaccagtaagacccagggccaaagaagtccactaaacatggcagcccattctgttgcaatccccaggatgtggcataaaatcaaccaggtacatattaaccagggaaatagcaattgaatctgaattataagggaggaaagcagcttgagaagaaaagcataagtagcatggaaacaaactaacctgcatgctcaaagaaatgagtttccataggttgtctgttaggattaattataactcgtgttttccatacttgaagtgccccatcctttgaaattgtaacaagtaaccgtagtgtcggaagccaggaaacagatgtgataggctgggaaccagcctgtgtactgagtagaagtaaaagacacaaatcagataatatgaaacaggaaaaataaaagaggtaaaagacaagcagaagtgcagaaccagaacaatcaaaagtacatggaatagtatccatccaaacagagacatacaaagagttattaagttagctgcactaaggctgagttctttcaccaaatttcccaactcacctccctcgtttccgcacgcacgcttttcaaactgctaaagggtttgttttttgcaaaagttttctatacaaaagttgctttaaaaaatcatattaatccatttttcaaaaaaaatagtaaatacttaattaatcataagaaaatgcgtcgctccgttttgcgtgcgcggaaggtgagttcccaacctcacctcccgaacacagcctaagaatatgtgttctaacatttctcaatcaaattcgtgccaaggaattgcaagtataatatcaaaacttatattgaaggtacatcaaaatagatctgcaggctaatgtatcctatgggggcacaggaccacactgaaactttggtcccaagacagtgcctaaagcccattagacctattttgattaaataataaaaaaagggaggtagcccctcgaatgcttgtgcacatagtcaacagtcaacactgtgaaactttaatcgagatatttaactatttgccactcttagaagtggcatttaacaatttgctacctggactctacatgtcatagacacatgagggcccatatgtcatagacatatgagtggcaagttattaaaagccacatcgaaactgttaaatgcgccccactggtgcttcaagcaactcaatgcctcacctcaaagtatttccaacaattaaaaccttactggcttgtccagataatgaatatcaaaataatagaatacattggaaaagaaagaaacaaaggaaaatggtcttgtttttacaacctgaacaatatataatgtaaaaatatacttacattccaatcatacttggtctctccgttgatacatcccatgccaagagagtgccacctctatcaccaataaatatccactctagggttggatgaaatccaaaagcacccgctccgacaagcttaattgtactgtcaacagcaactaaggaaagtacaatctaagagtcatacaaaaggctaaacatacttaaatatatgaaaataaagtactgcatcttacgttgcaaggtgtagtgaacaacatatgtctggatgttataagcgcgtatcaatccttcagcgtaagctacatactgaaattataattttgcacatcaacatatgacaaatacagatacacaacaacaagacaaccttgtgtaggactgcagtgcaatcaccagccaaaaggtaaagctctgattgtatttaccaggacaggaaggcgaggatggcaagccaggttaacaacaggctttttaagatcagtctttatttttgttggcggcctccctccttcaacagtcccaacaactggaagagaggaaaatacatagttgttagcataaataagtgaaacttttaaaagtatagtcaaatagaggaccatttaagcctcagaagcaaaaaagagagagagagagagagagagactaagtaacgaggaataacctgtcacactcattcttttgtgaaaaccgaaaaatacaataggctcaagaggtgtcaatgcaagatgaacttccgtgtctattgaaacatgatcggtttttttctctggtgagtgcagcacaagcgtctgctcagtggcaaaatcacaggatctgattgtagcatcctgaacaagatatataaaggaacaaaatacatgagttattaacataaattgaaagctaaacatatccagactacagcatcacatgaactaagaatatgatataaaataatgttctcattggaataaaatatcattgaacactatactggaagctcataatgaaaaatccacaagaccatgcttactgatgaagctgaaccattataaactttctacacctaacatcggaagcactaaggccaatatttcagtgctaggtgataaaaagtgttttgtattttcatatagtgaaatattcaaacctacctcaagaatagcaatgacaatgtgactagcagtagggctatatgccatacgaacaacacgagctccaaggtcaatcgaagctatcttgcttccagtcaatgcatcaaattctgcaaacaaatgagaagatgtggataataaagaagacaacaatgcatcatatgcaagaaaataacaactaactacagtagcctttattgtgttaatactactctgtaccacaatcaccttttacaagaataagtaatttggtcaaataatgaaagcagcaagtaggtgatttttccagcaaaaagtacataaagggatgaaatgaatcaatgagttcatactgacatttcaataattatgtcatgaagtggagcatggtgcaatgtattggaaatttaggaacaaataatctactggtactatttttcagaacaatcataagctagacaattgctattactccacagataccatgactacatagcacagcaactaaactctgaaaggactcttgcacagcatttcaagccaacagtgtttcaataccaacatttccactcatcaaactattattacttacagcaactatgtaagtgatctgcagactaacgactccattattaccggctcattatactcttgaagaaaggtggacggtggacatgctaaatcaacacgaattcacacagatatctatagaaatgctcaattgctcatcaaggtcaaatcggcactactgttagccactgagatcatcccagctgcacagtaacagcgacactagtgcagaattctaactccacttccattcctaccaccccacccacccagggcgaatcaaactccagcgccctcctcctcctcagagcggcaccagactcaactcccccacggagctccaccctccccccaccctgcctacaaactcctcgacccccgaaccagtcgagacgggcggagccacacacacgtaccgacgacgtgcgtgccgatggcgacggcgacgatggcctgcgacgcgcggaaggcggcagcgtgcggctgcagcgggcgggcggaggccccccggcggccccccgcgtggcggagatccaggtgctgcaccgtcgcccactccatcgccggcggcggcggatctgggcgctccggcgtcagatctggtggggcgggtgatcgccggtcggtggatttgtgctggggaggcagtggcccggcaggctggactagcttcgaagaggagacgatctgaagcatccaacaagggggaggttgcagatccggcccgttaaggctcactttgccaggtgggcctagaatcctcgatacaacagttggtttgtctgacaggtgggacacgtactcaattagattgtgcctatctcaaaaaaaaaaatagattgtgccaaattgtcaatgacaggtgggccaagattacatttggactaatacacaagcacgattgatttttatttcccctagtaacatcattagctggttggggcatcttagcattaagcattaaaaaaaagctatgtggtgagagaaactacgtaaaagttaagttcatatagaggattgtcaggggtgggcattcggttaagaccgaaacttcggtccgggtagttcggtcttttagaaaattggttattgagaaaggaaaaccgaagtgcttagtaaaaaatcgtggaccgatagatcaggtaaccgaacttttagtccggtcttcggtatccaccgatttgaccgaacacggaaggatcggagaggcaggcggcgcatcgaggcgtagactggtgacgagggaagcgtcagggctagtggcgagagcgacggcatcggaactatcgctgcaggatctcgttcccacctccggcgacctcatcgacccgactgtcgattccgttctctccgcatcgtgccctcctagcctcccctgcgtggctgacagagctcaccgccccgccaccgacggcgccccctccacagacaatagaatgagaggatgggagggagagaaagaaacgaagagtgctcgccggcaggatctagtccacatcttcactgatctcacgatagtgcaacagtcggggatcagaagatgggcgatacggtgataggtggcgctgtggcggtcgtcataacgagtggcagctaggttagggttgtacctgtagcactagatggggatgagtgatagtagactattgtggtagacttgttgggcttaacctctcgttgagtggatgtgctgagagtattggcccaagaccaagatcggtctgattgggtaactgaggaataagactgaagcctgacaaaaggattggtcttttgaaacacatgaccgatcaagagaccgatgatcgatagatcggtttcttcggtctcgatttcggtttttccagtctcggtcttcgatctcagttttttatgcccacccctaaggatcgatgagagatgatacgcatgactaagtgatactgatcaaaacaacgaactcaagagcaaagagcttgatagcgacacagtgagagaggcaagctcattaatgggggtggaagcttcaaactcgagagcgaagacctgttcgaaggtagcttggcgtcttctatagtccatatgactcaaaggatttcgatcaagccatctactaatccatatggccagatttggttgttgaacctatgccaacaacaacttgttgttggtgcatggactacacaccaagattttgtcgtggctccgatcgggggctggccaagaccaagctcttagatgaccagcgctagcaagtaaataacaaacggatgggagtgagatgaggatgaccacgggaagaagacaatagtgtaggcatcggtgcagggaaaaatgaatcaaaaaattgataaaagtaaatttagtggagttcgtggctatagctagctactgtacatataccatgcaggatttgtcttaccctatgagtttgccgaaaaccaacgaaaattgatgaaaactaataacttttgtatggatatcagctaaaaccgctcggttttcacaaaccaattcctagcgccacaagcggttttcatgaaaaccgattgaaaatgtaaacccacgtgccatctattggttacctcccaccgacgtatgttttttttacagccggtgccattaaacttgctctaagcaaagataatacgtctagtgggttttcttgtttcgactcaggcctctttgttaggattagcttaggcccttagtttaaaggtgacttatcggctttgtggtttagttagtactagtgtatgtgcaacatatgtatagataatacgaattaaatcaaacatatttcatgcaactaatacctatgtttgacatattataataggacaacatttttatcatgttacaaactatattaataatggtaatataaaatactaatctgaagccctagattttcttttatgaaattaaattccaagtaaacataatacgttactaaaataccaacctagttcttatttttctccatcgatggaacccatagatatctatcagcatcatcttttcccttataattatgctaattagccaaaatttgaattttctaccttaaatatggagttgattttagggtttttgtcatcgtagtttattttttggtctttacttttagatcattaactatcagcatcatcttttcccttatgcttatgctaattagccaaaatttgaattttctaccttaaatatggagttgattttagggtttttgtcatcgtagtttatttttcagtctttgcttttagatcattaagaacatgtatataaaaattttattcataaattatttttcatttgcaaatacgttgtttcattttttttcctcaaatatcctaaatgataggcctgtatgtatcctatatggttgggcccaaaagcttgacatgcattgagccacaccatctagaaaatagtagcatttggatcattctcatggtttgatctaaaccattcatttaccatatgcatttatagcccacttaatgtagttattggcatttaatgtgtatcgaaccatgacacctagaaaactaatagtcattggattgctcttatgcttgatacataacaatcaaagtgtcatgtagaattgcaatttcacatcaactactacaaaacaaatattgtccatttagatattacgtgtgtgtttggttgcaaaccacactttgccacacataaggttaggaaaaaatgataggtgtttggttgtagccacaattgtggcaagattctcttctaacaatttgggtcccacttgtcaatgactcaagaaagtgtggcaagattcttttaggcttagtaagttgtggctaagaatttgatcacctcaccttacacaaggtgtggcaacttttattggcaagtaatgacaaaatgtggccaccaaacagcccttacgtgtgcacgatttacatattgttttctttgagttttctttgaaatatttttaaattttccgctgcaacatgcaggttatccactagtatctctaaattagtccaacaaagaatttgtgaggcgcacaaaattattgtgtttactagtatataccttaaccgtgcccgcttgagtttgttaagtgcaaaaggcttcaaaactaataccttagcctacatcatatttttctattcattgcaacaaactcatcactttttaagatctaaagccatcactcgaggtacctgcatatatttaggcaacaagatttttatcaatatttgtaagaaaatcgtcaagtgtttagaaactcagagaagagcatataaacttatatacttttttcaagatagtttttgctcttggacaagacaaacttgtagccatcatgctcatgtcactagatttggctcctgcagccatgtgtatggcattcataatactaagaaaggaatattgttacaaaggctaccttaggatgtgttctttagcctagttttccaacttcacctactcgttttgcttcccaaattgctaaacaatgagtttttgcaaaaaaaaaatagaaaagttgtttttagggaaaaaatcatattattctatttttaaagttttttgctaatacttaattaatcacgtgctaaaacgtcctttgttttgcgtgcaatgttggaagtgttcccaactccacctagggaacacagttataattttagcatagccaaaagcttgatactacctttgaggacttatgtaaatcaatagaatatattaaatacgctggttacaaagttggtgctggaaataaagcttaaaacataaattaaatagagacacaacaatactaactaatccctccgttttaaatataagcacttctagcatttgaaagctactcatgtaacaccgatttaatcaaataaacatgcatcattgatagtcgcatggacatgctcatcaatatctttgtaaacctttattattatgatatttccaaatattctgaatcgttggaatatggatcatctcatagagtcaagaatcgccacacacacaagtgaataaagcttagggtttagcaccgattgaaatttgttcatgatagttgctaccttggagtagcgaaggaagatacatttcaatgtcttatgttttagagaaagaagctattgcaggacaaatccgaaacaagtttgtagtggtaggggcagctcctgggtaggtcggggcgattgcccaagcttcgccacagccgcctccattactgattgtggttaataagtataaagtttggtcgaccgccatgaaacactattaattgtccgggttcaacgatgatgctggctctatcattgcaagtttttttttatcatcaacttattttacttgtagtatatgaattgaaaaaattattttggtttagtgcttaaattaacagtattaaccttttcatgaagcaaaaatgtcaggagaacaaagttcaaataattatcaaagcatagatatggcccctttgaatcgaaagaatgtaaaaatgtagaaataggaaaacgtaggattcatctcattcatacaagtgtaaaacggatgatcacaaaataaaaaaagaacgtataaataaccatttgattggatcccagaaaacgtgaatcggacaagagatataggctcaaaggaccttttgctaactatcttctaaaatccctatagaattaacaattctatagaattattttcatacgattgaagtccttcgaatttctttcccttttcctagaaaatcaaaggccgtttaactttgtgcgacgaacctggcataccggcctggcccgacgaaacccacaaagaagaaccgacatccccatccgggcccaaaccccgtctccgtccacacgcacggcacggcgatcctcacggcctaaccgtcgctccatcctcgcccacctctcctccttccccaaaccctagaatctcgccgcgcgggcgcagctccgcccttcgctcgccgtcatttcccggcttccccgcgcaggggctagctagctagctagctagggttccggcgcacgacgacgatggccgcggacgatctctcatccccggcgcggaagcgcggccgcgacgaggaggaggaggaggaggaggaggtcatcgacggggaggccgcccagaagcgcgcgcgcggggaggatccggagggcggggcgctgctggggctcgccaactacgaggaggacgaggaggacgaggaggcggcggctgctgcggggaggcgccgcgcgaatggccgacacgaggaagaggaggaggaggacgacgacgacgacgaggttgacaacgacgtgaggagggctccggagcggaggccgaggcaagtggagctgcgccgggactgcccttacctcgacaccgtgaaccgccaggtatggcttttagcagcagcagcgtttcaggtgccaattttttagacattctgtgtgattcgattgatgtgaataacctcgatgaaatatagtttttcattatgttcacgatctccaatttacttgggatccaccatttacgcctagtattttgattatcaattgctggtattgtgatagaagttcctttttttgtgtgtatgtttgatttaatagagctgaacaacatatacagatgctaaagggaaacttaatgttcatggtgttattatatcttcatagtgaattccaattgattttatttttgttgtagtgtgcaacatgtgagcctgttcatttgaagtaatatattatttttttgtcatatgtctgtcttggtactttatcttttttttttttttgttcgagagcactgttctactgctactctactgtgtacattactataataactgaacggaacatatttatcaaataattatgtttagttcttccttgctctggtggctattgggtttatgggtgtattgggttgaacgctggtccattccactatggactgtttcttaactgagacacggtcccttaggacatatcagaaagcctcttatgtttgctgcaattttaaaaagaactgtaggcttttcccttcaagttcttatccgttcaacttgtgtatccctttatttcctcgttctcactggccggtacataaaagctttaattaaactaaacagtatcttgtgagctgtggttggcttttttctaaaatagatccttaaaatagctttaaactaaacaattgtaagctcttgtaggatctttaaatctatccttctgttttagatggccagtgtgatgtgattgtttgtacaattaaaatctatggaatcacttccacgctatattctatatatgttttacactcttctggcagaatgtgtgctggactgtatcattgatgggctatttcacatgttcattgattgttgtatatattttgtctacattgtaggtccttgattttgattttgagaagttctgctcaatctccttatcaaacttgaacgtgtatgcatgtttggtttgtggaaagtattaccaaggaagaggcttgaaatcacatgcatatactcacagccttgaagcaggccaccatgtgttcattaaccttcaaactgagaaagcttactgtcttcctgatggatatgagataaatgatccatcattggaagatattcgacatgttctcaacccaaggtgcttttctatcgtcgcccatgttaactctagtaatgagctcagagctatgcagttttttgattggtgtgctttggcaggtttacaacagagcaggttcgtaatcttgataggaacaagcagtggtctagagctcttgatggctccaattatctacctggaatggtatgtatacgtgaaactaatacaatggttcttaaatgtataaatgattcttttcctagggacataacctgtttgctgttccctgttaattaagggaattctttgcagttgtagcaaaaaaaaaaatgtatccctccctaaaacaagggttttgtttagttggtctatctggagaaattacaaaaatgaaaaagcatcttctggaaaaaaatcacaatgacagtgaaagcctaaaaaattgtggacttgaatagaagcagccaacttggtcatgagctttttttagccaggttatttcattctatattaagttattattataatggtgttatatgaccatcaccatgtcacaacttaaaaacattgcagatttcctattgcacctcaatatttgcaattctctctgctttgaccattattatcctatggcagtagtcacttctctatgcttaaatttgcaggttggtctaaacaacatcaaggagacagattttgtgaatgtcacaatacagtcattaatgagaattactcctttaagaaatttctttctcatccctgaaaattatcggcatagcaaatccccattggttcatcgatttggagaactaactcgcaaaatctggcatgcaaggaacttcaagggccaggttggttttttagtgagatagctgcatgccagcatatttgtgctgttcctctacctccacaaatactcaaaagttaacatgttgctttttgtgcaggttagtccacatgagtttctgcaagcagttatgaaggccagtgataagaggttccagattggtgttcagtctgatccagtggaatttatgtcatggctcttgaacacaatgcactcgaaactaaaaagtaggaagagaaacagaagcatcatacatgattgctttcaggtatagtttttgtctataccaacaatttgattaataaaattgcgtgcaacttcttacagcattgtttttgttagggagaacttgaagtagttaaggaatttcacaagaagcatattgtggaaaagaaagaggacggcgatgaacagaatggtgatgcaggttcagatattgttactgaaacatctagggtcccatttttgatgcttggccttgacctaccacctccacctcttttcaaggacgccatggagaaaaatatcattccacaggtttgttatatcccaaatatatatattagtatcttctggttaaaatttcgcagcacacgttttgcatgtataagtgatactagtatgatgatgttcggtgaggttcttttgatgataatgtgaaaaccaactaaatgattattacagtttgctcagaactttgatagcagtaaaggcttaactctgcagcatgagtcgtaagaattatttggacaatcttctcaagatttctgttactgtaacatttatttgaaaccacctttttgttatataaaatttcctgcttagaactgcaaacctgacctcattttcttttcccttttttggcttatgttcttatagacgtagatagttgcacaacttagccgtcttataagttcattttctttatccgttttgtatatttgcatgtgtctgcatgttaacactttgaccattccatttacttggtggagtggaaccatattgggtgaggcgatatatttgaaatcttgacattcaacttttatgttttttgaactctaaact

SEQ ID NO: 14383 - DNA, 1472 bp, Oryza sativa
atagatccaactcagtaaaggagcaatattgttatagattaaaccagagtaaaattgggtattacaaagtactgtaattacagatccaactcagtaaaggttttcaaactttggttctggttattctgaagttcagaattttggagcacgcctgaggtccaaaactccaaattactttggaggacaaaatttgaaatgcatctaaactatttcagtatttggttgagatcaatatgttgtcctggatgaaagtcatgacccttgtaaagcatagagaaattatttaatcaaaatcatttcaaacaaatatttgcagttgagacatcaggacaagatggtatcctgtttcagaaaaaaaaatagagagcatagttgaccatactttatgcatgcatatcccaactcccggaaacgctggaacagatgagaagttggagggcattgaggataatctctggaacgcaggaactcatctttcaagatcgaaagagcagtagagaaccggagggctttgattgcgtaattgcaccgcatgatctaaacaatatggaagaaagtattagatcaagcaaaagagaacaaaaggatgattatgagcacagattaagcttacttgggtaaactgagggcctgcttgggatagtgatacagcaagatctccacaaacagggggtcctttagctaatatgtccagtgaccttggagtgacacgtaaactatcaaacctgtataaacgcaaaccaatacaagcatcagaatatgatgatccatctattaacccttctgcagtaggtaggaagaaacaacatgctttgaagaaaaagaataataaaatggtgacaagaagccagagcatgatgatcattttgtcacaaggtgcaaagctcaaggaactgcatagccagttctccatgaagatcaagtgattcctctaaatgatctatcaaaggaatttttccacaaagagatgtgcatccaaattgaataaaacggtgtattgaagcttaaactatagccaagagtttgaatgaagcatgcagtgtatttatttatgagagaaatctcgtcatgcttcctatcaaacttcaatctgtgattcataacttcttggcttcctgcaggtcataagcatattgaattaagttgtacgacttcaatgacaaagctgagaatgaaaaatgattttgctcggagtgaagctgatgagggtgaggacaatatattctaatacacgatgcaaaacctgatcatttgctggaagatctaatgcagcagcagcactaacaaatgcagatgaaactgagaatatgaagacttgtactaatcgagtaatgcactgaaatactgaatatcatattttgctgtctagatactgtgtaaagagccttgataattgcgactaggttgttcaatgtatcaattacaagatcttctttgtaaaagacaaaatcactaactcgggctgcaggaat

SEQ ID NO: 14384 - DNA, 4688 bp, Oryza sativa
attcctgcagccccaatttactaattcttttaaaaaaatattttaaattttctatccactaattatttactatcataaagcacacatcatacaaaaaaaaatatttaatatatagcaagctctctaatcagccaactataatcaaatttcatgcatgcaccctccattctcaaagggcataatggacatttctaagcaaattaacatctagactaacagagacttgacgggaggggtatgcaagggttccaaacaaattttcaagggcacacaagggattcagtatttttcaggtgcatagaagggactgagagagttttgaggtgtacacaaggaattttctctaactttatagtaagataggataagagcataatctgtatttattctctattcatccactatgtttgttactttaataggcatttattatttacaactcactagatgatgccccgcctttagtgcgggatatatgttagatattggagaaatgatgaaatgatttgggttgaaatattatgaaaataatatgagaatgatgatttagcatgtgtatgtttagttttagaattaaataaattgtacacataattactatatgcttgcatgttgagctttgtgtgtttaatgggttgatgtggcatgcttgcatataggttttaggagtgctaataaatactatgcttgtatattgagctttattaggtacttagtgagcattagctttatacaaaaaagaagagattaaggtgtcttctatgtatggtttggatatgtagtatatgtttttttagagctagtgtttttcgtgtgtaatttgttcctttaatatcctattttactataaagttgcaacccactaacgtcacatcatcaccactaacagttattacaacttaaatatcatacaagaatgatatattatctataattttctataatttatttaattttagagctttaaaatgcaagcacgttaaatcatcataacacataattcacataatatttcaaagatgctatttcaatatatctctccatcatactgcctctgtttcaggttataagactttctagcatttcctacatttatatagatgttaatgaatctagacacacatatatatctagattcataacatatatatgaatatgggcaatactagaaagtcttataatatgaaacggaggaagtattttattgtatcttatatacctacatagtccatccttacatagttaacatcatttctctcttctctcgttaaatcatgtcacaccaattttttaagcccttagatgattaatctataatctaaattatcttcctcattttcttctctcattaagccatatcaccttaattatttttagcccttgaaattatctatggtccaaattacctccctaatcttcttctctcgtaaagccacgttaccttaacatttgaatcatcattctatatacttcctccgtttcatattaagattttctagcattgcccacatttatatagatgttaataaatctaggcatacatattaaaatcttataacctgaaacggaggtagtactatttaaattatcataaatcatattaaaacttatgattcattatactagaatatatcacatccagtctaagatttgtttttttatgggacatggtgaggaggtgttttcttcgtgtacactgaaaagaaatgcatgagatgtaagtttattgtacctcataaaccatattcatttaaactcaaaacgtaatgtaaatgggaaatgtataaatgccgaacctaattacaatgctaaaaaccgtccgtataaatcacatcacgatcaaaagggtggttacaactcatccaaatcccaagacgtactatatctccaacaatactacgacagctacaacaatgaaatgcgaagaatgttaactgcacactatagatacaaaaatcagaacaacgttgggacacaggaagcgccgtttagccaaacggggaaggcacaggtccagcaagtgcgtcagatctcttgatgctccccataccacagatgacacaccctggtgcagaaagagcggagaatttggcaccacagagatcgcaaacatcatgaccgatggttgagaggcggctgagggtgacggcgcagaactgagaggggtcttcgaatgggtcgatagatttgtttgtcagccccctctggacacacatgtcgatcagactcttgagctcatcctgcttcgatgggggcgccttggaatataggagatcgagcatttgcttggcataggcaaagttctggacctccatgtttcgcttgatggcagttctgatgcagttaatccggtgcttagcttggataggtagggaagcaaggtggcgagatagcctggccatttcctcctttgcactgagcgcaccagctccttgaaccctttgtaggcgagcaatttcctgcgcaaatcaatagaattaagcaatggatacttaaaccagttccatgagaataattgttcttttaagaccagttgtttcactgactaccatgacgatagagatggaatttttattattctcgagttcaccaaaagaataaaagaagtattgcctagagttcaacatatatttaatcaaagttgtcagaattgaaacatttctaccagataggaaatgatgagctgcaggatatggtacaaaaactagcagaaaattcaccttaggacacacagtgaaaccaataaataactcttaggatatcatgacaaaaattgtgttgttatgaggtatatcatgacaaaaatgaatattacctgtagcaaagcaacagctatcttatactgtgcacaaatagtggcctgcgctttgatatcagcttcacgtgactggtcctttgcaagggccaagaatgcttcatccaaacaagataaagcatccgtaagctgattttgctcaagatgagcaagacccatcttgtagcactctgctgcaggagcaccacgtggaacctgtaatcatcaatggtagtgtcaaagaaagctatggaataacatcaattttgtttaaaatgaaaaatagcaacttaagcacctgtccaggccgcacagcagtaggtgcaggggggcgaggagcctgctttccctgtcctggaccttcaagagcactaagatcaattggttgcgacatggcaggaatagcaggttgaaagccatgtggctgtggaggaagagcctggggttgcgagggaagaggttggctctgtgggggaacaccaccatcaggtagactaatagggtccataggcatgcctggttgctgaggaaactgtgcctgttgcatcggtgcctgtggtgggaccccaccatctggaagaccaacattagccatcatgttttgattatggacaggccgaactgcactcattccaggagcaggttgagcaattcgtgacagaattattcccggtgggggtagtcgagctgcaagctgctgcgatggaatagtattctggaagaaatcctcaggaataggtccagccgtcactcccatgccaccaattacaggacctgtggctccactggaagcttgtggttctactaaagcattggtaccaaatagatcaactgcagcatttggaattgctggaccagcaggtggtgcgagacctggcggctgcataggagcctggttcaactcttgaggcgtccctgataacgatcttgtcctagtgattggaggacctaaacctagctgtttagtggcttctttcagtttgttaacatcaacagtagatgcagcaggcttatcacgtatcctgatgtgtatctttttagtctttgatgtagactcatcttcatcactacttccaccatcaacaacaccatataaagtctttttgaactcctctgctgcttttgcctgttcatctgcagaagcaatttggacccctagctgcctggccagagtatcaccaactgaatcacccccagcatttgccacattcttctgtgttgattcagaagatgctggtctcgcattatcgccactggctgctgcaatagctttaaccaagctcttttcacttacttccactacggtacctcggcctttcatcacgcccaagtaaacaccaatatgatctgcagtgacagatggaataccagcatcggtagtcttcatgtagggcatgacctctcctgcaagctcccactgaggtatactcttcatgttcgtaggtgttttgatttcccagtttcctcctgcccattccggacctttaggcaccatactttctgcagcaaaatttgcaaagacaccttgtgtccatccagttgaacgaactcttagtattctctcaaggtaacgcctcaactcagaatctgtagcagattcttccagcttctgtgaaaggcgtcgcaatgcactaggattcaggtggcatataaacagatctagcatgctctcatgatcagaaataacctcgaatgtttcttttgcactgtcaaactgaccatacctgtagagtttcaatctcattgaaattagaaaaagtaaaaaaaaaaaaaacatattgtatacagaagtaattagctcaacagtattactggccaaaatgacaattgcttgtcacggctcagaatcatgctggaatcattattcatcagcagcacgcacacataacctctt

SEQ ID NO: 14385 - DNA, 635 bp, Oryza sativa
tgtgatagcattcgtttcaggcaacattttagcattatggacctagacacgtcagcattatagcattactacaacttttactttgagggatttgcaggaaaagaaaattatattatattccaatccaactataaattattttccaatcaatgatcatgttttattttgtctaccttttgatttgattaatctaatatacctgtacaaacttagaattgagtatatattctcattcataatttatgtatgaattaagctaactacttgatggcaagaagaatctgactttagcaaaaaatacaaaccaaccttgaaacgcctatatcgtgcctcattattgccaagataacgcttgacaaaatgctcagtgagaaaaccagccaaaccatccaataaccactctgcacaaaaaaaaaacattaaaccgtcagatgcattttatctagttgcgaatactataggtatatattataagcagagccgcagagctgacttaccatcggttgcctcctctgcatttgtgtatatgccaaaccattgccttgcaagagcatatgctactttgatactcgtgtcaattatctgaactatttctacatgttagttagaacagtactaacaaaatgacctgaagt

SEQ ID NO: 14386 - DNA, 3577 bp, Oryza sativa
tgcatagtcagtcatcaaatcaagctcaggtcaacagttttttacagaacagaaaatggcagaagtagacaagtgtcacaaccccaacggcaaagtcccatctcattccaaatactgtctaaatacccagagcattgagagtgaattgtgaggactttcatagtgcccaaaccgtagtgtcatggtggctcaaaatgtagcaaagagggtactcttctttgggacactacagtgcgaagcggggggctattacactgaatcaggattgacgatcactgatccaatcataaagctatggcttataatgtaatccgaacatatttgaaaaagaaaaaatagaaggaaaagaaaacgaaaacaggagaagggtcagaaagtaacaaaacagcacattattgccaaccagttcatcaacagagagcagccaaccagtacaaaacaatgcgccaaccaaccacatgaagccacaaagggcaacaaagccattgatcacaaccaccacacaatctcctgcagtcgccatcacccatgcaatttccttcatgtcaatctttctcctcctccaacaagtacggagagggcatagaaaagagaagataaatagggagatgaggggagaggacagcccctgtcaatgtgtgtgtggatggggtgggtgaggggtttgcatttctggtgattatgggttaaagcaacaaaaatgtattctccacaactattcaatgaacttgaaaagttagtgtggccaatgacatgatagccatatatgatttgtacataataaatactcaatttaaacagaaatgcccctttctattaagctcatgtggtggactggtggtacgtacccacatctgcacaggctggtgaaaatgtatctcagcgagatactccatttctgggtccactctgatccacagtaaaggtgcatccatactgcaatacccagaaattgcaataagtgaccagtgagaaatggcagggcaaaacaaagctagttacttggaaactgacctcgcacggttatcttgatttgaagcatctatgttttcatcagaaccatcaggctttgagccttttttagttttctgaaagcgctttgctgctactttggaatgacattgtatttccaccacctgcaaagcttcaccagccatgggtacaattggatgatcgtacactccatcagtttcatggacacgtacgctcatcattcctggccatccagtatcaccttctcgagaatcaccattcgtgcgaatatcaggaccaggatcaacttttgtggtgcaaccacgtgaaacagctaattcaaccaagtttctcctcttgctataggagattcccaatctttacaagcagaaggaatacacatatgagtaagtatatggagatagcgtacaggggaaaactcaacacgaacaagcactaagaaggttcatttacctcataactgggcatccagaagattcaacccaccttgggaagaattctttcaggaatggccgttcaagattaccgaccttgtttgcaagatgcctgaactgaataaacgaaatttatagaaagaaactcagttgctaacaaagatgaccacagtggttgcactatacaggactaaactaataatataacagtgtagaaaacatccaaacagataatgttacacatcctgaccattttaccatcacattgagaccaaacattgaaactatagttattagcacttgatagtgattactttcacatatcagtaataatagcaacttttgccaaaaatggagcacaaggtaagtaatttgactatttcgctgtttgactagaggaattagaacagcaaacagatcatctcatcctaactcagaatgtcaccacttgtttttatgaagaatggaatacgttggtccatcaccaactcatcctttaaaagttcatgttcttcgataatataaactatacaatggaagcttttgttgttggtggtggtgagtctgtcaaccctccaccatttcttgagtttgtagtatcatttgcagataactaaaatcatttgcacatgtgacttctaataagatgaatagtgcattgacgtctattggaaaattgtatagtgtatagggcttttcgagtttacaacatatgaatatatgatatgcttctttgaagtccattgcaatggactggtatttggatagtagtgcaaatatatggaatagtgggatgcctccaagaagtaccaactcatccttggaaggtttgattcctcaaaccaaacttcccatgaagcatcagcataaacatttgcagaatataacaaattacttcactcattgtgaaagtttttcttcatgacggaggaaaatggatacaagaaagggctagggactttgtagctaactcaagatgatgaacaagcaggaaagaccagaaaataaccagattgatgcaattagtaaaggcacactgcaaaactgcatagttgaaagccatgtactgatgtacctcttttgtacttagtgttcttgaggcacgagttggagcaactatcatctgcagaatctgaaatcaggaatggttacagcctgtcagcatggctaagtacaagatggccaataggaaaacacgtaacacagagagtacatgtagatagggatagtttactcaaaatgaagaaaatgaataccagaccacattaagaaacttaagaaaaaaatgcataaaaagcattagcatctacagttcagccaatggtgttcaagaatggtcatgtagttcttgcagctgttcatatgtatcatagacatattacttcgcaagaggttagaggtacacattcagaagtaatatcaattgcttgagcaaactgttgcattcatttaatacagcaaattgtaataagtacatataaagaagatgcaattgctaaccttccgaaaagagtctggccccatctgtttctccaacatttgaagaacagatacctgtttaaaagaaaaaaagtgagggagtaatacatttatgtcaactgtaaacttgtaattcaaaaggccaaaaacttactgccttcaaagaacgaattttcccatatgaaccgattgtttgagttccaaataaatcacttgaagctgaaggagagctcaaagcagttgcaccactgacatcaaactcacacacaatgcaattggcctattacaagtacagattgataattaacaagctggaaagacaaaattaagatataaataatgttccaagaaaaataactgtgccagtaaatcccttttaccgcccgacaccaaccgttaagattaaggtgaatgaatgcaagacaagaagcaaacacataatttgccagtgaatttggttggaaggtgaatgacaagttaatatgtgaatcaacaccaaaactgtgtgcaacataactctcgtgcactggtttcaaaagcaaagtaaatatggtcaaatcagcagcaacatcctacacatattatgatatagaaataaaagaaatgacacatagctataccaattacaactgaaagattctttttaagtgttctaattaactaggaacatt

SEQ ID NO: 14387 - DNA, 15412 bp, Oryza sativa
ctagaactgtggtcgacatgtgaacatctagactgtatcacttattgaatcagctgaactcatagcatcacaaacaggtagcttgttctcaatactcactcgacaaattgggcatgaccggcacttatcagagcacgctctgcagggccaacaaaaagaactttagaattccacttgcagttaaacagaaacacacccaacatgtagcaacttgcaataatacataaatatatacaccttgcaagcttcagacgacataacatgtgaaacatacatgaatcagtgattgccaaagaagcttactcgcaaagaacataatggcggcatggaagcagaactatgcaaatgtctctctcaaagcatatccgacataggatctgttcctgtatttatatagaaaaaggttcttgttaaaagtaattgaaatcgaaaaagcacatcaactcttttatggatgagatttaacagcctaccactcatgataatgattcaatattaaaagaaaataaactccaaactgcaatactagaaataatattatataggtgcagcacagaaccaaatcaacctagagccttgtgtatcactctatttgaaattggacattgtagaatgctttgtctgagaagtgagaatggaaatgagtagtacattttttagcttatcacactgctgttgactaagcttagccattttggtttgctcccccaaagctaattgaagtctctgtacctgaaagtgcaagtggttaattagcccaatgcaaataaagaaactgttactgtatgtacagtaaaacaacctctttgacaagaactttcttcggcatctcttttaccatctctggtggatagctgcaaaaggtactatacctgcatggataagaccaagtaataaaacaattcagctaccgtggaagcatttgcagtgcgtccaatgtaattggcataccttgttgattcctgagtgattacctatcttagtgcttctaatctaaagcgataagcatagcttgttgaatgatgaatgataagctaccttgttactgaagtacacagtacttttaaatgcaaatgcaaaaaaagttactttttcgtaatgaagaaagacctagcaactctggaaggttaacattaaactgtgttgtatctagaaacttgttttagtttagtagtctttctatattttggagcagttgacgttatgtgggatctcccaaatttgattaatgcggatctacatgacaagttcttctaaactttactcttgccatttttctcttcaatctctgagacaaaaaccatctgtttccccacgatgttatttcctggaatatttgagcccattgccctaccaaacgaagaaagaaacacaaaaccaatatggcaaaatagatgttaacatgatgttgagttggtagtttacttcatgtgtccatatagcattggactcaaacatcttatgttctctagctattcatagtacatcccacgataagatcctttgggcagtccaggagggaactatggtcctcagaagaagcaagtgtgtagcatactacgaactttttttattatttaaaccattttattttaatattttaaaaataaactctttacaattttatttttaaaaatgaaccttttagccacgccagtaatattggcgtggcgtctaaatactgccacgccatccttattggcgtgacagcactagccagcgcggcatgagtgccacatcagcaaagctgccacaccagtgatgttggcgtgactggtgcatgttgcaacgcctacagcattggtgtgacgagactaggcgttggctggcgtgaacccctgatgcattgtttggtctatgcgtaattagttaatgacaagattgcactaatacacaattatacaaagttactatttacatgcacgtataatgtggacggcaagtcccaatatccctgcatgcacaacatatataatacagatatccacactaatctacaaaataacaatgttctatattttcttaatttggtggtttcctatcgccatgaatggaattccgtcgtcatggtagtgtgttcagattgtttgataatcacttttttgagttttggaatggatttggtaatcatctgtactacgctgattcatagttttgtaagtgctatcttgtggagtgaatcacaactaatataattcagttacttataacattaggatcttcatgcaagttgcgatctattttgttaatgcaaacaagagctgcacatctttttatgagacatttttatgagctgcactctcagcaagttgtcccagccaactcaaggttcgtcacaccaacactctaggcgttgcaacatgcaccagccacaccaacatccatggcgtggcagcttgttgatgtcattcatgccacgctggcagcgctatcacacccgcgaagatgtcgtgacagtattcggacgtcacgccagtaaaaactggcatggccaaaaggttcatttataaaaataaaattttagagaatttatttataaaatattaaaataaaatggtttaaataattaaaaaattccatactagcctagagttttatcagcaacatgtggatgagtcccgtggttgggggattgttattcagcagagcacagttagaatgtgctgcaattcatcaccacagcaacttttggctagcctcagtaagctgatagtttccttcctaatcttcaaaatttttggtagactgagtttcaagaacctacactttctagtagtaacaacagcattcaagaaacgacaaaaatgtctgtcaagaaagaatatgggtactgtcatgataagcgtaagcaagatgcaattaggaaaaatttagaagagcctacccagaattatttgcatagcataaatgagcttgctcctctttgctatcttcatcaatagaccaccaagcgatgagcctgcccagcaataaaatcatcaaatgagaattccatgtccagcttttatgtattgtaatagatgtgcaattggcctgagccctgaactactaaagtgatactggatagcaataaaaccttgaaccatgttgcatcatcataaacaattcatcaatctttgatgagaaagaaatatatccgtcagtgatctttttagctcgtaattttgtaacaagcctttcaaagaatatccaaatagcaaacgatacagtagtcacttgaagcaaaagtataggtaagaaaacagctcggagtgggaaaaattttgcgttagatggagtgccctgcaaaggatccagagaaaacaatggtcagttagactaaaagctgtgaactaatgatatatcaacacagaaacaggaaaatggatagcaaagcagggtctgccaaacaattttgaaggaaagaacattatttagtaaattgagttcaacagacctctaggcgcatacacagaagaacttgaaaaattacaataggaattattaatatagggccaccaatgtcctgcagatagcttgtctaaatcagtatcccttttggagtaaaatggaacactgttgttccagtatcagtctctgttcatctaagacaaaaatccaatttattggtataccattggattagaccatctcgtgcagacaagaaagccaaagcactgcgaaatcctgtaaagaaatgtcaagaagaaatcaaaggattattccttggggttacaagcctaattttaaaaggagagaatattacccaaaattaatgaataaatcccaccaccccagagtaactgcatctcctgtagcacaaaatataacctgattatgaaaagcttctacatggaactctgacgcatgagttatgagtaagagtttcgatgttcctactttaggttggttatgcctactcatttctataaacatgttagtcctcaaaaactctatagtgcggaaaacaaaaaacagctaatttcatgcaaaggagaacggcatatattaggccagtgacaaggttcaggaatatctccacgagaacaagcatgcttaccacacaacttaagaagcatgagtgaagtagccgctagtagaaataccatggaaatggcaacccagaagtgctaagaaaaataggaagtcgttagtaatgactacatgcagcttaagtttgtataagattaatctagttctcatctgtaaagagttcaaagcaatgatgtcccttgttactatatcaaagattttattgtagcaagggtctttgtatattttacagatttacagctccatatactcataaactcaattatgcagtatataaatacacaatagcaagtcagatagcacattggtacaactatagatctctttgatggctgttaggtgtgatgctctatgatggctgttccttgtagtaggaaacaataaaacaaacaaaagaccctcattttgctggctttattagagctctaactgaactgtctcgtgtgcgaacttgtaaaactggcaacccgttgaatactctgttaccctttagtgcttttctataaaagtaggctgttaggcctatggtctaaaaaaattgctatgatataatattatatctggtcaatgtgtattgatagggtatcgtatcccctgaattttaaattgcactgaacaacataacagagaatatgcaacttgtcccacatgaaaacaaagaacagagaatatggaataaaattgcatgcaggcgaaggttgcgacttcagggttaaatacagtacataaaacaccaaaataatgcatagttgattggagctccataattggctccagtgcaaccacacaaaactatctattgtataacttctgtaaaacataatttgattagcagtattggagctaaagttctcactttacatggtggaaagttaaagaattgtaagtgcaatgtagtcttataacttacaggaagcctctcccaaattgcttcatctgtcatagtctctccatgtccaggcattagtgcaccacacatcctatatagaatacataatatattgttttaaaaaagaaaaaaatataacgatatttacaaaagtatactctataacgaataaacagttgaacttttctttacagcacagtttatgacaaaataacaaatgtttcttcaaaataagtctgactctgttttcacaaactggcttcaagttgatgtagcatttctacagagtgacaatgtacatgctatatcactaacaatcaaactgttctaaaagaaaagttcatcagattgcattatcacaatatagtacttagctagggagtaggtaatcagaagtcacaaaagttaaaaccctggagaagtacgaggtgaacattagaaattacttgtcaaaactaaaaaagaaataaactgtggtgcataatttcatcattttgcactgtgtactcagtacagttaggcaattcatatgttaaatttaggccaatgaacaccaaccgttctgtaagaactgaatttatgttccccaacaccaattatatcagccatgatatgtctacaagcaacattttgataatccataactccatatggcatatatccaaaaacatatgtaagaacctatgcaaatttgcactgaagcactgtttgattacctgaaattgtcaacaagtgtaatgatttccaaagctaatagtggaaggaatacaagctttaaatcaataaaaggttcatcatgacctgaaaatgatgaaatgaaccatttgcatggcaagtgaataactattgactttaaaaggtagacgaattcacaataagctttggatttgccatcaataccttccagataaacacatagaagcagctcaaaagcaactagcaatggtgtggcaacaatggaatggcaggaagccatctgtgcagtttaataatccgattaaccttctgctagtcaggtatacagttcagaatctatgaaggtatgaaaatgaaaagtaggcagtgaatctacctgacaactttgtggtgatgaaggagcaggtaacgaaaatctacatcgagcaataacagcatggaacaaccatagaggggtgaatagcaccctgcaggtcaagcattctgtcaatcccaacatgcagagaatcaaatgtatcacataacaagtcaatgaagcacgaatgagatgcaattgttattcaggacccaactttagaggaccacttgccacctagttttcctgtaatggccataccagtctctgtagagctatctgtgtgccatactaactggttcatccatatccatgttgcacaatactataagttgtgtagccaatgattcagtcacatacaaagagacacacgcacccaaaaaaaaaaaaagacaaagaacacacaaaggtttctggcaaatcacactcaccagattagtgtccatttctcaaaaacaaaatttactccctttctcaaatagttctcatactaaaatgcatgcagtaaactttgacaactttgggaaacctccaaaaccaagtataaaaaacatagttccaattacgtggggtagctgatgaggactgcattcacctctttgtctcctgatcttacactaacagggtgtggggaatattgaaaggctggataggcattcctcttcagcttcccagtgaactgaacgccgagctgcaagagcgtggtggatgttggcaaggatgtttttccagccgagctacaggaagtcatttgacactctcttcatgttggtttgttggttaatttggaagcagcgtaatgcaagggtgttcaatggccagtcgcgcacagcaggccaattacaagacatcaaagagttcatacccatttggggtgtttaagaatgacaatgaatagtctcttttagttttacatgctgggagtgctggaccctgtttttcgacatcacatcgtcgataaatgtgtaacttgtaactgtttcccacaaccttgatggaattggtcggccttcttcagccgggcccggcaaaaaaaaaaaaaaaaaaaaaacaaacaaacaaaacatagttccataccctgctcaggataatgtgcaacagctaacaacaacaaattaacccaacaggatgttaacaataacctcactcagtggctcagctgaaggactgaatcgcaccaaaaagggcacgacgtgcgctatatgcagattaggattccatcagatacgcacgatgcatctatcgcatccaattatatcctaaaaaaataagaaacgccatcactaaaaagcgcagcgattgcacaaataaccaatagaatataccacacgtccgcacctactcctaactcgcaattccacaacgagccagcacaatccaattattgccaaacgcgaggttgcgagagcatttctagcgggcggggcggggctagatgaagcgaagggagagggtgggggggaacagggggggggggggcggcttttaccaccacgagccgcggaagaggccgtcgagcttgagggcgaggagcgcggtgaagcagagcagcagcgcgtgcgccgccgcctcctgccccgccctccacacccgcccccacgtcaccggcgcgccactgctccccagctccgcccccgcctccggcgcgcccccgccaccgccgctggtggtggcggcggctccccgcggtgctccggcttccattgccatcgtgtgcggagtgcggagggaggagatgtgactggtgtgtgtggtggtggacgtggcctcgccgcggtgatctggaggaagcggagagcgatgtgggggcccgtgggcttccgctcgtgtgcgcgtcagcgtcaagcccacggaggataatatctacctttatctgcacttcacttatcagtttttgcacaaaatcatttgagattcctccattcctaagaaaaagtattgggaaattatatggaccattttcatttgttcctctgtaagtatttacttatttgtattatactgggtatttgtctttattcttatggggtgtgtatttgtctttatgagtattaggtgttggaattaatggataggccttagcccactcgaagattaattctggaaaatcataaaatcccacctcatgggatgacatgcatatggagtttagtactatcttacttattctaggagaggggacctccttaaaagggatgatgcactccttgccacttgaagcacatgtgatggagagaagagggagaacacacgcgcctcgcctcgcttggcagggcaggcggcgcgcgtgcacgacgtacacgtcaaatggtgtggattcattgtatatattttgtatattaggagtatgttactaggtagtgcatctatggctaagaacgacagttccatcactaaatggggtagagcgtcgaatggtgtggattcattgtatatattttgtatattagatgtatgttactaggtagtgcatctatggctaagaacgacagttcgatcactaaatggggtagtgagtgtcaattgtgtcatcatcagaagacactttgatagtgccttttgctttctctgtatcaatcagatactcgcgtactaccacattgtcgtataccctctatttcatattataagactcatagggagagagtagtattaaccaatgcatggtcacatgtctagcactcattcgcggacactgagtatgcataaaatggtgtcacacttggccccataaaatggtgtagaaataagtgaaacgacatatttataaataaaaattaatttgtgaataaaatatttatatacatgttctagcgatctaaaagcaaaggctgaaaaataaacttcaatgaaaaaaccctaacaacaactttaaatttaaaattgaaaatttaaattttaactgataagcataacataagcgaaaaaataagaccgattgcctttttttttaatagaactagagcacctgtgttgcatcctgaaacagcaaaggcacataactttcacattgacaatactcagcaataagacatttaaatttcaggataacaccgtccattcagaaacaatcaaaataatatatatacaactcaagtacaaaaaattgaaattaaggaatagtaactaatctaaagggttcaacacatatattttctgttgggatgtggcagaatttccacagaacggcaagattcatgtctcgtctccattcctttcccgacaatagctaagctaataacaaacttacaagcaaaaggagcacaacaaaataaatcaagctagcatgaggcctcatgatttcaccacaagcaataatgctcgaaattggcaccaattaccccagaaatttactgggccagtatgatctctctacaggatacatcagccattcaattaaaaattggctactcatcgtacaccctacagatcgcgaattttctctactgtacagtatttcttacaaaaggtgacccaggcacaatatgattctctgccaactctcttcaaattatctttgcagaggcttgactttgatcctaatcttagtagttgtcaatgtccgtgtagtatctactggcgtacccacatttgatatcttgggttcaggaattcgcattggagctggtggccttgccgatgaggttccttgcgagtctgaaggtttcgctgtgttcttctgttcggaagaagaaaccccttcaccttccttctgctttttgcctttttctttctccatccttttcttctctttcttaagccgttttttctccagatactcaggatcatctttcttatctcgatgccgctttttgtctttcttgtccttcttcttctccttcgtttccaatccattcatggagtctggggcttgatttccatcatagcttgtggagactacttctagctgactccgtggcttgtctaggacttcctgtccattaacaacgggagagaagtgatccttggggagagcatctagcctggaatcggctgtgcactgtagctccttggatacttcatgcttgtccattagtttgacattgccaatgcttgctgacatccttgattccctatcgtggcaagagttttgttccctatcatggcatgagttttgctcctcgatgttatgattacttacatttactggttctggtgcttcagtcataggtgcatccactgacatagagctacatggacctgcttcattttcatttctaccatgtgaatgatctctgtgatcagcatcatctgctttactggatgatgaagcacgtttaacccttattttgacaacattccttctctcactgcagttagatatattatccgcatcttttgtgggtatagaaataacattccttctctcactgcagttagatatattatccgcatcttttgtgggtataaaaataacattccttctctcactgcagttagatatattatccgcatcttttaagggtccagaggtaggtaagacttcacggacactaggagtgctagtggaaggttcttgaggccttgattgttgaggaactgaggaatcagctttagtgtgctgatcactagatatctccaggacaacttgaggtggagtgacaaccttcggaactccatgcagtgttggagacctgagactcatggcatgttagtatagaagtacaaatgataacatagtgtaacaaaaagttacaataagtaaaaaccaatttcagtgttgcaaggcatgtttgatgacttaatgttttgtgtttgtgataaactgaaattaattggaccattcgttattcgacaacataggattgtttggggacagcaatatccagtcggggcagtgaactgcatgttgaagatgaagcactactgatctcatcttcttttttgtctaaaaaaacaacaagcaacactactgatttttttttcctacaatttgaccaaccgcagaaaggagtcacataaagggacactgacaaacaacgcagatctgctaatgttggcaattccttatacattaggtagttgaggactcgaggtttaatatataaaggcaacaaaacacaggtctacttaagggagaggtttcagtagaagttcaaatcccgcctacattccatgacaatctagagggcccattgtggtactcatacatctcggagatcatcaaaatcctactctacctaattaccgtcgcagccattgacaatgagctgccatataaattactgtatctatgttttatggtgaccattgacatacataataaagctacacagaacaaacatgaacacactaagttaaacatgatatgaacacagaaatgctgcgaatgacatctagaaactggaaacaatagaatgaaatgcctgggttgtaatgttgtattgatgaaaaaaatatgacaaaaaccgctgtagtagtaaagaaaaagtcgttttgttatttgattgtagatagttacacatcttttaaattttatgcatcatatatgctttaagcactagtagaagtacatagaataatcaatagaaatttaatttatatgcttgatacatagaaacagtttacttgatccttttcaggaaggcaaatttatatgctagggtttgcagttataaatgaacatgtgaaaattggaaaatacatataaagcaacttctctaaccttccagcagcaatttgcaatatgcagaacacattatgtcgaagatatacattgttgtaggcctttttgccagcaagcaggcaaaggaggccaactagagttggcaattgtatttgattattatcatgagattcaatattggcttggcatagacgcaagacatgaacagccaactttgtccctcctgcaataactccaacgtcaaaagaaatcaaggtattcaagatatgccagaagtaccatagcaatcttcatcaaacctctcaaagatctttcttcattagcatatttcaagaataataaaagagctgcatcaagtcctttatggtgaaactcgagatcaataagaaccctgccagcttccattcgaactttccatggtttgtccatgttgcgatagggcacaattagttcacagacgcgatcctacagcgacaaaaagttacaccatatgaatgaaatattcagatcagaccaactattagacacatgcaggagcatggtgccaacggaagagttcttacaaggcaaatggaagatgacaccctctgtgcaatacgtgcaagggtgcgaatgcagctgacagtcaaaaccccattgtatccaggcataaagctgcaagttttttctagcagttagtaggactgacagaaatgaaggacagctaagtcaaaagtagtaattggatattttctactaacttatcaaattgcaggagccgatcaatgcgcttgagaagagacgacaatagacctacaccctgcagagaaaatgaacatcattttttgataccattgttttaaaaacaacttgacaacacctaaaaaagaatacccagcaaaaccttaaggacaagaatagtccatataaaccataagaatataattctaatttattaattgcagaataaaaactgtagtctgaaacaacaggtgcagtgctttaaagaccataaggccataattatctactttatatgagttgattattttggtgatgccatggatagaatagaaacctttaatgtacacattttttgcaaaattgaattgataaagcacatatctcaggcacatgcacagcagttagtaaaatccttaaatagtatgttgccattatagtttacatttagcaggtacttccataactccatagctattcatgccatgtactcctactacagtagtataaatatttttttcttgtcaagcaggtaatacacatgtagcatagatgatagctcaagcttccagtcattgaaataggtaattcatcacaacaggtgtccacataacatttttcatactctatcagaagatatacatgcatacaaacctgctggccaaattctaattcacctatcgcctgcaccattgcagatagccagtagacatcagagtatacatttccgttgttatcattatactgaaacaatataaaatgtgcaaatgtattagtcggcacacattcaagtattatatcaatgggtattgatttgtgttcaagaatatcataaatggtgaaaaccaaatacttcctaatatgtctgaataaatataacaaagggttacaacttacaagtaatgaatacaaaattattatattgattcacgtacaagatcctaaatgatgaaaaataaatatttcctattttgacaacgtataacacggagttacaatttaaaaagcagataaaatgcaaaccagagataaatagcaacctttagaagctgaaggataaattcaatggcttcttttgggctgctcttgtctgctgatctaacaagagctactgcatgaggaattgcctaatagaaggaacataagtcaagcaaaatacaaattattatcataagtgcagcactgccataagaaacatcaaaacactattgaacaacacagatcaattttaaatcacttcagcaatgtgtttatgcataatgtaatgctggattgcggattaaaaatgtttagttgactaagtccaggtgtaaggattgaactgtctatttaagtcaggcaagagacagtacacttgcatatatggttatgattaagtgaccacaaacactaactttatttcatttagaacaatacctactggactaatatcaagagttttgaattccatagtatgggacagaggaactggagtaagaaaggtgggaaactagaggaaagaagactatctcaaaatccttgcttgtcgcaactctagacactctctcattacttataccaacctaattttatttaaacgatgaacccaactagcaaggaagcaaactaagtacagtttgagtcccccagatcaagcaggacactagcccatccaaagtggcctacagatgaaaccaaataacttgtatcctacgtaaacttgtcaacaagcaacctggcactacggaaatgtcagcaatactgacataaatggattttcttgtcatgggtaatcacaaatataagtcctacctcaaagcattacctcaagaacaaagtactccggaatatcatggaagtcattcggcctatcagtaaaacaagaatgaagctgtttacacaaacatataaaagagggataatttgtgggcgaaaataagctactgcagaatggatcttgacctgggtaatccaatatctgcatcaaatcggcggcttttatagaacttaaccagatgaagcagtccagttagttctgtgccctaaatgaaagaaaacaacttaaataagtaacacatcagtgcaaaaaagtggtaacattaaaacatctcctctgtgctattgagcagtctaacacagattcatatgctcaaacatcaacttctagtgagaacaaagaaagatacagaaagaagattgtatacacattaagtcagtttgaatcttccatgcatgcctaaaggttatgtaaagctacttcagtattgtcaagtgtgaatcactaactccgatgtgtaagcgcccattcccaggttccagatactatgtttgcaaaaaaaaaaaaggaagaagaagaagagagaccaaaacagcaggagagactcctactgtgctatatatagcaaatttaattggggcaccatggtgctcgggctccaagatcttggtgaccaggcaccatgaaaaatatatatgggggtatgttgcaaaataagtagggctgtatgcctgtatggaagttaaaatgaatgcaaatgcccaaacatcacctacttgttctattctctgttgtattattttattgtttaatttctttctgtttttctacatcttacttcagattcaaactttgcttggatccttgatcttttttaatttcatccttgttcctctactggcaattgcacagacgattctagtgaaaggggaaaggcatatgacttaagtaaaaaaacttcacatcatggattgcctcaggtgaaatttagaataaacgcaaactttcaaccttcctcacaaataaaaatgtataattgagaatatcagtcagctatgtaataaatggaaccttttgatctaaattttctaaattgaatttgaatgcatatacaaatattcagaattacaatattaatgccttggaaaaatagtttaagacaaacaagcttacgcatacctctgatgcagttacagctaaagcatatgctgcttcaactctaactctccaaaatgcctgcagcattattaacaagttactcaatgatattcaacaagatctcaagaaacatgctgaaatacctttgtatcatttaagaaattattgagggcattagtc

SEQ ID NO: 14388 - DNA, 1073 bp, Oryza sativa
agagaaaaagatatggagaaggtactgtgaaaaacgaaggagaaagagaaagaccagctagggcagcaggaaaatggccccctgatagagaagaattttcatataactatataccaggtcaatataggcatatgggtacaaagagaagagactttgagaagcctgttaaatttcaaaaccagaggagtgatggtgctatattaaatttagccgcacatgaccctattgattggcctaatattattagtatttggaaaggtttaatagttcaaaaatatatacaaaaccagcacaatataggaagtaaagttgaagatatgataacctacttagaaacatttttaggtgaatctgctaagattctatgggaacaatgggttgaaaagaatcctaataattatgaagaattgaaaagagctggtagcaatccgcataattttgcaaatgttatatctaacattattatagctgaagatccggaattaggttatacaactttgcaaaatgaaaggttaaaagaaatagaaaaattaacgttaacaagttggaaaggcataaaagaattctcccaacattatttatataatgctacaactgctaaacaaggatataacaggggaatagttgaacgttactttaataaattacctgacccactaggaagtatgatatttgaagaatataaaaaggaaactgaaggagctgaaatcaatatctctcaagctataacttttgtgtttaagcaactaagaaaaatatgcacgggtatccaagcccaaagatctatgaaacactcggattacaatttctgcaataaaatagttcaaatacccttgtcatatggagaagacaagcctagaagtaaaaggatttataaacatcaaaatagaaaccataataatattagaacaaagaaaagatatttcttaagaagatcagataatagagcacccttcttacataaaagaaatgtaagaagatataatccaaagaaaacctatgacaaaacatgcagatgttttatatgcaactcgccagatcatttaagtagaacatgcccaaataaagatcaa

SEQ ID NO: 14389 - DNA, 727 bp, Oryza sativa
ctttgacatgcttatcttgctctttcctctttatctattctatcttggtttcttggtttttaaaaatttctactgccatatcttcgttcttctttatgcatcttaaattcttctatgtctttcggagttgcttctattgggctagtcttaatgatatattctgggttgattatattaattttacactcaatagcatttttctcccaatatttcataggaatttctcctataatttggatatcttctaatctttgaataattttttctatatcccttttagacttaatatctctataccaatttggtgcaaatgcttgtagtcctatgcactctatattggaatttgatatataatagttgtctatattctcactaagctcatattcattaattctttcttcagactcaagattaggtacttctaagttgtcgagtttgggggagactccaccacgctttcgtacctctgagatatatggaacattattttgatatgggataaaagtaattccttgctcatgtattactgtggtttgtactgattcttgaaggaaccttaagccaattatcatgtcatcattaatcattgacaaatctcttattgtaatctcatctattatatatttagttgcattaatgtaaacctccatattatatacatgtatatatatatgtatatatatatatgtatatatacatatacatatatatacatatatatatacat

SEQ ID NO: 14390 - DNA, 1119 bp, Oryza sativa
agatatccactgtgcactaactggagtgctcaatttatacacatatgtttttcttggaggatcttccttgcttaagacctgcatgatacaagtacaacaacagcagaatgtgcaagcacaaaggtcagccaacatcaaaaaatgaaacattcatgcagttgatcattgtgaaatggtataatatatctattctaacagtacatagagatatcatcaaagagcattatcatgcttgtcatggactggctagggtaagggtctgaaagaccagtgtggatccactcgccctctaatagcacaggcagggctctgaggcttagggttcagagattcattgcttcattggtaagagtacatggggtccatttatatatagggaggagactagacatctaaggaactaatctctaatattatagaaaccaatccaatctctctatctctaatttattaacatataactgataactcatctctttcctaactagataatctcctactttgtttgattattcctaacctatcctgcctaaccttgccgcatgggcttggcccatggccataacaatggtagaataaggccgacatatgatacttcctcgttgaaggcatttgttttccattaggaggaatttaatagtatatgtttagtttgcatcattaccagtcttgattaagtgcatacctggtaaagcaagtcaccgttactgacagcaactagattcgtgctaactgtgaactctaggtcaaatctggacatggcatgaaacaaagaaaaattgttaaccagcaccagcaaacataaaagcaaaattgagaggcaagaattttcacttacggacagcgctgtgttgcactatcaatgcaaggaaaccagcagtgtgcacgccttatttgattgttactatgtaagatgttgccagtgaagtaaagtccagtttcagccttctccaaaatataatctatgtgaaccagttttgtgttcttcacctataaagattcacagtaaggcaccgcatccaaaaatgtaacaggaagagatactcaacatgaactaaccatacttatttttaccttttcaatctcattatcattttccttgtccttctcatttccatt

SEQ ID NO: 14391 - DNA, 3095 bp, Oryza sativa
tttctttttcattgtccttcttagtttcctcttccttgtcctccttttctttttcattgtccttctcagtttcctcttccttgtcctccttttctttttcattgtccttctcagtttcctcttctttgtccttcttatcagcagaaccgttgcagccattaacagcttgatcatcagatatttgagcaggtttcccaccattttcttcacatttttcaccattttcattttgtttttcaccattttcttcatgtttttcaccattttcttcgtggttttcaccattttcttcgtactgtggctcagttattgccttgcttgatctctctgacgagatgatgagattaggtgcagcttcactatttagagaagagatatatactgagcatgcagcatcagcagcagtcttcgaacatgatactgaagaccaactctgttgatcaccagcatttttccactgaggagaatactcaaactcagcagcttgaccatccactaatatgttcctaatcgtcatgttgtcagcatgcagagcaaaagtatcattttcagcttgaacttttatctcagtgtacctttgagtgaaccaaaaatgtaagctcaatcagctcccagtgttaaaagacataaattttatactatggagactggatagaacaggtgaattacaaagcagaagtcacaactattaggattctttcagctgcatttagttaagaacttacagttaaaatgcacgaaacccatttaacaacttttagaaagagttgactacaagcacagcaatatacaataggaagaagtacactcttcaacccagaactctgaaaccatttagaacgcagcctaagattatttgtaggcaggttaggatatgcaactggttgtgttctaggattgtttccaagttcaaggtgaaaaagaaattaaatcctataagttggcatctaatatgctcactttgaatcagaaaggataataaaagactaatagtccaggtacatttcaccacctcttgataaaactttatcatgtgacaacaagactgggattgatccatcagaatactgtgaaagctcatttactccaagtttacctgttttggatgcaagtacataactgatacatgctccaactatgaaattatgacatttcaatggattattctacggaaacggaagatgttactgtcacaagtcatgatactatatgagaccttagcacgtttatacaccaaatgcaatttagattctccaatatcactttgacaaattgtatgcagttaccagtaagccaaggtgcatctagattagaattataagacacaacatatttacatagtggctggttgtcagtttctgctaatttctgcatggtatttaatcataaatttcttgtatctattgaaccaatgctctagaaaaccatacaacaaattctaacaagcgataaatgcaaatttggtgtgtcttttccatatccactatttcaagatctgattactgatgtcattcgaagaactaagcacaccaatacactcaattattgtgcaagcatttgtcactactgttatattcagtgagctacaaatatttgtctgcatttttgctgatacagaacataaattcagcctcccattctttccaataccacatttggtagcatagatacaattttctttcatttctcaaaatcaactttacaaacagaagttaaaaccttctctcaaaacttattgattaccaaacacatgttgagtctaccaaaaccatgtgctatcaagtaaggaactcccaacttccaagaaattgagagtacatgtacatataaacgtactgcaacagaagccctgcatatttcagtaccacttggcacttgccatttcctcttataaaagcttctaccgtgcaatttccacttaatatagcaaatcatctcatgcattcattgaggctcagcccctggccaacagggttaaactttaacaatgattaaatagcttggcacatgacttttgtgacagcagtggactagttcagcaagctggtcttatacgatttaagattatatcttggccgtctcagcagtattcaactgcatttaggtataagggttcatttggaatgcgtaaattctgttggattcgatgtggataagcaatttgtttcctctcatacgaaccctgctacaagagaggtaatgatcgactatggtcacataagctccttcacaacagtttaaacatctcaattttgagcttagctattggtatcagctacaagcagaagaatacttgtttcactaaagcacatactgcataagtatagctattggtatcagctacaaaagcaggagaatacttgtttcactaaagcacatattgcataagtagcccccacaaagttagagaactgaagtaatatacacacaatgagcaatccgcagtaggcacagcaaatccgcatcaaatacgctgttgagcagtcacattgcactattaccacaagttcactcgctacgccagcagcaactccgaagacaaatcagacaacaagtgagaccagcgaaaaccacaattactcaattccagcaactctcgattcctcgtacaatttagccgaagcaagtcagactccaaaacacgaacccccaaaccctaatccgcacgcctcgaaccatccccccaaaccaaccaaatcaaccacccaacaaaggcagctaaagtgggcacgcattagggcaacgagcatgagcaaagcgggggcgcggcctcacccatagatcagccggttctccatgtcgatggagaggcacagcttctggtggagcacggtggcgccccctcccccgccgccagccccgccgccgtcgggcttctgctcttcgcccttctgcttcctcgccttcgccataccgaaacccctcctcctcctcctcctctagggtttggaagcttctagaaggggaccaaaggcggtcggaagtgaggtggggggcttcagaggtgaggtggtggtgtcgaggcgcgccacgtcatcgcgcggccgtgtggggaaagcgaggggagaagccgcggggggggggggggggggggg

SEQ ID NO: 14392 - DNA, 4392 bp, Oryza sativa
tgtcctcgtcctatgtgaaacaactacatcatctcgcgagtgaatccattcattgatagtgtggttttgtgaaactacacgaccaaaatatatgtacttaaatgccaagtgttaaagtgtatgtggttttctgcaatttagaccacaaaacatgtagttttatgaaatttactcttttcattatgacattcaaagaacaatggaatatcctcactagggattaaaatagttttccccttcttaaccttcaaaattctgttgcgccgggtttcctcgagttccgcgcaaaccccgtcgaaagagagatctgttgttacccacggaatttaacttctagaactaatttcgcgcagctaaaataaagataaccatcgaactgagcgaatatcgcgggatacgatcccatccatccgtttcccgttggacggcactgatctggccgaacatttcaccatgcggatccatcgggcgagggggtcccgcagccgccaaggcaaatgggccatttccttccttacaataaaaggaaaaaaaaatcccacgcgtttttaccgcagcgattatttccttttttttttcgtttcattttcaccgctataataatagtactagtttgttccaacgtactcccgcttccatctaatcgcttctccaccggagctgctttagggcgacggcgagatcgattcgacgggaagccagccatgggaggggggtccatccgcgcggcggcgaaggccgccatgatcgggggctaccgctccgcctcggccgtgcgccgcgccgtcctcccggcctccccggcgccccagacagccccatcggcggcgggcgagggccgcaaggcggcgtccacctacgcggcgatcgacgactgggtcatcccggaccgcgaggtgttcggccccgtgcccacccacgaggaggccatggccgccaccctcgacctcaaggagtccttccagttgtgcgtaactttgccaccaccttgcccttcacgcttttagttttctcatagccgttgaatgtgctcgtgtgatcggtgatcctattgctccatccgctgcatggttgtggcctccggtagttttattcgaatcatgcatgtgtgtggtgtgatctatggttcatagttattggacactgatgcgtggataagtttattcattatacaatgacttctagcggactataatttcttttgcagtaatgaaaaaaaaagttattcgcatctattggcttttgatgaagtgacgaagcatatattcatagtatttgtagtagagcgttagagtagtattacttgtgatgtttttctccttgtttttagaaataacatatatagagattgttgcaacatgatgtgcctctttgctgttcattcacatgtttattttaaatatgtttaaaagtttttgaatctttctttctcatcactgcttcttaatttgcagtatgtttcgacaatgaatatctccatatatatatatgcgaagtatgcctgagaaaaatgttaacaatatgtagacaaattattttgaagttgttcaaaccgtaaaatcattctattgtgcttttgttattttccttctatataaaggttttatgcttcactgctcttccttgttctttacccccaaaaaaaactgatgacctgttttctcttaaatagtgctaagtctgctcaattggagcctctcccctctggtgaccttgatgtccctacaaaggtgggtcaggagggtcttgttcactcagaaacacctcaggatcttgttcattcagaaacacagggtcttgttgatttaggagcatcccaggatcttgttcattcggaaacatctcagggtcttgttcattcggaatcatctcagggtcttattcattcaaaaacttctgagcatgaggataaccatgaaatttcacttgtttcctctggagcccctggacgcgttgtgcaagcgttcacaatgctacaggatagccctgaagcacaggtacttaccacaaactttgccaatgtaaatagagtcaactactaagttgttgtgccatcgtttgctagcgtcaatgaggattacatgtctctttttcaaacactaaaagataatgatgttttgtgaaatctgagccctattattgaaatttcacatgcaagcttgacatttgatcacaaaatctccagccttcatattttctggagtaacactttccattttattatgttagtttggttcaagcgctcaatttattccttattaaaatatcctggttctactgcaagcatagattctacttttaaattctgaaagttcttctctttggaagcttataaaagttgttacagatcattttatgataactgttggttgcaggaagttgttgcctcacttgcttctgatcagaatgtttggaacgctgtaatgaggaatgaaaaggttatgaagttttacaagacctatgcgacgagtaagtattagtctaggtgcccggcctattttgctcatctgattgagtagatttttcaaaatttaacctgctatccgctcttactactttccctctctcagagcttaacgaagatgaggtcgaaggcagtgagtcagactccgtgcagaacagcagtgagttgggcagcgctggagaagcgttcatgtgctacgtggagaaaatgaaggcactggtgtctgagatgatgacgaacctttcaagcattatgcaagatctagttgcaacctcggacgagggccagagcaaggggaagctgaagactatgatcctggactccaagaaagattttgcaaatgctccatcagccttcgtcctcttggctattgcttcgatcatggtagttttacttaagcgcgcgtaggccatttgcccagtcataatgataaaataataaggtaggattctttggtgttcaggacattcgggttcttttttttggtcagatttttttttcttctcagttcaacaagtagttgactgtacgaatgaatcctcgtaatcgtgttcacctgatacattgagagacatcgcgagagcttgaagtctttggtattgtaaagttttcactctccttataatataaagccagcttttgctggatctttcaggaaaaagaatggcaggaatgcattgcatggtttttgaactatttaggttgatgatacgttcgtgtacgtctggatagcatgtattgtcatcgcgtgcatacagtttcatactttcattattaagctatcggactatcgcgaatccatttcgtgttattctcagatttaaaaataataatatacgcttcactgataaaaaaaataataatatacgcttcactgataaaatcaaattagctacgatgacacgtgtaaatcatgcacacaaagcaacagattgattcaagttgatttcagtgattactggcaacaaatttatcaagttgatttcagtgattattggcatacaaatttatcggtataaacatgcaatgaaccaacaatatcaacagttccagattgagcataactcttgccataacaatatcagcagtcccggattgtggcagtaaaaggcttttcgaatcaacgagggaaagttaagatcccctcggcggctcggccctctcaagttttatttgtaataattcagacacagactgatggaagcatgaatttccagttattgaaccagtcaaatttcctaagtcccaagcatccctcttatagctcagtgtgcaactctgcagagaaaagaataaggtaaaattgagaaaactctcttttcatagtcacgagaaatactgtctgacagtcaaatgcacatactttcatcagggttgactcttgctctaacataagaaacgctaaaggcttagaattgaagttccatttctagcttacaccaacttgcttgggaagtctgttgttgtatagaagaaaccgctaacaacatggctttgatttatacaagacacaacataagtttacagtagaagaatctagtaataccttttgccgcaaaacacccacccagagtggatcatgttactcaactcggatctgcttacagagaatcttaattgtggaccttgagcatcttagtttaaatccatagcagaagattgaagaaatgccacagtgctgctaccgaagtttccactagccatttcttctgagagaaggggaggttcatcaggaatctaccacccagagaaatccttaaattctacattagacacactcgcttttcttttcttgtttgaatcatctgcaaccacatcagcaaagccagctgtccgagcttttaggtacttgccaacgccaccaccagagctagttgaaccagcaacgccagtgcctggattgctataccatgatcccaccttatcct

SEQ ID NO: 14393 - DNA, 7273 bp, Oryza sativa
  unsure (1)..(7273): unsure at all n locations
tccgcagatgtactcgtgtggcatttcgcgggggcggtggagggttgagacctcacctggtggtgncggtgtggcggcggaagaaggcggcggaggtggctgggaggcggcggaggtggagggacgggacgggagcaggcggtgcccgccgccgcgcagccgacggcggaggagcttggacagcgccgccgccatctttgaggtcaggggatcagggggcttggaccggaggaggccgcaagacagcggcgactagaactagagtcaagacccccttcacccttggtcaattggagtttgattttttgttttcttataaacgagtttgaaattcgttttcccgttgtttgaagctcgtaactggtatatactgcctccttctttcatttttaaatagataacatagttgacttttgaacatatatttaattatttgttttattaaaaaaattatgtacatataatttattttgttgtgagttgttttatgactaaaaatactttaaacatgatttatatcttatgtagttgtgtaagatttttgaataagacaaatatttaaacatgtttgtaaaaatcaacaacgttatatatttaaaaaacagagaaaatacgtgagatgatatgtttattcgtatcatagattaaattaagtatttggaatctaaaaatgttggaaacaaagctttgtaacttgtaacactggaaaacagacccgggggaagacaaacctcggtcgatagaaaattcttcgagtagaaaaacttcatagtaaacgaacgtatgccgatagaaaattcttcgagtagataaacttgatagcaaatgaacgtactttccctaaaccatttcttctcataacgtgcaatttcccttttgcacttctaatttcatatcaaattgtacaagtagaaatcccttctaatttcataacaaactgtacaagaaattgcaaggtggtgctccagcacctttacttacctgcacacattatacaactgttctcccaggatgatgcaattcacttaaaagaaccaaatacatagtttaaatatttctctcatgctacatattattactctcagagtctcaagcacaaatttgcaattcattgcagcatcgatttatcaacatttttgtctccctttagtttcatccaaagtaaacaatatgatccacaaatcacgcataatttcaaattcaccaagcaagtatgcaacacgagggtggaacctcttgtaagtcggaaggaagcacatgcgtgcacaataccagatgcagtctgccaatataatgccaaagcaggttacaaaattatgaacacaacctccctgatcaacaataactcttgcataatttacaggccaagtgctacgcaacatgcaaaaagagagaatctgcgtacttcaaaagctaaaaatttagatcaattcttcttttttgagtgcttcacgagccagtcgatgacagagtcaatgtttgtcgagttcttgcatgatatcatgaagcatgccacttctcggtcagtgattgtctttagccccctgcaatgtcacatataacttgtcgaacacaggtttgtgcgtaagaaaaccttatcggtctgtaatagcttagcgtgtacttacattacgtctgtgaagctttgcttagggaaagcttcaggtttgtcaattttattgccaatgactagtaatgggatcccagtcaaagaaggcttgctcagaagatcatggagctcgcttttggcaatagccatgttctctcgatcggctgcatccacaacatacctgcaggaacccaaaacattccccatggtttgtaaagtcaattattgccaccagcaacgaaaaataaaataatataacaacgaaccagattttaaggggaaaagtcagctagaggggttacatattagaatttagaacatgcgccaagtgaacaaaaaagcaaaaatagaaaaatagaagataaagataaacaagacatcataattatcttcaataatgcaaaattaaaaaagtctgatcaaataaataaaagcatcatctttttctagaatatccaatatccaataggcaaggcaaattcaaactgacttatccttgcacaaggataactacgacataaggcagagggaagaaaagtgcagtatgccttacaaaagactaagaacagtttagttgagaaataaagaggttaaactcaagaacataagatctgcacaaaatcccatgtttcacctaaactatccaggttaagcttttgaaaccagtgaatgtgcactacaatatgaagctacttctgtctatggggtctagtaattaaatttcattgatgaagtttgcctaaatttcagcagtggtcaaatcaaaatgacatgaaaataattggttagcatgtgtaagcaacaaccaactaagcatgacaactactgagtatagtgcaattcctgctgcacatgcatcaaattagacaggaaaggaacttacacaattgcagaaactgcacgacagtatctctcccacatgctacggaatcttggctggcctccaagatcccacaattttattgtgacattacctttggtcacctttctcatgttgaatcctacagtaggaatcatgtcctcactaaagcctcctgtctgcagattacatggtgatccatgagaaatcattataattcagcaagtgaataaataattaagaaactgatacttacagcaatgacattcacaagcgatgttttcccagcattttgaagccctatcaaggaaagctccatctcttgcttgaaaaaaagactgcatataaaggaatatatgttgaatcctcatcaagcaatattagtaacaaagcatatccattttactcgctaatataaaccagaagttggcccacatgtcattacgtcgaagtagtgcctcaaagaaacaaaggaagttctccactacccaatcagtgcatgtgatgagagctcctttgttttcatactaacttacttggccaccgccggtaggtagatgtggaactaatcatagcctaccacaactctttttcataccaatgattgaaattcagtgcaagcatggccaacatcgtcctaattctacagtccatgatacaagaactttgtaatgtgaatattcatgacaattaacagagtagacccctctgttacatacaaaatcactctgcaaattctgtatcccctcacctcccttgaatttttgattgacacgttgaatgaatacagttgggcaggcacgttcaattaatacagtgattgacgcgccctgataatacttcgattggcttatacgatactccatttgatagtgttgttcaacagataaaaaagcttctgccatacaatgttcctacagcgtacttgtaagtagcaaaaggggccaaatctgaacttggaaaaacagaaaaggaccacaagaagccaaattcccctacgtatatcgggaataaacgcgggtatgcgtgtatcgacccatcaaaaacaacatttcccgttagtcaacgttgcaaaaggaaaaaattatctcaataccatacttattcgcgcgccgcaaaaccatccaatccagtaaaactatctaatcctaacccagatccccgacgcatcgatcgatcgatcgatcccctcccccgtcaatgccccaagcaagagcgagcttcgacgagcgtacctgcggagccagttgaggaaggcttcccagaaccccatggcgtcgtctcctcctcccccctcgcctacgaagcggggaccctgggtggtggtggcggcggtcgccgggagccggggtacggacggcgacgggagcctcaccggtggcggctcgcgcgggtttactttatttggagggcagagcgtgtgggaagggagggacgggggcagcgcggattgggaggagcgagcgacagcgaggcaaggcgagagcgacggcgcgaggaggaggaagagacgagagggaggaggggatggtattattatgtggcgatccaccaatcgtatgtggcctcgcggcttagctggccgctgtgtttagtagagtaggtttcattgttttaccgatttggatgtgcgtgattggtccaaaggctcctactaccaacattggtgacaggatccagctcggttacggaatctgctccccggataagcggtggtagttaatgatgatttgcggtagtaggtgaagctgttttttactcctgccgacgatttttcataatcatatttcatcttatcacataggccaaagataactaattctacttatcatttatttaaacatactagtactagtcatttctcgtaaacaaacgattcataaatatttacatttctccatacccatgtagctaattttatgtgaaaaaatggagagatctacattaaatctgagaaatttattgagaggataggctattggattaaaatatatctatcaaaataaatttttcagatttaaaaatatgattatcaaaagtagatagagggaatatgattatcaaagtaaatggagggagtaaacaaaatgttttaagtctcgccatctctggaccaattgtttcagaggttttgactcaccgggcgacttctttgcatgggcatttggcctgatgaggtgaacccaagaggatcatcatatatagcccaatcgagtcgaacagctcgtgtcaccgtgtagatgcacgtagactcggtgtttggttatttgcatctagcgttgctctcacttcgcataaaactggtgtaaatgtaatgcaggggtgtttgggggaaactattttaacagctcgagtggacgtccacccgtttattacatgtcatctaaatagttatgaaaaaaattaaaaaatatataaataagatagatcaacatgttatatatcagtccacaaacatgcaagttgaaatttaacttctacaagttataacaaaaataacaaacaaaacttaaattactatatgtatatttacaattaaatttgttatttttgttacaacttgtaaaagttgaatttgaacttgcatgtttgtggagtgatatattatatattgatctatcttattaatttttttgaaaatttttcgtaaccatttagttgacatgcaataaacggttgcacatccactcgagatattagaatccatctccgggtgtttggttgtctgcacagccgtcggcgtcgggtcctgagtttgcttgtgcaaaacggcctcctaaagttagacccaatgacaacgatgggattcaagctcctttcgttgtccagggcaaggcggcaagcggatacaaacgttgggtatgagcgaatgcaaatgcatgtgtaagtaagtacgcgctggtgttgtggtgcagggtgggactggccgggaccgtgtgcatccggtcacagccaggcacagcgaagcggccgcggcgatctccctttgacgaggagtgcgaggcggcgagatagctttattatgataaagtaaatatattgctttaaaaataatgctcaaatgataaatttagtgtaaattacatcagcagttcacgaacttatcaatctagcgcacaaacttgtaaaaatactcgttttggtgtataaacttctgttcgtgcggactaaggccaaaataacactacatggctaatcctgttgatttaagtgctgattaggatactatataaacatatatgtgagaatatcgctatttagaaatacatatgttcactaaaagatagaatgagatatacatgatagtagaaaaaaaatataaatactgatcaatgacacaagagttagaaatatatagaattcattatttcaattatgaatgataaagtaaagatcaaaattataaatatattgttttatgaatattcaatacatgtatgcatgtcacattctaatcaacaccagcttggtataaagttaacaatgtcaagttattttctcacacaaactagataagttcaaatactgtaacgagcattttacaagtttacgtatacttagatatttacctaacaagtttatataccatcaatataatttactcataaatttaacaatgaatatattgatatataaaaatgaaaattcagctacagtcatgcaaccaacgaaaaaaacataatcttttccgaacaatacttttgtacaaccaagaaaacaaaatctcatgctagtcgtgaaaagaaaaggctcatggaagcatcgactgaattcaagctaccgttagaagccagaatttattgataagaataatgtgcatcgcatgtatgtctgaataatgtgcatcgtacctatgtctcgtgtttcaaacctggatagtaatgtgtcttggtgaagtttggcggatatggtgtttataaactagacacacccatcacattttatcaaactcgtccgataaattcgtggctagctactctccctgtcccaaaataagacaaatcctgggtttccgtgtccaacatttgactgtatgttttatatgaaatatttttataattagtatttccattgttgttagatgataaaacatgattaatactttatgcgtgacttgcctttttaatatttttcataattttttcaaataagacggacgatcaaatgttggacatggaaacccagagtttgtcttttttttatggagggagtatatatgaaccggaacacatctgatctgacacaaagcaaagcatcgcgattgagttaatactatacgaccctgcgatggaaagtggattttgatccgtcgaggggatatcttcttgttgcttgcatgttactcaaatggttatgaaaaaatttaaaaaaatttgaaaagatatattaacatgtgatatatcactccacaaacatgcaggtaaaaatttaacttctacatatcacaacgaaaaaaataaatttgactttgaatatacgttaaccagctgcggtttgatttgtttttttacgagatgtagaagttgaatttgaatttacatgtttgtgtagtgttacatcacatattaatacatcttcttaatttttttattttttttcataagagtaaatttcacaaaactacatgttttatagttcaagttacagaaaaccacacacattttgacacttggcacttaagtacatatattttggtagtttagtttcatttggtagtttagtttcacaaaaccacactatcgatgaatggattcacccgtgagatgatgtggttgttccatttaggatggggacgtggcatcctg

SEQ ID NO: 14394 - DNA, 1079 bp, Oryza sativa
agacatatgcatcagcattccattcacttgtgaggttttctttcgtgaacgtggaggacctctaggcttgacactgtcagcaatagcagtagtcattcgtggcatcaggcttcttatatcaattccctgaagaacttgcaatgctgcatcaaagtttcctctctgatgttccagtctacccagcaatgcccgggcttcctgttacattagccacaatgaatacaacactgaggaaaccagaaatatagcttatcttctcggaagagggaaggattcagacaaacctcataatttagtgaaagggtctctctcaggtctgattccacttcgcttacttggttgtcatcaggagttgattctcgatttcctatccttgaagaagaaccagttgctgagtaatcccgcgtcgcaagagattcaggcgatcgaggcatttcttcaaacttggattggtccccgctacaactgcataacataattgccggcattttctgctgtgctgatgatttactgtagataaatatctatctctcaagatctccccaccagaccaatgggattaaccagtcatcaagtatataatatactatagaacctgacaagtaaaaatggaaggtgcttagtgcacattttaagtaatcataccctaataattaattaaagaatagagctgtggtgctatgatgagtaaaggccgggatgttttattccattatcttaaaaaaagaatacagctgtggtccttgattcttgaacttgctagtctgatgtcatcctggtcactaaactctgaaatgcatatttaggactctaaaacttgttgaacttgtcggcttcactaatttgattgggctatggtggcttggagaggcgagtcggaggtggccaaaacagagcacgcggcggcgctgacggcaatcccgagctccagcggccaatttgcaggggcggatccaacttgggacatgggggtttgggggaacaaacaacaaactgtttgttacttgtattaacgttaaggctctgaaattaagaaaagagctgaagaacttctttcagaatccagatctagaagagaa

SEQ ID NO: 14395 - DNA, 3523 bp, Oryza sativa
cttccagacctgtcaccgtgctgccattggttcgctagaaccaaatcaatccaggcttcggagacgctgatgctagtgatttttactactggactcatcatggtaatattatcatgcttgcagattgcaacactgcgatgttctcatggtgctcattttagtggagacaatggagtactgctgctacgtgcaaactctgcaagtcacgtgaccatttgttccccgccattgacagttaccggtcatggacacaagatgccacattgcattctcgcagaacacgcatggccaaggaacaagaatcctatgttcagctatttttgagtccaaaacatggtgtcctgtgtcctagtcctgggtttattgtggccgttgagagagtgaggagaatttaggtgacctaggatacctttcggtgttaaataagtgttttagtgtaaagcacatgcttatcatttaaggggttagtgtgacgctccttaattgagtgaaatatcagcatagccgcataggtgcatataaaagatggctatttatgcagaacgttgtgcatggtactgactgaccgtgcaaggttagccggctagcatctactcttctcgaggtaccatcacatgcattcttgacctgcttttgccagagagcacaaatgtagggtacaaaaaaccctttacctattcacatctgcccccatttatcagatggggataaaagggacaacacttgacagcaaagtccacagggtaagcagaaaaacagcatcgacattcaacagttctatcaattggagcagagacgaggactgaacaacactgactatgtacattgttgggcagaggcagcacacaaggccgagtttagttccaaactttttcttcaaactagggtgtgtttagttcacgctaaaattggaagttaggttgaaattaaaacgatgtgacagaaaagttgaaagtttgaaaaaaaaattggaaactaaaccaggccttaggggcagatgtgtaacagattcgatgtttttatttttcagataaaatcagcaagtactgtaaaattgcttctgcaagcaccatcaacctcgtggacgactagctcattgaacaaaaaaactacaaagaatagaaacaaataacaatgtctacgttgtttcctcaatgtaagttccgtaacaaaagaatcaaggatatcagaagctgctaacaaaacttttctatcctctgagttcaactacgagatgcccatatggatgcacatcatatcaaatgtggcaagactactttgatcattgcctgagagatgaagatgcagtactcaggttatcgaacatctctttctgaagcagcgggaacttgagcttcataaataagtacaagatgcaggagacaggtttatgttccgctataacttaaccttctttgcctttatccgctttgcagccatgaaagtcacagcagcagaaagagtgtacctaataacaacgaaagatagtaggtggtcataaacacacaaatacaccagcaagaatgataccaactgtaaccatagcagtcaaagaaacaattatgtatctagctgacgattgcaaaattttagtgcatgattacagcgagaaaatttgcctgcatatatatgtgccatatgcaagctaatctgatgtaatatgggcagaccttaagaagagtttgggataattttttttttctataaaggagacacaacagctttccagtctcagctgaaacagaacaacacagtacataaccagcccagagagtttggaatacaaaccccatactatgtgttcctactccagtccagagtcacattcttgtaatgtacattctccagtttctgcaactcaattttcactacagtattgcatttcatgtgcatatatgatatcctaccacttagttggaacattatttagtgaaagaataccacataactatctaaggaagcaaatggtatcaacagattacacctggcagttctgtaaagacaaaaggcttaaatgcgatagtgagtacccgatacggtaggaaattgctctgaacctttctaatatgagcaatagtatctaactatctattgggagtcttaacatttctagtaataacaatccaagaatgaatggaatagtcataatcaagtaatcaactagatagcactcataaaacttgtcaagtaaagctgtagcaattattatagatcatcatataaaaatgtagcagttattatagatttcacacaccccaccaacaatgaggaatgtgcaaggtattgaagttaataggcacttaccatgtaacggtgtattttagatggtcatgtggcatcactgagtgatgaatcaaagtactgacatcttttggaacaggataaggatttgttggagagacatcctcatttatatcttctatataaatagtattttcagggaggccacatgcacgagcaatcatgggaacatccacataaaaccactggccaacactgggttcattagctggaacaaatatgctgggcttctcacttcctcggataactcccaaaactcttacaggaggttttacaggtttttcaatctgcaaaaggtggaaaagcaatttgcatcaaatttatgcacggacaataatcacagtggtttccacacacaaaccatcaacaactacaaccaatgatttaaagcacgcctggttggttattcataaaaagatatttgataatgtgctgtcacattgttatcatgcacaataagtttatgtaccatgttgctgataagatatcaatgcataaacttgatctgatgagcaaagcagaaagcattaacatttttaagcaataggttggaaacgacgcaaataaaggaatgcaaaatcacctcacaagattgttcaggctccttagagttagaccaaaacttccaccatgaaccttttccatctgtctttttatcagcctctttatattctggaacttctctgacgccctggtgatcctgtacgttcttatcacgccaatcacgaggaacccaccctctattcacaagtataggtggccacgaactgacaatatttttcagaaatacaaatattttaagaaacatggaagaaataagacaatgtagtttgtttctatggttcaagcaagcaatacagcatcaggcaactatgtttctttttatgtgttctctgtgttagtaacgtgaggagaaacttaattcagaactaattgtaagatcgcaacatcttcacggggaaaaaaaaaagaagaaaaactttgctaataccggtccaagcatggatagatggcatatcgcacaacacaacctcaagtggaagttcagcttatcagaaatgtaatgtaatgcagaaacatttattagaagctatacaccccaatttgagattatggcttgtgcagagcttctctactgagacaaataatgatacgttagttccattttagtcaagtagatcttatgttcatcgttgattcgtttctctatcctaatcttgag

SEQ ID NO: 14396 - DNA, 2792 bp, Oryza sativa
ctaaccaatggtcgatcgtcatcatcaacaggaaccttttcatagccgaaagagtggtcaagccaccgaccacatgccaaataccgtatgcttgaaatttaaatgtggtgcggacttgtacaagatgaaaaattgggacccattggtatgaggcccagaattagccatgctgacaacacctcttcctgaatgtataagttttgaattcagttcatccttgaaaggtttaccccatatggactcccctccacttcctgtgccagttggatcacctccttgaatcatgaaatttctgtaaaaggaattattaaacagataagatttagatatgaccataagtatgcataaaacaaatgactaggtaaaaaggactaatgtgatcagaacatacttgatactacgatggaagataagaccattatagtaaccattttcacaatgtgtgaggaaattttcacatgtccgaggtgttatatcacaatgaagctccaaattcaaatcaccatgggtggtatgcaactgaacatatcccttcttttttggattcttttcaaccttaacatactcaagttcatttttggtgacaggatcataggcagttgatgtgaaagaacgtgaagctgctcctgtggtgtaacggcttttaacctgaaatcattgaatcatctccatcagagaaaatccactgcgtatgtaacacaaaccagacaaaatacattgagatgatacgaaagtgtaccagtttagcatttacaggagctcgatctcctgccatgtgcattgctattctagcagctgttttctcagcagtagcagcctttgctgcggctgcacttctgccatgaacagaagcagaagcagcatctacaatactgaaaggctgatgaggtttaggttctttgccagattttgagtcatccttctccttttttgccaatatagcagcaagtgcagcagctctttccttttgagctttctgccctcccccaccatgcaaaaaagctaactttcccttttcagttccaagttccttaatcatttgcttaagatcaccagaaatatttatgttgtaggttggatcatttttcattcgttgcaactctgagcaacagtcatacagataaagcatgtaagttaactaggaaatagcaatatgaaagaagtaagagtgaaagagggaccggaatcaaccttcatcttcaagtttgaggcctttcttgacatggtcaaattcacctaggatcttgctatcaaccgcatttggattcttcaaagttcataagatgaatataattagattacagggctaaatgtcaacaaattgacactgagtacagtagacatgcagttctaaatacatacctgaattgttatcaagtcatttcgtgtaaagggctcatcagttagcaattctctccaattctttggcttgatgttgagttcttggattgcctgcattttatgagtcaagaatgcatgagctaaaaagtaccataggtccataatactaaattgttcacttgaaaaagctcaccaaaccccacctcataacagaagacgttcccagtagtctttacagcaactatatgcgtgaattctgtaaaaactttattcaaaacagggcactggaactctcctgcaagaaaaaggacagatatttaatgtccgagatagaagagtacatgtaccgtaacatttggttcaagatactctgaaatttttgcgacggtttaactcaccatctgagttcttgtggaatgttaaaggcattagatcttcctgcttgagtggtgttcctgttactgggtgcttcccgaacttcttaatgtatggaattatgctcctacatttatacacagccaacacaggattttcaggatctcagtctctaatattttctccaaaaacatatacaaagaagaacaatgaacttacatcaaatcaaagacgcttccatctgctgtgcacactggatcctcaaatggtaaaaacgtaagcctaaaccaccaaaccaaataattataatcagtggagaacggaggaaattaacatttggtatacagatccatccactactaagctcaatcaacataatctaaaggttaaatatcatcaagtactgaagttgaccacaaagaaattactatactttgctaaccgccttaactggtaacatatcaactaaaagatcaacaggaagcgcaataatgaagtttatgcactaaataagaaaagctacaagctcaggctctccccaaaccctaatcagaatagtaatgactagcagaatacacagaaggaggaaaatctcccttccggctagttccaaaaacagtagaggaagggtaattacgcgcagcagtagaagggaaggcgcttgaagggcgtgccggcctccttctgcttggcgccgccccactccgtcgcccactccgtccgcgttatgaacatccggtccttgctatgctgcttcttccccatctccgatgagcctacaagatcgcgcctacagccggtggtgctggtgccgctgcttctgctgctcgccggcggcgagaaagaggggagatttgacggcgaggagcgtttgggtcggattggtcggggagagagaaggaagaagaagccgattcgcccgcggctcggctcggctccggttggaatacggctcgagccgccgcctcactaggtcggtccagagatagtttcggcgagtttttttcgtttttagatttttttttaatattacagaaataatctatcgactaaaaaaattgcagaaatagcccctg

SEQ ID NO: 14397 - DNA, 1216 bp, Oryza sativa
ttcattcgattgcatttttcctacatctttcaaaatctaagaacgaacaaaattggtaaggacgtcaacagaaagacgctcacagttgcaagtttgcaactagatccacataatttctgatttctacagaatgcgttgccacagtttgagaagtgagaggtaatttctacaaggaatcctgggctattgcgttcctattgcagcatgatggggaggtgctctgagaagtcctgtatcggcgataactcctggagctcgtaggctgcctggaagcagtcggccgcttcaagcagtgatccttcagatttcaagacgagtccaaggcgcagccaggcttgatggcttgtgggttccaaacggagggcattacggaggaacgttcttgcgatcgacaatgatttccctccaagaatggttagaattcctgccatgcaaaccatgcttgggacatagtctggatcgatggagagggagagcgagaacgccgtcagggcttcctggtgcaaggactgagcctgcaatataaggcctgcaggggaggctatcatgttagcattctccaaaatcataagccgtgaaatgaataactactatgttagatgcccatagtaccaaataatctgaaaggtgcattcccccagttttttttttttgggtttaattttgctcagacacattgactaaagtctgccagtcacaacaaaattttaccaagcactaataatatagcttgaactagtaacacgagtacacgacaccatcgatcatgtttcaggggaaggcctatcttcttctggatgcagccaaactcaaacttcttctgtatggccaaggcagaacctgattttctggaggtgtttgcaaatgaacccaatctaacattgaggttctttatgctgcacataaatatattttgaagtgcttgagaatatttacctctgacatggcagcacttgggagagaaagaactgatagatttggctttgtcaagacagacatttgagtcatgccatgattcaagcttcgtgtatattgacgccaaatctaaccatgcttccatctctaaattctgtagggatttaacctgcaaaggccaaagtgtataagaaagaagaatacaacacaaacattttgagttccaaaaagaggtgaaagggacaatgtgatcgtaccttgtcataaggggtctgcttccagatttctttctttgcttgga

SEQ ID NO: 14398 - DNA, 805 bp, Oryza sativa
cttttaaattttgatgagcagataacacaagaatcagtaacttccaggcaataactaaacttcccatcaccatctcaacgcattctgttgcactttcaacagctgcattcagtttacgctgcattgcattttcccaagcaaggctatacataatttcagggctatactttgccattgcagcagcatcctgtagcaacctcagtgcttcatcttgtaatctcaatttttctgcatgagaagtggaggatctagcaaaaggtccatagcaaacaccaagaagatggtttacaacactgacaaaatggaaatcatgctttctgaaagacttcatggctttatctgcaaattttattccttcagaagcacgctttgggttcttacaacatagtttggctcctaaaagaagagatggaatatgaggcttccctttcctttctaatacgttgaaaccgttccttataatgtttaaggcgctatcatccatgccagctgcactgtagcagagcgcaagaatataccatctttctgatcggttataggttccaggcaacaacatttccagatggctagccaagatttcataatggcctgataatgagagtgcaaacatcaaatggttcacaaggtcaggatcccactttatttcttgaagggctaacttttttgtaagtatcagcaacaacaaaattgcttcctccatgttgttcctaggagttgctggcttgtgttgatcaaattcttgagtaaacttcacttgagcaccacaatacagcagagtcactgctaaatctttttgtaaatttgc

SEQ ID NO: 14399 - DNA, 3012 bp, Oryza sativa
cagccatttcttgcaaagcattcaacaagacagtgttaacagccggccatacagtttatattatatcaagatactgtttgatttataaacattgttgacctaaaagttggtaaaagtttgtgacctgcttgtaagtctagcacaaaacagtaaataaactctaaaccgcaattttattatagaaatgaaatagcagtaggcattacaattgatatgtcagggaaattaataaggacgtccgaaacctcaagactttcagtgtctcttgagcatatccactctcttaattgagctgttagctcttcctcatgagcaggatcttgagtttcatctgcaaacataaaaagtcagagaaatgtatgaaattttcatgtactaccgtcgagagtgaggttcttcatatggattgcccttaaggaccggtgcctaacggcggacaatctcgcaaaacgtggatggcctcacggcgacctctgctcactttgccaaagggacagcgaagactgccattacctgtttgtcgtctgccctttcacggatgcagtttggcaaatcctcagaagctggatgaatgtgagtttctctacgcctggcgagaaaaccctgcacctgtctgacaggtggctgcaggagaggctctgttgtcggctgcgctacaggaacaattttgatagcctattattcttggtttgttggtttctttggaaggaaaggaatgctagaattttcgatcaatgcttcaagcctgctgttacaatagccgatgacatcaaagaggagttcatctgctggaagaaagcggggatagttgcagaaattagagagtagtcggcttcttatttcggttcagagcgacccttcctctggttactctgccctcctctcccttcctggggataagcccttggcttgttcccgctcggctctcttagccaatgtaaaccaactttgtatttgctcttttcttctcaaattttaatgaaattggttggcctccttcggctgacctggcaaaaaattttcatgtactacaaagtcagagaatgtcgaacatgtattgcacacttcataaaaaattaaatgagcatccaaacatttgaataacttaataatgttaatgaccaaatttggtaatccaaggatcggagataaagaagaaatcgagatggaattcgagatggaaatcgtcccggaaacaaagtgagaatcggctgaagtccgaatcggctacgactgagatcggcagagttagagtcggacgggattagccgattgaatcgaatctgacaatatgacacggcatatgttgtcgggttaggttgacgtgcttcatgatgattgccacgcatggatagagtcctgagaaaacaattgtatctattaattaagatattttatataatttccttagagatatgtttgggcaaaagtctgccgcaaagacttatggtatcttagagtttgttagagataagagtcgtgtccgatatggacatattttgtaattttcgggtataaatagacccgagccccatgtaatcaaactaacacacgttcaatacaatctcggcgcatcgccactctttttactttcgttttgtttcgacgagttcttgctttcgggttgagctgcatcggtttcgatcttcaactagaggtaaaacctgttatggcggcttgcgttctcgggattagtgcttccatctttatgatactctaatcttgtttatgtaattcgtcgagttatcatatatcttacataatctccggcaatatcattatctaacctctagtcggctaacatctgttaatagaaagcagccgattaggttaaatattgacgttgacttagattatataagatatctaccactctatgacacatccaacggcttgattgtctatatattgtttctcttttcatacttatagctgcatcagttgagtttgatcttatgaagtcgtgattagaatctcaatctctagcctgtttttggttgccgattagggtagtatcggggtttcagccgatctcacctgatttagctttatatttcatgtgcttaattgatatgttagatctgccctttatgttaagatttcattacaataaagtatgttaggctcctgtttgatgtattttacttgtcttaatatcttaatatagagtggtgtcggagtattagccgatacatgctagatctatctgatcggctatgctatgaacatgtatagttttgttgttaatatatatttcgatctaagtgatttatactgtctcggcatggcgaccgatctatcccaatcacttgatttaagtatatatcgacatgaggattatatattgttaatatctacagccgatcgagtagatttagttctttctcatttagtcatgactgccgatcgatgcatatatgacatcggctcaaagataaatgatatgtcatcggcacttagccgatcggctatcgtttatgaatttaaccgcggtttctttgtatttgtttcttgttgattgtaggatcaaatcaactggcacgctcgcatacccaaaggcaagttttgaacctgcactggagttaagcagatctcccaggcctcgtgtttttacatcaacaaatagttgacataaaattcatttgtatggaaaagaaagcacagatgaagctctcagatcaaattaactgaccatctgagattgtactattttgacctttgcaattcccatctattttgataagtatgttagcaccaacaacagaaaatacaacaagaatacaaacaaagaaactttaccatttggagcaacaatgtaacactcagacgggcgaacctaatagaattagcgattcagtctatactattaggtaaaaagaaaacaaaaatatgcatatacatcgatgtgtgcataaaaaggtagcatcacagcacactaaggatcaaactaagagaatctcactaacaaaaatgtcaattatatggtctcttaggtcacctcattgtcagaaa

SEQ ID NO: 14400 - DNA, 7284 bp, Oryza sativa
ccagttattaaaccgagtatctgacaaaacggatgttaaaataggaggcgagtgaggggtagtctaaaaatcatgccaggagaggtttaataagctggcatataattcctaaaggcatattccaaattcaaatggagcttttcttatcacaaactagtgcaggattaagcaaatgtctgttcaaacccaaagtagtgtattggaaacatttaaaaaaacagaagaaaaattgggtcatagaactatcagaacaggaaatctgggaataaccaaaccaatacgtgtggtgtctcaattccacatccaagcaacaagtttgaaaagagaaactaaagttactcatggaatctgctgctgccaaaaaacctctgaagagataccaaaagcaagcacagcaagaattcagcgaactgaaaaattgggtcatagctaaatttgtttggtgttctgtaattgaagtaattgagggggttttaattccaacaaacttttgggatagtctaaaagctgtcaaagaaaaactgggggtgaatttaggtcttttcctttgtgccagtctttgctggggtttgcggcttgtgagaaatgacttagtatttgaaaataaattggttaaatcacctttgcaggtggttttcaagtcaatctcattgatgcagagatggaaggtgctgctaagagaaaaagatcacgaggctttgaacgcactgcttgagaagctgaagagtaagatggaggctctgcgtcctgtggatgttttgccggacaatgttattgcctgagttaggtgctgctgttggtggggctgtagttttttagatctgctctatagtctccgggtgctgttaagtttcagttgctgttggttttgggtgttttaagctagcgcgtgatgggtactggtagccccagtttctctgttttctgttttccaatcttttttcctgtaagcagactgtatgttttggctttctcccaaaagcctggtaatcaatttgtctgttataaaaaaaagaatattttttagacgcttataacaatacgattcaaaacgactggaagtagaaactcttcgcaaggctatggaagcaaggaaaaagccttattaggccctgccaatttgatagactccgtgaaccgcatctacgcacaaatcaataaaggaaaagctatacatacaaacttttttcttactaaattattactaacactcatgtgtcatactatgagtgtatctagattttttataacttctatctacttaaatcacacggttgagataattgttagtaaaagtttaataagaaaaatttagtgcgtgtagcagtgctcatcaataaatcatcaggccaatgctcgtgggtttcacaacgaaacaaaaacgaaacggggttatcaaactagtgaatgtctcctcgaaatcccaaccaaagtaagcaacgtttgttcaaaacccaaacaacaactggaaacatttgaaaaaactgactcatacaactgtcagaaatggaaatcctgagaaaccaggccaatacgcgtggtgtctcgactacatgttcaaagcaagcatttcggaagcaaaatgaagttactccctgaacctgctgctcccaaaaactttagaagagataccaaacgcacatgagagttcaacgaactgaacaattcctagatgcttctggcgaaacagttcgaaacaacacgactggaactcgaaattcttcgcaaggatatcgaagccaggggaaaaaaaacttccaatcctgccaatttgatcaactacgcagaccgcggagactatgcgcctacttttccagcacgatgatctacgcacaaatcatcaggccgatgcctgtggctttcacaacgaaaccaaatcgaaacgcgattatcaaaccagcgaatgcctccttgaaatcccaaccaaatcaccacgcgagtagcaaaacaaagcgatgtgatccgttcaacaaaattcatgcagagaatcgcacaaaccagtagaaattccgctcaaaatatccgcgaaattgagcaaacaaaccagagatttttcacgagaacagattaggtgcctcaaatcagagaaacaaaactcacatcgatcaagcagcacggagaaaaaccacacaatcatcatccagtgcgaaaccgaaacggcccaacagttacgcattcaagagacaatgctacacggggaaactagaaaccaactcaaatctgagatacccagaagcttttgaactggctcaactataaccatttggtattgaacgggcggagagcaccagagaaagtgaaacaaaaatcccaggactcatgctccaaaacatgcctaaatccgcacgagaaatcggttaaaatcagcaaaatgtcaatgaaatccacccaaaaacactcgcaaagtgagacgctactgatgcttcgcactggcccaactagcaccatttggtagtgagcggacggagacggagactactagagaaagtgaaaaaccccaaaccccacgattatctccaaacacgccaaaatccgcacgagaaatcggttaaaatcaacaaagcataagcgaaatccgcacaaaagcactcgcaaagtgcgcgggggatccgacacgcgtgatcacaaacactcgaatcaaacccaaatcggacgccagctactgcaaacaccacacgagcgatcaaatccacagcaaaagaaaaaaaactcgatcgggtgaacagatccgatggccggcttgaaccactaagtcgcacgggaatccaacaggagatgggcgaggaaaaaaactcatcagaagcagcgaatcctgctccgtgatgtccgcctccttcgtgttctgagccatcacctgcatcgcaatcacccgctccgatcagcacgcacgcataccagcaatcgcaacgcgaaatagaggcgacaagcaaccatttcgtctctcgcgcgtgtacgcgggcggaggggggaggggagagggagagtgtagtaactgtactagttggagtactagttacccgaatgattttgttttgatgaggaaattaacttgtgatagtcgttaagtttaattgcgcactggcacatcaacgtgctaatggcagaagacaattttcctgcacaagcttaagcctacagctataaatagacgtacccctctccccctccctctcatcatctcccacctcgcctctgcctcccaccatccacgctgcccgtcccacctgggacgcagggcgtctccaccacgcgccaccctgctcgcgtccccgaccatcaccacgccaccccgtctccctcctcccaccactctccaccgccgcgcgacgccgtctccgccgcgccgcgccgtctccgccgcgccacgccgtctccgccgcacgccgtgcccgccgcgccgcgccacgccacgccgtctccgccgcgccacggtgcccgccgcgccacgccgacgccatggtgcggatgaaagcgaaactcgtctacaacatggacgagctgcggactatggtgcgggacgcggttgggcagcgccacgtcgacgtacgctccctcgaggcacttcgagacgcgcccgccgtattcgacatcctccatgacttgtcatcgaccgccggctacgggtggaaagtacggaacatccagcccatgagcgatctctccgagctcgttgggttactccaactgatgaagtgggtgaacattccccagttgctgattcacctctgcaacctcgatcaacgccgagagatgctactggcgttagaggggttccaggtcaggggatcactctccgtgcaggtactcgctcaagacctgatcgaccgagttcctgcctcaaatcctcgtgcgcattggtcgagggagatgtctgcgaccactctcaagtccaggctggaggaagcaactgccaccgcggtgaacacccttcttaacaattcgatccgcgccgagacacttgctcgccagggaggaggcaccgtgatggcacgagttcgtgagcttcggcgactcctgcgccaaatttccaacgcagttctcgccgcggaccatctgccacctacaataggatcagacttggagcaagcgatcgccctcatcagaaacatcctccagctcccggttcaagtccgtgaggctagacggcgagggcgccgagaatcccccagccccatcccctccacctcccggttcaagtacgtacgtctcattcagttcacgccaattgcctctcgcctctcgatcgtaggctctcgatccctgtctggcattcagtttactcctctggatcgcagttttttttatccctctcagtttactcctctatgtagaggctctcgatccctctctggcattcactttactcctctggatcgtagtttttctgttgagttttgcttcccatgcaatatctgttcataaataaattggtgtggcattttgagatacaatatctgttcataaaaaaatcggtgtgacatttcgagatgcaatatttgttcataaagtgtgtgttagtgcaaaatttgagatgcaatatttgttcataaattttggtgtggccttttaagatgtgtctgttcataacactccatgcatctgttcgtgttattaatatggtgtatctgttcgtgttattaatatggtgtggctttgtgagatttggcgtgttttgagatagatatctattcataacactattaatatggtgtggcttgtgaaatttggcgtgttttgagatagatatctattcataacactcggctttgagatgtatctgttcataaactgttattaatatcactcgcgctttgagatgtatctgttcataaactgttattaatatgatgtggcttgttaatttggtgataattttttattaatatgatgtggcttgttaatctggtgaaaatttggtgtagcgttttgagatgtatctgagtgttattaatatgatgtagcttgttaatttggtgtggcgttttaagatgcaatatctgttcataaaatttggtaatgtcagtagtctaaaactctagattgttgattgatacaatataagcattgtgcagcatctcagattggttctgtgaagaagacacttcttctcattccatgaagagtcaaattaatcacgcgacttcacataagaataattgtaaagtacgttgagatccttttcactgaattgggaaaaaagagatcgaacagatgtgactcataattcaattggatgtgactcgtaattcagttgtgtgaagacagaaaacatgatcagttaaaaaactccataatcatctacataggaattatgttaggaaaaaaatagaactaagattcagcaacatggcaacggttgcaaggtttcacaacatttagcatgacagtggagggaacttttggctcgatgtaagtttcaattgccaaaactgctttcttggcttcggtgagcatatccttacccatatggaagcatttgtcgtgtttgcctgtagaacagctaaaaacatcacgagtagtatccagtttaaggtgcttaagcgacgttgtattgtcaagaatatgacatgttagctcgatcaagctctttgtatagcaaaagccaataatctccacgctctggaggttgtcatgacggtgttctagcatttgcctcatatgtgacatatctccaataatcaattcattctccattcggtcctgtgatatctagagatgaaaagccaatatacttgaaattgatggttgtcaccagtcactgataagtttgcagagtgaaaattagcttacctctagacaaaaagtctccaaggaaggagaagcgtcaagaaaagaaatcagagagaaataatcataggctggggaaagtctccaagcaagatcaatagtcaagcacttgagatagaaaaatttgctaggcaacattggtgtatcaaccatctgcataaagaaaatcagactgatgacatttttcgaaggtgcaagtattgttatataaacataagcacgtccataatcatttcatgtttgtggatatacctcgtgatccgagcaaatggtgagaatttcaagatttggcacattggatggaagctctgcacgagcataatagacggcactaggatagtccaaggatagtgttttcatttgcaatgattcaccaagcaagagccgtacctgcctagctccaaggtcaaaactgcaaagatttggagccttattctctatggcttgcagcattctgcattcaaacacttccaggtggctaaggcgttgcaacaggcaaggtatcttcagacaaattattccataacaatatttaagttccaatcgctccaaagcataagaattcgaaagaaggcacccaaactcatctcctgtaatatgtacagtaaccagatgcaacctcgtcaggtttctcaattcaagattaactgtaggatgaaagaaacaactgccaagataaagatgtcgcaatgaacttcctctcccatcagataaaagtgagcacgggaaattgtaatccacattgtatgaagatagcgacagtgtaaggattagttcttcaatccatggtgtaacagcaatctgaagccaattattgagatgatagctgatgctagcgctccttctagcattgcaaaaagtatcatattctaactgtagcgatttgatgccaatgcctgagtggttttttataatacgatcaattttgttgatgaaatccaaccccagtgttccaatacaaaatataagattggggcggtgttgccaggaacgacgaaaagcatgagacacacatgcagcacgggcagcatctttgaatggcatcagggagtgtatatggcaccagatgtcctgcatgcagaagcaaggatataggttagaaaataccgtcaaggtgacagcttgatcaattggaagggaaaacagtactagtagctttgccataacccttcgggtttgtggtagggaaactgaacagcacattttcatttttatccttttccctttcaaagttttattagtggctgtcctaaaaggggtactggactgcagtcagtgactagtaatgattacctaaatatgagacctattcttactgagttaagctacacaaccaataaaggtctatgcgcatatgcataaactaatatgttcatttttgcacaaaagcatcctatagattagtcaaagtagaaaacaaataaaaataaacatgtatattatttataaggtacaattttctatagctttgacggctgggctgtaagagaaaataga

SEQ ID NO: 14401 - DNA, 1285 bp, Oryza sativa
agtttaaaatattatagtatcatactgatgaacagtatcacaaagactatagtgatcctaagttatcaggataaaataagattgcaagattaagatagatgctcccgtgttcctgtcccccaatagctactacccaattacttactgtggtttgcacactgcagcatgaaccggcaacaacaaacaaaaatgaaaatggacggtggtgtcacgcaggcagcttgaatggtctgtgatgagtggagggaaatgagaagggaagaaaacgaaaggacagtcagtctattgtcagggtagacgacttatctttactaagtttctccagaatacatacgatgttggagtacatctccaccaacattttgtgacccatctaaacatacccttcggagaaattataacctcatttagaaccgtatcatctttatcattgttagcacctttggtgaaaacaaattcaattttagtaatatggagtatggcctggataggatcagtctgattgaactaccttccaaaagaattagtttagtttggggggcaagtgtgttaaatattaccccagaatatgaacactacgtgctagagattaccaagttgtgatttatggaacaagagccaaaggctgcagatcaccaagtccttctcatcttgattactaagctcattttcttgtttgctccttttcatcttgttccaaatccagcagattaatttgatgagctttaaatctgcaaaataaaggaaagaattcagaaccatcctgtttgtttggctcctaagttaaaagggtagattgaaaaaccttcagcaacagccatattccctttccgttctgaagggtgaaaattcagtgcataagcagtcagcaattaatagtacagcacaaacccaagatcatgcagatgatgcattggatatcttatgcagaataagacggatcaacatcaaatgctccaaaaagcctttagcaagtttgactagattttgccctgatactggaagtgtaatttgtagtcctgcaccagatttgcaaaagttgttcggcatggaccctctgcaaagccaaagaatgaaaaaaggaattatcttggggatcagtttgtatttatagtagttacatttgtttattcgtaaatagattaagcattttaagaaaaggttaagcaggagttactgaccacccagatatgtgtggagcagttgaagatcactttcctcgcagatatcgataagcgaataaaccccaggtctcaaggcctcatcaatttctctgcgatgtaag

SEQ ID NO: 14402 - DNA, 5900 bp, Oryza sativa
tatcacctggtgcgctatgcttgtcaaagccacataaaatggaaagagaacggtttacctaaaccagctgctttcttggaccgctcacgctcggccagacttgctgttcattggatgagacttgaactagttgcaagttcattgggtgaaaagttccatggaccagacacccaatcctgaaagatcctatctcgattggtgaataattcagttgattctttgagtccacaaattttcatttatttttcaattacatggaagatgcatcatacacacaaactaccgcacgaacactgttatgcggttcatttctgatactaatgaattaaagatctcgctaaacatcttgaagagagcttcacttggtttttctcatattattggttctatattgagattcatccattaaataattatctaattagattcaaaatgaacacatgaattttgtagaattttcgcgtgagctcatctattccaaggagcccacgaaaggtgtataatatgttgaagacaaagaagctatagctcatggtccattactccattgaacaccgagaaaaaaaaaggcagtgtgtcgcgacgactacggataagaacccacgagcttgtcctggtcataacccacgtgaaaccattggcacgtcgccgtcgatcaatgggagcttatgcgagctcaattgcaacagcatttgttgctgggtcgcaccttcacacagcttcatccaaagataagccaaaaatatttgtttctgtgatccaacgaagtcctctgatcgatcatcatgtattggcgtgtagcttcgcgtgctgatgctctccaagctttgcccagctagtgctaccttccaaaccccaactaggtggcccccttttttttttgtttaatcttaagaaccaataggcaaattgttcgtcaatcgtcagtgctagcaaacaaaactacgatatcgtcatcacgatttcgttttgtttagatcaatttgattgaagttcctgtttggatcttgcaatcgcattgtccaaattttgtacttccaaacccatatcatgggttatggtatgtctattgttgtcgtcgtctatttgttttcttcttcttcttttccggtgaggttagagtaagcccgtgggcacaggaatttttacccaatatttgcaaagaacatatacacacacacacaccatatgccaaaagcttttgactgatttacaccttcagccacacggcttgccgaccgaatcgatcgggaggtaaaggagaaagatcccgggggcgagggcaatgcacaacgctggctcgtgctccacatatgtcgtatccctcccgggccctacaagccttcttatctctacacatgtgtactgaaagctatatatccatggatgaatggatggatggatcaatcctgcattccctgcttcgttttctcgtggatagatcagagatcggcttgtctgtctgaactctgaagagagatgcaggcatcttgggacttgtaatttggattccttggggttgggggtggcattgcagccttttttttttaaagaacattactcttaaatttggtcaggatttaccaaaccatgtaggacgtgggtaccgtcaccccatggtttgacagttaccgcggtaatcgcgaggtatatttcaaaaactgagaagatcaccgcacgtgataaccacgacaacaaccgtacagtttaatttgtaaaccgtgcttcttacatggttggttgatgttatagtacttgtgtcacacttaatttcaaggctttagcaagatcgttgttgaaatgctcctttttaaatacttgtcagcagacactattcgcattcaactttttggacaattttatttgagcaatgcgattcataaaatatttgaaaatacagcatattaacaaagtatgtgtgttcaacaaaatatgaaaatttcttctaaaaatattaacatgggttaagaatgacaagtaaatgaaaacatatctagagttataattaaccttaatttagttgaaggacactaggacagactgtgatttggattaattagattaactttatgcagtgcactgactgtttgacatttcagggatcttttgtaatcatatgatttgtgggggacatggcaattatgttcacacaacattttcactacaaacaataccagactagcacattatgttatactttaaaataggattttatccaccacaaaaattaagaggctaatgagttaaataacaggtgaatgtggcgaccctacaccaccagccttgtgttatctgaaggaaaattctgctgaaagcaactggacaccaccgaataatcctattgtgaaccattttaaagatggaacctatatgtcggctgtcaagtagcgttggcttgagcagaaagttgtttttctttttctttcaagacaagctgtttttctttaaagagaaatatttgttttctaaaaccttcaaaacatctctttctgctctgacacctactagaaataaaaaaactggcagattttttttttctgataatagaaatcaatccagactctgtattcaggatatatccggccaatcaatatctggaagatgatcgtctgatagcattaagcttattagcttaatgtaaaaccaagttagaataatttaggactccagtattactagaaaaaatccatcacatccatctcatcaaagacaactacggctgggaggtacaacaataatgaaagaaaacaataggtggatggcccaaggataagatagttattttcatccgagtcatctgtgatttgattctttcttagctgatgttaccaactactgatgcaaagacccaatttgcttcaatcctcataaaagtcgtagagcactaaagctcactacttctactttatccatcatatagtacgaaagtacttcgaataagcattgccggtacctttgtcaagaaccatcttattactagcacacactcccttttctgcaagacataaacttgttcccctttccgttttactttctttaatgtatataaatactctacatatgtgagtgatcttacatatcttgagatgaaccgaggctagatacaccaaattttgtacttcaaaaaatatgattccttcttataactttcgatgaccgtaaaatttatcatataacaatataaaattgctaagccgttttggtaaaattatcaacatgttctactaattaggaaattcatattatgcatgcatgatgatagaagaggatatataaattgccctttgatcctcataccaagatatgttcagatacagttcacagctgaccaaatgaaaaggggaaagaaaaaagagaaggtggccaagagtacactggtaagctgttgattggagagctctagttaagaatgctaagcctgctttttttgttgctgtggttgttgaggtgtcggcattagggacatccttatcaccacaaaattttcttaagccgcatattggtatatttttatttctctctctctctcattttattggtgatattctttgtccacgttaggagatgtgcgcgagccgctctctccctcactgggcctttgtgccaatgcgttaggtctaagcgctcatgcagcagtccatccagggatagctgacactgagaatgtgatcctgatgaaacgcagtccacaaatcgcagacaatatcaggctatcagccctttgtacgtgtgcgtgtctctgcatccgtcagttgtttcgattcttctcgtaaacctttaagtccaagcttgcgtgatagagcgtgcaataaaacagcaacatcaccatctggaaaacccttctgatcagctgtttacgttcatgcatgagacccacgctgttgaagacggtgtcgtactacagtggtatgagagctacaggagctttggactggcctgtgttcgattcgaaccctctcgtgcacggccgggttgctaagttcctctttagcaatccatatttttctcatttcgaaaaagatgtcttgagttcgaaacatgctccaaaggaagagtttgtaggctaaacaagtgggagcagataagaataatattgttcacctttcctcactagcttaattatatatttatatgggtgaatctgttttaataaagtcagcatgccacatactcgtccaatatagatataatagaaggattcgaagcctaatagcatcctgggtggcatatcaacagttgtaacgttcgagcctggtgtgagatgctggccaacaaaaaagaagtgcccaagaaagacctgcgtgccctgattctcttggttgtttgggatctggaaagagagaaaccagcgagttttcgagcacctagcctactggtgaaaataaaggagaaagcaagaagatggcttcggttggagcaaatcggcttcgggagcttatactaaattctgcataacttactctcaggggttgtatttctcttctactatattaaaaatagcacaatctcatgttgatttcattcaacaaaaatgtttggataagtacccagactaagttcaatgtaaaaaatggtacaaaaagcttgtataatcagaaatgcttatatttaaagtcgaatggaggtagtagatctggttaaccctctcctatgtagccatagacgaaacttttctaatatgaaattatcgaactcttgaaatcgccactttttaactctttaaatcactagtataatgcccatgcattgcaatggtttttttctctaatatattatcattgtgataattttgccatcatttcataaagatgaaaaattctataaatttttattgtcatattttattttcgaccaggtctaacatatgaaggctaagaaaccagtaaagttttatatcatattttatgggttccatatggtagtaggatggtggtagcgccaccaccaccactactactttttacgttagtatagaaattgcatttatactccgatgataatctgcacttctagaagatagtaataagtcagagtgagtgaccctatttttctacccaaactaaagcttaccatccgagcccaagccctactaaacaccggggcccagacctgcccaatcagtaagtaacacaccagacaatgctcgggtagcgcccctcaggccctcacgactggctgcagcgctgcacacgtacgcccctaaaccgtcaacattaccagcattattacagcctcaccccccgtcaacacaacacgaagaaaaaacgcaacgccgtgggcggaaaatgccatcgtttccctgccatttttttccacgatgagtacgagacgcgccgtacgtcccaacgtacgtagtaccaccaccaccggcgcgaaacggtagcgctcgcgctggcgctgcaccgatcgctgtctccccgcgtcgcggaggatgcatacgctacaggacacgggcttggaacctcgtgtcgtgcctctgttccactggctctgcgacgcgtcgccgtgtcgacgcgcgggtggcggcttggggttctctctggcgtggcgtgcgggatttctgacgggacacgggcccaataattggacgacggcacgggtgacgggtgttctcgccggtgagagcatgtatattttagggtctgtttgggaaacaggacttatcatatcggatgtttatacacaaatttagagtattaaacatacactaattataaaacatattctataaccttgggctaattcgcgagacgaatcttttgagtctaattacaccatgatttgacaatgtgatgctacagtaaacttttcataattatagattaattaggattaaaaaattcgtctcgcagattagctttcatttataaaattagtttttttattagtctatgtttaat

SEQ ID NO: 14403 - DNA, 586 bp, Oryza sativa
atcttaacttacaaccaaagatattagaatattgctcataacactccttttcctgaccaaagcaaaataactcacttttgtgaaaattaattttcaagccagataatttctcaaagatagacataatcaattttaaattctttgcttgttgtaaatcatactccagaaaaatgatggtatcatctgcatattgcaaaatagacaaaccatcatccactaggtgaggaaccaccccatgaagagatccattatctttagctcttttaattagtaaagctagcatatcagcaactaaattaaagagaattggagatagaggatccccttgtctaagacctttatgcgtttgaaaattattaccagtttgatcattaactttaataccaacatgaccaccttgaataaaagaggcaatccactcacaccatttagtagagaagcctttcatcctcaaagtctgttgtacaaatgaccatttaaccttatcataagctttctcaaaatcaatcttaaaaattacagcacttttgtttttacgatgtaactcatgcaaagtttcatgctaaataaccacaccttccataat

SEQ ID NO: 14404 - DNA, 8362 bp, Oryza sativa
tagcaggaagcagggtttaatgtccttggaagatgcattagtagctgacaaagcaaatatcattaaccataattttacaaggtcccgccccatgaccttgtattcaatatctaacaaatgaccaactgcatcgacaatctcagcaaacattaaaggtagcatcttcttaacgtttgcatcttccaaatgcacagctgacacccagaattcatacattttttcggccattgagactaagaccctgtaaatatcttgcaagaactcaaagtaagatccttccgatgtgtcctctgtaggtacatagattttctcttcaataactgttgtcaataccttgttgatggacttcaacatacaatgaacttctactagctttgtgacccctaaattagaaaagttcttctccgaatatgacttacactctaaaatcaatggttccataaactgcataaacacttcaaaaagtgattccctgtgatgatgaggttcttcagagccctcactacttttctgcaagcttgtttccctgggtcctagagaggctctctgatttccagatcttctaacaaacaactgaagcaagtagccaaacccagccagcatcactgacttgttttctgcttttattgctttgaatctctcaaatagatgcctatggtagcttcctatgacatccctggaagtagatgatttattcaaattcttgaggccaaaatatccactgagatgttgggggtgaaacaatccattggacaaaatttcttcaacaaccttcaacatggttctgtcctgcttgtgcgtgagggaattcacttgtgaattaagcaaaaccaacaactccaacagagggtcaagaatcctatcaacaaaagtgcggaaaatattcttaggatttgcatagaatctcagaaagcttgaaaattgctcaaacagacaatttccaaggttccaaagaacagtacagccattcctctcattatgtgaaaccttctgggcaaggctgataacatctatggcacaagaagcccacgaatcaacacctgcattgaagaaggttcttgtattgatggagaacaccgaggacatgcaccctaaaacgtgtccaaagagatcaaaagattccttgtcatcatataaagcaccagtatcaactctgctcaaaccattccttgcaacacgaccaagcgatttaagtacgtttggggaaatggagatggatggcttcttttcaatgcaaactcttaaaatggcccagcatctataatctagcacaggatcaaaaggttctgacgttttcttactgttctcaggcaaaattaagatagactgcacccagtttccaataaatgatacagctcgtagtaactgcacgatgtctagtctacggccatggtttgaccaatttgactctgtgcttgtaaaattgaaggttagctcaatctttctgcgtgatgtaacaacaaactgtcaagttcccaaactggacaagcataataactttcatccataaatggtttaacaagcatgcccatccaccaataaaagaggaactggaatacataagctaagcagattctgttgatgatttgaggtcataaaaatatacagtacaaaaagttcgtccagttttatttgcgctaattcttttgaaacataagaaaatgactataaactgtcattttgacctaaatcaaagcgcacatttttctatgttactaggtcaagtcaacattgatccaatgaggagacatgtaaacaactaacaccttgaaatccaagctacaatggaacagcatctcttatgagttacgcaatcctatatgaactaaatcaggtatatgtgctcgtccagacacttgcagcagtaaacaaacacttccagcccacatcaaccgagttatctacataatcagactagaatcatagaaattaccaactaattcctgcaatccggatcataatagagttacatgagcactatgttgcatcgactcgcaagcgggaggagcaagagaacgacctttcgagggagagctccttgccctggagcgagagcacgaggtcgaggttttcccagccactcctcgtgccgccgccgccgccgccgccgccgccgcaaccgaaacgaagcttggataacttgggctcgctcggcccctctccggcgggaggcggcgactggctccgccgccgccgccgccgccgcttcctcgccgcgcctggggtcgcggtcgccgtctccatgggagcgcgaggagagcggcgaaggaggaggctagggttctgggttttgcctgcgtcgctgagccccgttttgacgcgacggatttcgtgctgtctccgaccggtgcacgaatcttaaagccacccggtccagagccgctcgccgctggcgcggtcgggtggtcgagcccgaccggtttctccgcatctggttcagggtaaaaaccctagctcgcgcaccgcaagcggctagggaggctagcctgtgtgggtggagaaggcggtgggaaaggggagaagaggaagaagaagaagaaggcgcaaatggcgacgggggagtcgcagcaggcgtctcggcgggaggggcgagagcgcgacgagcacgacgcgtctcggcgggagcgggagcgcgaccacacgcacgggaggcgcccccactcctcgtccaggtcgcggcgggacgatcccaggtagtaccaaccaatcccgcagcgaatcccccgccgctctctcgatctggtcgggttccggttcgagctaggagaattgggggtttgggatttgttgattgcagtgtccaatttgcgttccatacttgttggacgatgcaatctgtgcgcttactaacccatttttttcatcggggattcctgttggtagtccgaggaggagaagagaggacaggaggcatcatgaatcagacagaagtcatcgccacaggagtcgagctgaagaaagtgctaaggcagttgaccgtgaccagaagagggataggccattgcaagatgccgcgcagcccgatgatcctttgcgagcggagacgaagcccctagatgatgccagaaatggctctcctgccaggcatgagagatctcctaggggaaccaaacggtttcctgaatcaagagatgctaggcggcctcgatcgttctttcaggttcttgtctttttctcaaatgtgcatcaagggactacactctttgcttccaattgtttggtagctgttaaccgtgtgcttggtagctactttcagtgtaagcaggatggttcttggttctgcaaccctactagctttgccgaatgtagcatttgtagctagctttagttaaaagccatgaatccattggtcccagctgctggtgctacaatgtgcaaacaatagtgtatatgatatgtcgggtttcttctgagaaaccatgggaaattgtgaaaaatgtggtgtttcttggctctcgagtgcttcattgcgacatattcacacaggataccaatgatcgaaaatgagatatgggtgggaaagagacaaaatggaagttctagtagaccaaactagcctggctttgtatgtttgcatacgtatgcccagacagtaacaattataaatgctggttctacttatataatatctttctgttgcccttttaaaaaatatgcaagcttgcacaatagccaattcatttaatttctatatttagttcacatatccaatatagtattgtctaaacaagtgatcaccactcactgaaatattgggtgtcacaagttacttcctgtgtgtgtttgtagagtatgtagccatatgcccatatatatatatatatatatatatatatatatatatatatatatatatattgttcttctatttcaatgttacatttttcttctattagagtcaagtgtatatattagttagatccatggtctgctagctgttcctccatattgtgatttaggtttacacagaatgagcttaaacagatgttctttcctaagtagtaagtaattcctctagaaaaagcaacaactaatttatctctaaatcatatatttcttttttgggtagtggtggtggtagctaacattgtaattgatcttgtattgttgtactaaaacgaattgacatcttgatctccttctttatacattttgtaggctgtggggagtactttcttgtaatattttccaattttaagtagttgcatatgattttggttaaatttactgtttcctgggtcctttttttatttattattgcaatggctgtcatgttaatgtttgttttctcatagtgttgcgaagttcaaaaatatgcagcgaggatattggtttgttgttatgtctttggcgtcagctcaatatgcatgagtaatatataccttgtgttgttgtgggactttgtttatggcatatacctacaagtgcccactgtatttgacaacattaggctacttatgcttgtatgtacagcacgatgaacgtggcagtgctgggcaaggtggtcggtgctattaccgccaggctagtggtgagttgcctacttggtttttatgttctgcccttatttatttttcagcttccctcatttgcgtttgcttattattgttttttaaagaccggggaagacaaagggatgaaaaggagcatgttggagatagagagaaaaacaaagatgaaggaaaggctatgcaggatgaacaacaaaatgatggtgaatctacatggaagcatgatgggttcttccagttggaggaagaagctcaccctgccaaaagaaggccaccatttaatgagatgggcatgccactggaggggaaagaatctgtgctttctgttacagaaccagattcaaggtcacataaacatgatcaagctgggcctacctctgcaataggagaagaaaggagaaattatcacccacggggatttgataggcatgagggacctttcgtaaggccagatggtcaaggtatgaggaggggattttctgatcacaggaatgctggccaaagaaatggctatgattcatgggggcgttttgctggtagaggaaggggcagatacaggtttaacaactcatatgatgggcgaaacagcatgcaccaggctgctggtgatcaagcagaaaaatggaagcatgacctttatgaacaaacaaatagaagccctactcctaagaccgaagaagagcagattgcaaaaattgaagcattgttggcgctgtagctactgcttgggattgctttctggtcatatttgcaatggctagataggtgatcatctacttggtgtcattggtgttgaatgctgtcagaccgtctatcctgatgctgcgtcactcaaatgcagctggctgaattttggggttgacaatgttttcttcttccatttaagaaaatgtgcctgatattctcggtttacttgatgtaggatccatgaactaagaacaagagtaaacaatttgcctcccattaaaatgcctatcgaaggccgaagtgttcttgtaagatgatgtctactcaaattttgtgtttgttctggctgcttgttctagacagatgctttggcacggctggtcgctatacacctgctaattccgtaacggaatcatgaattaataaccctcctcctcctacccacacaggttttctccctttttaaccctcctacccatacaggttttctcccttttttggatttttgctggcacgttactttgtatggagcagtgctcctggattgggcgaggggaaccggctcctgcataacgttgttcctcttgcgaacacggtcccctcgtgtccggttttatcaactgggtatgagtggcaaggccaaccggctccccttgcgaacacggtcccctcgtgtccggttttgtcaactgggtatgagtggcaagggcaaccggctccccttgcgaacacggtcccctcgtgtctggttttatcaactgggtatgagtggcaagggcaaccggctccccttgcgaacacggtcccctcgtgtccggttttgtcaactgggtatgagtggcaagggcaaccggctcctgcatgacgttgtttcccttgcgaacacggtcccctcatgtccggttttgtcaactaggtatgggcgatgagggtatacatgtaggacacgcaactcctacacgtttttcataaacgcccctaatacttgtgggcggtgagggcagtttatcagttatctcaccttaagctttactctcttcgtccaaaaaaaaaaaagacaaactctaggctctagctccagatacatagcgagagtttgccttctctttttttttttttttgactgagaaagtacgtttgtctctgattttaccagattcggactcctgtatggctccgaatcgtcagtcagtctgtgggtagtaggggatcaggtttccgttatacctcgcgcacgcttgttggagtcctgcttgggtcccttatccaccgtggaagctccctgctcgctctgcatggacaagttttgctgcggctccggaagctcccgggtgcgggtgaggtcagatccgacggactggaggcaacccatcgttgagccatctctcatttcatggcctataaagagagacattggacaatgtcatgttagtactatagcagagacagatgccaagtccatggagatgaggattattgttgccattaccactcaggtggttctttgcgctcaggctcgccagcttcagcattggtatcaatggcctaaatgatgaagcagagtttcagattaaccatgaataaaatgactgttgtggaatggacagaattagtagataaatatttggtgctgttagaaatgattatggggcttgtttggttctttaccctaccaattcattggtagtgccaaaagtctaggccaattttggcactatcaaaatattggtagggtaaaattatttagctaacatttggattgctaccaatttaaagccaaattcttatagcatagtgaagaaacttctagaatatgacctaatatttgaggggcactaccaaatatttggtcacaatccaaactaacacacaaactattcaattcgccaataaattggtagggtatgctttgggcatcaaaccaaaacggccaatggtaccatttgttcagctatatcgatttccagaatcctttttatctcaaggagctttctgttggtgacttcagaatgaatgacaactttgcctgtaaaatagagtgacatatgccataagatggtagtgcacagtagtagtgaatcagtcatttgctcaaagattagtattagttctattagcacaatacatggcgacaacggtcaatctgaaaatataagagtgaggtatctgaagttcctaaaatcattagttttcatctaaagtagcaacagtttcagtatatgtatattgttcaagagaagttgttgacagttcttcatataataagtgaacatgacaaaaggtaatcacttgagttccagttgcacaatccatgtagaaaataacactcagttggcaggttgattcagttatctactttcacagttgtaacagaattgagcaaacaatacataacttgctcctggctaacagactaaaccagaaagtaaataatgtaccatagagttcgagaggctagagattaggtgttacctagtcttcggttggctgaattcttgacatatccgtcttgcaccatttttttcaattaacttacaaaccatgttctggctggcctccccatctagcttgccatgaagcttgcctactgacacgtaatccattggaagtgcatggtacagtgcctgtagcaacgatatttatgaggagaaatgacatgatgaccttcatattgccaagggtaagcgacagagatacaccttcatatacatgagatcaccattgctatttttagttccttcgagaaaggcccggggtcttcccagctagcaacgcaagctgcgagctagcccgtccgggttcaagccacaccccctccttaattcaaaatcaatctagtccttcctaaattggtcccatttttagttccttcagtaggtgagacattttgcatgatgacctctttctttatgtggtgttgtaggatcagcaatctgaaaccactctatgattttagtgatggacagcaggggtggaggcaagcctaggacagcttgggcttaagccctaggcttgcctccataaacttgcctaaatccttttaaatcaccatgtattttttttgagaaagccaatatgagctctacttaagctttaggcgtagaaaatttctggctccgtcactaatagacagtacaatatgccacagggtaaaattaaaataa

SEQ ID NO: 14405 - DNA, 5542 bp, Oryza sativa
aaaggctttggtttggccagctaacaacaccacaactaccgtatcaaaagctaggcatcacgcagatcatcacgttggctccccatcaaggcccccacccacagcccacacaaccactctcacacacagacgcgcaccgtagagcatcctaaaacagtgtcaagattgcccacatcgtctgaaagaaaaaaaaacacgacaatcaaattcagatagtaatgctactccctccatagtccatccacgtgtgtagagcatttctaagattgttatgacattattaagaaggaaaataaaagacttttgatgcctcttattcaagtgcggttgccatcttctgattagacaagatgaaaggctgaagcctgtggttcgacgagaatttagtgataggtggttgaaaggagatagaatactttataaatttcgtgtacaaattttaaaggtacttacatcgttaacggagaccgttcaaaaatatagcagattcttctaaatatatcaaccaattacttataagataaaaaaaattaccacttaacttaattatagtcccaacaagtctcgatctatattcctcacttagagcaaggttaagatagcatgttattagctgaccgtgtcatctatagtaagcatagtaactaatacctataatatgaatattataacataaatattttattgttttatgggatccaccatcttttttcttcctcatacctcatcatttcctgtattattctctttctccttttcttaccttcgattcgtcaacgattttgggcttgagcagtcagcgaggatggacgatgacggtgatctggcggatgcaggtgactacggcggtctggcggacgcaagagacagtggttgtcgtgcaagacaaaggcggctgtgtggtggaggcggaaggtaacggtgcatgtgcggcggacgcaaagacggtgacagctgggctagacgagctcagttgtctggtgaacgcgagagacgatggcggctagggtagatgcgggagtcggcgccggccaagccgagggtgacagtccaatggacacgatggacaagggcgttagccatggagtatcgaggagcagcaccaacgcaaaccatggctgatgtaggaatgcttcttcatctacaggcgagccccacaacttctttaagcagcgcgtgcggcgacaaattagtcgtgggcgctctctcttcccccctctcctccaattcatcacaaaatcctacgtgaaactaataccgttcattattgtacccgctcttattttatagagcaatctttttatccatctcgttttatccgtgtgaaaggctaccaaatttttgagatggcaggtgtaggtaaggttagagcataggaatctctcagcaagaacatacttcctccgtatggaccgtaccaaaaaaaactaacataggattgagatgtaacgtaacctaacataacgaatcttggcagaagactatctagatttgttgtgctaggattgagatgtaacgtaacctaacataacgaatcttggcaaaagactatctagatcttggcaaaagactatctagatttgttgtgctagattatgtccgtccttatattagattggatttttttaagaccgagagagtagtggccaactggggcagacaaagctactggtgactaatcaggttggtacacgtggcgacttgtgatttctctggggggccgtaggctgcggttagatggcagggtcaacctccttatcggcgatataaatggcgataagatgggccatgcatgtcgttgacaatgatttgccatcgcttagctgctaccgctcccacaaccgacgattccttgagacgttttaaccgtacaaaaaatgaagggtaatttctacagcagcagtagaaattactgcctaaataaacattttcaaaaatttatattatcaaaaatttgataaattgacaacattattaagttttgataggataaattaaatatgatgttgctaaattctctatataacaaagtaaatatcgttatatatttgttaataacaaataatgatacgatttaaattaattgaacatattagtactacgaagaaaaaattactgcggctagatattgacaaatgaaacgacaagacgtcaagccgggacaaggaggaagaagaaacaaacaaacgaacccgtgtgcgccgtcgcgaacactcgccgtgagaaggcccacggcgtcgtccatcaatcagaccatcaccaatcggcgagtgaaaaaatacaaagaaaaataattgtatgcacgaagcactccagtaatgtaattttttttccaatagagtaaggtaggtaaaaatcgagcactaatgctacagtacactctcggtcttggcaggtcgcgccgaaatattttctaggcctgagaagaggagggtaaaaatgcagtaaaatccgacgcggtaaaaaaaaaaaaacagtagagggatgcgtgtccccctactgggccacacgtaccgtagccgcagctgcggtggtttttttttttctccttcgttttgactcgtcgctgcggctacgcgcacgcgcggcgcgccccggtggcgtgcggggggcgttggattagtaccgggcgagagcgcggcggagcacctgggcgaggaggctgggggcgctgaggtgggggaggtgaccctcggtctggaggaactcgacggtggtgcggccgccgaggtgggccttgaggtaggcggcgacggaggccgggacggagacgtcgcgggtggtctggacgacgacgcagggggcgcggaccatgccgagcacgccgcggaggtcggtcttgaagacggtctggcagacgtggagggagatgtccgggcgcatgttgaagagggtgcggctgaactcctgcaccgccgccggcacgtcggcgcccaccgccagaggcgcgtaccccgtcgcccacgccgagtagttcgcccccatcgcgtcgaacacctgctgtatctcctccagctcgaacccgccgtggtagtcgctgtcgttcaagaacctgcacacacatgtccgtgctccccgatcgcccccgatcagattcaattttaagagcgagaaaggattcacatcagtggaagcgagcgtaccggggagaggcgccgatgaggacaagcttggcgaagaggtcaggtcgtcgaatgaaggcaagaatcccgatcatggcgaagacggagtggccgacgaaggcgcagcgcggaatgcggagcgcgtcaaggatggcgagcaggtcgtcgacgtaggcgtcgaggttgtcgtagcggcggaagtcgaagtggtccgggttgacgctgccggcgcagacgaggtcgtagagcacgacgcggtggtcgcgggtgaggtacggcagcacgcggctccacgccgactggtccgtcccgaagccatgcgacagcaccaccacccgctcgccgctccccaccacccgcacgttcaggatctgcagcagcttcgccccgctcggcgccgccgacccgctccctcctccccctcctcccccgccgcccaccatcgtcttctccgagctcgacgacgccgacgaccccccgcccccgccgccgccgctgctgctgctgctcgggctactgggcggcggatgcgtcgatcgcagcatcacaccagcgcggcggattggcaagccgtggcgcgctccccttttatatactactactactactactatcaccactggccatgggagatggtcttgactcttgcctcgcttcttctctctctttcttgctttgatttctctctctgctttattccactgtcttaagcttcgttgggtgcggtggtagattgggatttttgcagagaaggtgtgtgattgcttcagttatttaggggggtgtttgggttttgtctccatgtccaattatccaatccacagcagataaaaaggagaggcagtgaggcacctataattctctggatttttttttctcaggagaagtttttttttctcttatcgttttgttttatttttttttgacttcacaatcccaaccagagatgccactgcaattaatattactcgtagttgagagttttgacaagctaagaacgtcgctgttagtgtctgtaatgtagcgtttgattatcagcgttaagggaatttttgcagcaaacgttgtagacatattagatgatgttataaatgatttaaagagtatagaggaaaagatgttaagtgaatatgttagttcttctgttaatcaggtacatacttcaaatgttgatagcgagatattggatgatcaggtggatgataattctctacttcaacatttgtgtggtgaattaatggaggaggtgatggattttagtggtgtggatgataattattcttagaccactttatattctttagatacctctcctaatagtaagaaaaagactaaaaggggaaagaaaaaaaaagaatatttttaaatgaaagggttgttctggaattgtgatgggtttaaggtcccgaaaaaacataagtttatttctgatttaacaaaggaacatcaccttgattttattgctttgtcagagactattaagaaagattttagtccggctgttcttaaaaatctgtgtgctggcaaataatttttgtggcattgcaagcctcatagaggtaggtccggtggtttgcttttgggcatcaatttaattaatgttgatattggtttgattgatgagggagatttctacattaagtttcatttatgtaataaagttgataagtttaagtgggctttagttctggtgtatgggccagtacaaagtgaatttaaggatcaattccttgctgaattagttaatatgtgcagtcatgaaaccttaccaattcttattggtggtgattttaatattctacgtacgtagccctgatgaaaagaataatgataattatgatgatagatggccattcctttttaatgctattattgatgggttatgtctccgggagttacagatgtctggtaggaaatttacttgggcaaacaatttagtgaatccaacatatgagaaacttgatagggttttaatgttcacggagtgggaacataaatttcctttatcttctgtggtggctcttaatagagatatttctgatcatactcctttacttttaaatacaaacacttcttctttgagtaatgctcaacatagtttcaagtttgaatttggttggcttttacgtgatggctttgttgatatggtaaaggagatatggtctagtgttgatgaacgcaattctgccatggagcggtggcaggcgaaaattcgtcgtttaagacagcatcttaggggttggtctaaacatactagtggcttgtacaaaaaagaaaaaaaaggagattttagataagttggatttgctagataaaaaggcagaaactatgcttttgagtcaggaggagttggattttagatggttttgtagaaatagattatctacaattctgagagaagaggaagttaaatggtatca

SEQ ID NO: 14406 - DNA, 744 bp, Oryza sativa
gcggccgcactccactagtggatccccctttatttcaaaagagagatcaagtctgcattcggggaagccaataattaattttctatggttattttgtgaaatatgccatcaacaaaataaagcattccgtatgccatgtctgcatgttgctgcagaggtatatatccagacgattttgagtatattacttatataatatttgtgggaaaaagtatagttggtgaaacttcatcgagatagtttcttacattttatttttctaaagtttgagtacatatgtatatgtatttccatatcaatgaagctcgtttatcttctttagtatgacagtatgacaaaaatgctacaaaagtcgcatttacaatagtgattgttttgtgaccacaaattgttcaactatgacacctacagatactataagcatgatgcattggtacatattttagcttactcagaaggcagagtgcccacaaatcatgttcatcccatctccagcaccgaatgtgtggccatggataaaatggaaatgaatccaacttcgagaagattaatctatgcttcacgtcgtacaattggccaacaattaaagttttatctaatatcagttatccgtgtgttgcttcggataatagaaatatatttaatattatctgaaaaattaaaatttgctttctattaaatgtgttaataatatgtttggtaaagggaatattgatcctaatttaattttatactccctccgat

SEQ ID NO: 14407 - DNA, 783 bp, Oryza sativa
cttctgtgccgatgacctcggggtcggaggacgacaggagcggccttcccacagtggcctcggggccgtcctgggggtcgggggctcctggcgtcatcggacaagcgggcaaggggccagctccggtcgtcaggggcctcaggcctcctttcggctcgggggcctcttctccctgctctctcccgggtcgagtcagcacagggttagcctcggggccaaagggcgataagtgcggccttccctcagtggcctcggggccttcctgagggtcgggggcacccagcaccgtctgacaagcgggcagagggccgactccggtcgtcgggggccttaggccaccgttcgactcgggggcctctcctccctgcctgctcccgggccaagtcggcacagagtgggggtgcgcagaatgaggattgtcctcatcgcgctccacaaccaacgctgcactaactacttggggggtcgctgctaagtaaagtaacagggactcatttggctccggggcgactagaaccgggggagagctaagatacgcctttaactgagtaagggcatgttcagcttcctccgtccaagtgaacggcccggagcgcttgaggagcttaaacaagggtagcgccttctctcccagccttgatatgaaacgacttagggcggccatgcaaccggtgacgcattgcacatccctaagtttgctgggggggcgcatccgctcgatagctcgaatcttctcggggttggcctcaatgcctcgggcagagaccaagaacccgagaagct

SEQ ID NO: 14408 - DNA, 683 bp, Oryza sativa
gggcggccgatctccactagtggatcccccctgggagcccccaacaccgcgcctcccactccaatccgccgctccccctactcccgcctccccatcgccagcctcctgccagatccactcccaagaacacacaccaccaccagtccaccaccaccaacccaagccccgcgcaccaacccggaaattttttccgcaccgactccgccgcttggttgggcggaattgctccgccgccgccgccctccgaccgccggtggatggatggattcgcgcgcaaccgtcgccgaaatttctggtgcgttcttggatgcggcttttcttttttcctttgttttactttgggcgttggagaagacgaagaaagaaaaaaaaaacaagaaaaagaggaggatttggattagctgtgccagagggaagcgagagtaaaaggaagctgctttggattaataaatgcagcaggggaagcaactggggagctgagctgaggcttggttttttttttcctttctttttcttttctctcttgttgctttatggttggattggagaggcttggagtttatgggggtttgattaatgtgctgcatggttgaaaagaggatttggccgtgacagtggtttagtttgggttttagttaggatggtttttttttctttttttgactgatggcatcatggttaat

SEQ ID NO: 14409 - DNA, 736 bp, Oryza sativa
aaggggtcggggtgcctcggcctcggggccggggcaagcgcaaccagaccccccccccctcgggggaaatcaggaggagggcggacacctcaccctcgggcccgacgtccccgaaggtgccaggccacgtgggcgattgcgtctgcctcaagcctctggtcatgatactcccggtcccatatcaccgacagtagcccccggcgttatgccagagcaatttcccttcccaagggaagcggtcaggtgtgacgccacccctaaagcctggtgacaggtgggaccggtctccgtagttgggcaaaatacccaacggtctcaatccatgcacattggtattggtaactttggttgtccataatgggcggtctattcaagactgccacgccacttgagcagcgcgcgaatctgggtgagcagatttgtctcgcccggagatatggtaacgccgcttcggtcggcgagcgtaattaacgcgcgcacgatacaatccatttcgattgccacaaccgcatatccactcaatgcgccgcaagcgggcgaatgggattagtggaagcgtgggcacgggaaacgagggagcgagatagcgagatacgagggagcgaggtagtgggcgcgagaaacgaggagtcaggcccagcgatggcaagggtataaaagcatcgagaaaaggatttgcttccttcctttcgccattgttcctctggggggatccactagtggagagcggccgccc

SEQ ID NO: 14410 - DNA, 801 bp, Oryza sativa
gggcggccgctctccactagtggatccccccgaggcgatgatgagtcgcttcgctcgtacattcagcggttttgccaagtccgcaatactataccatgcatccctgcacacgcggtgatctacgcgttcagggggggtgtgcggcacaaccgcatgctcgaaaagattgcctccaaagagccccagactaccgcagagctttttcagctcgcggaccgagtggctcgtaaggaggaggcctggacctggaacccctccggttccggtgtggcagcttcggccgcccccggatccgccgctcagacagggcggcgtgacaggaggaggaagaaaaggtcggcccattccggcgacgaggggcacgtcctcgccgtcgagggcgctccgcgggccacccgaaaggggaggcctgcgagcgacaaaaagaaagaggctggtactcccaaccgggagcgcccagccagcaagtggtgctccgtccacaacacctccctccacgatctcgcggactgtcgtgcagtcaaaaatttggctgagcgaacgaggaagtgggaggaggacaggaggcaggaacgccgtgagggcaagtccgcggcagttccctccggtagacggcgaagtgaggccagacagaaggcccccgccgttgaccccgatgacggtgatgatgacctaggtttccaagaacctggggccaccattgccactgtcgacgggggagcgtgtgctcacgtttctcgccggagcttcaggctatgaagcgagagcttctagccgcggcccctactcatgaggcgacgc

SEQ ID NO: 14411 - DNA, 812 bp, Oryza sativa
  unsure (1)..(812): unsure at all n locations
gcggccgctctcaccaactagtggnatcccccgnagnaaaaaaccaaagaacgaacaaatgagtaagaaaaaacttctctttgggagaaaggtggttgcaatgagagtgagacgaacctgcgagggggtcggttgaatgaccaccttggaggagaaatcaggttcccccggcatggttccgtctcccccgttttgcggagccgtttcttcttgcgctccccctcgggctgcgacgtcggcgcggccccctccgggcgccgactgctggcacgcgccgccccgccccctcggggaggagatgggggaggtgttcctcccagcttcctcttcccctgggcgtcggcagggcggctgctccccgagcccccggcgcggggcccagaagcacgaccccctcctggggcagattgttcccctcggcggcgctcgcccgcgccgtcgtggcccttaggggctctctcctctgaggccccgacccccatcataatggttagaatggaggcgcggtcgggatcgctgcagagggggaggatctcctgaggaatgcgagacgcctccgcggagctaagattcagcaccctttggaccacgatcttgaagtcctcgggagcccaatcccatctggctccctggtgggtccgcatgtagtcttcaggcccagtgtactcccaggcgttccgggcgcgccgttggagcggcgcaatccggcgacggaggtaatcgccgtacaccatggcccccggtgagcccctgggatcgcaggcccgccaggcggtcgaggacggcgtcgtagtcctcccccagatctaccg

SEQ ID NO: 14412 - DNA, 602 bp, Oryza sativa
aaaatggttttttttaactgtcaacgtttttttatggctaggaaattgctttcactgaaaatgaactttttgacatctgggagcaatgcttcacgaaaactgctcttttcgtggaaggaatgatattccagaagtgaatatttatccctcaagggaacatccctgttccctccttttatgtatgtcacctaaaaattataaaaaaaattgtatgacagatatgatagaataatatgaaatatgtttttccacaaacataaaattcaaattcaatataacaagtgaaaaaaataacaaatattactgcgaatagtacacagtattcacagtcagtgttacaggccatggaaacatatgcatttttgcatgtgtatttttaggagatgaaactacagaaactttcaaatgggtttttgaaacgttcctaacagccatgggaggaaaacatccagaaacaattataacagatcaagacttggcaatgagggcagctatacgtcaagtatttccaaacagcaaacatagaaattgtttgttccacattttgaagaaatgtagagaaaggtcaggaaatacattttcagcaagagaaggaaagatct

SEQ ID NO: 14413 - DNA, 769 bp, Oryza sativa
gggcggccgctctccactagtggatcccccgtaatccccgaaacctttaaggccggctccgtctacaagagtggcatccaggtccagtaatggacatgcatgtccttgcattaggtcacatggaaattattagcctctaaataattatctattcaaaagagagaccgagtctgcatgtgaacacgtcaattgttaaatttctattgttattttgtgacaacagactattgacaaaatgaagcataccatgtgcccttcccacatattggtatggagctatatgtgcacacgattttgaatatattgtttatgtaggatttatgggaaaaggtatatttggccatcattcatcgagatggttgtgtacatttgattttccatagttctaatatatatggttgtgcactaaactacaccttggatgcgcaccccaccccctctcccctcccgcaccttttctgttcccacatcttcttcccgcaccttcctaccatatatcttccagcttttgttaataaataaattactctaaactagtctttgttaagtaaataaattacttataagcaattgatcttgccataaaatctgcatttgcgtccctttcaaccttcattcagtaaataaattactcctaactagtctttagtcagtacataaataacttaaaaacatattggtcttaccacaaaatcttcattggcatcccaacctttcttatcacttggcaaactatctgcattggcatcccatcatttctcatcactcg

SEQ ID NO: 14414 - DNA, 780 bp, Oryza sativa
aaaaggtaaacatgatggatgttgtgattggttgagatgaggaagtaggtggagaaactaaatggggattggtgcgattggttgagaggtggaaaggtagctaaattttggaacaaagggaatagtttgtaatatgacatgttcataaaagtggataattagttgaaggaccactggaaaacaatagtgtgttctcaggtgcaactaacaaaatgagcaaacttgctgaagggcagtcacccctttgtctgtgcgcccagcaacaacagcacagccttctaatggcaatgatcttgcttcaagctgtttagctttcttctcgtcaacaaactggccaagatgtttttctactaacctgcaagaaatacagagtgcaacaaatggttttatcctgtcatctgtcttgagatgcaaaggaagtgaagaataaaagtgccagatatgtctatagaaatgacataactccattcttatttatccttacccttgaacagtgttgaggccaggctgcttctgccaaccatcaaatgaccccccatgatatgaaaggacaatcttgaaggttactctttcccatcgtcctcctcgatctttggatgatttagttgatgtttgattttctgatggtgctgtgtaatcttctccattcgtatcaaggctgtaaccattctgttgaagaaaaatccgataaatcttactgaaacaaactaaaagtactagaaacggacctgcaccgacaaattccaaaattgggggatccactagtggagagcggccgcc

SEQ ID NO: 14415 - DNA, 796 bp, Oryza sativa
aaggttgtgtctgtgccgttttttccttttgaagaatcttgacttgaaataatgtcactcgtgctcaaccttgccctcgggggctcggttcggtcagctaaaatcgccaaacggggcccagaaccgagccgtgccccggggcgtggtgaactccgggggggaatcggcaaaaacccacaattgggtcacccataaccctcggtcaccacgttcccggcctggccagtctcgacatgcggatctccccaggcactagccccgacccgcgcttttcgaggactgggacttgggcatgggcccttatttcaagctaagacgcaaaaagaccacggcacagatcatcctcatctcacatatagcaaaataaaactaacacaaaaattttttcatcatttctcattgcagattaagttaaattgtacaaaaaagaggcatgaaggccttagaagaaagaacaagaaaaaagttaagattggcgggggcctgggggctcattcaaatgcgcccgggtcgccggcctcgtcgccaccgtcgtcctcgccgctggcgtcgccctcctcgtcggagctgggggcgaacgcgagccgaggggccgagccctcgaagccgttgacgatgtggtcagcagcatccccgacgcgcgcgcgcgcgttgtcctcggtcccgggagggaactcctccagcgccatccaaggagagaaattggggtcccgggcctggtaactcgctagcacgagttcaaccgccccccgggcgaggtccctcgaggatgacttgatggtcttctcgagctcct

SEQ ID NO: 14416 - DNA, 694 bp, Oryza sativa
ggcaatccatccgacacagcttgccagatgaacgagttgatggagaagacgtcccgttaccttgctgagttcgggacgggcggtcgctatctccaacttaactctgtgagttcggcgactgacgaattgccgacgctggagcttccaaagtccacgcccattgaacgtcgcaatgcccgcatggtggaggaggatctattaagcatccaagattgtttgatggagaaacccctgaacaaggagggcaccatagagtacattggtgctgccaccgctgcatgggaaaatagttacgagcttggacgccccgcagacttggagaagttgatgtcttacttgggggcacttgtgcaacatcttaagggagagctcccagtaacctttgaagggagaactttagctgctcatgaaggcgaggcgcgctcttccttagcaaagttagagagtgcgtgttcagacgtgctactagaccttgacctcctcaagagtggccgtgaagacgtggccgcggatcttcagaagtccaagcaagcaagggctacctggaagaaagaggcggaggaacacgagctgaaagccaaagatgcgagggagaaggagcaccagtgtttggaatcagaggaggcagccgccaagaaccggcaagtttatgatagtaccatcgacggcgtcatgcaacgggggatccactagt

SEQ ID NO: 14417 - DNA, 624 bp, Oryza sativa
ggtggtatggagttcccaactgattgtgatgctggaaagtcctttattctttcaaagtttggcaagagcgctcttccatctgtgagattctttggtgataagttcatccgaaaggaaactctctctgatgatgaagttattacttcatttttgattgttgcaatggcttgttttctttgtccaaactcttctttggtccctagcaccaagtatttgactgtgtttgagaatgttgatgagcttcggtcatatgattggtcaaaatttgtgtacgaatggatgatgacttccatcaaaaagatccaaaagtttaataccttgggtggatgctggtttctctgggcagtaagttattaaattttttttccattatctttgttccatattattattgttttttaattaatttttctttgctttttcatattttattttgctaggtgctttatctggattatgttgagtttggtgacaagaatattcctattggttttcctagaatttctcactggaagaataatatgattactttgtattctgaccttgacaaagttgatgaagaaaactttggccttaggcccattaaggatttcaatgatacacttatttcaaggtacatgttca

SEQ ID NO: 14418 - DNA, 812 bp, Oryza sativa
tcgagctccgctcgttctgcacgcagggcctcactggggtgttgaacccatccagcactgcggtgtttgcggcggccagggcctgcagaaggggctcggcgctcagcggggcgacagaagatgaggagaagagccgcctggagaaaaggcgacgcggcttggccccccggaggatgcgctgggctcggggatgtcccccgggcccgtttggtcctgggcgtcgcccggtgaggtaggcccaggcgatgcgcccgcggcctcgtcgcgagccgcctcggaggatgtcgcctgagggccgcccaagggagtaggcccaagtgacgcgccagcagcagctgtcgcctcagcctggcgagcccgggcggcctcctcccgggcagcttcttcggcttggcgagcccgggcggcctcctcccgagcagcttcctccgcttggcgaacccgggcggcctcttcagcttcccgaaggcgggctgcggcttcacgccggtcagactctcgcctccgctcctctgcggccgctggatcttcggcctcggactggccggatttggggtggcgggaggaatgcgacgggacatcgctgaagcagaagaaaaaaccaaaagacgaacaaaatgagtaaaaaaaaacttctctttgggagaaaggtggttgcaatgagagtgagacgaacctgcgagggggtcggttgaatgaccaccttggaggagaaatcaggttcccccggcatggttccgtctccccctcttgcggagccgttcttcttgcgctccccccggggggatccactagtgggagagcggccgccc

SEQ ID NO: 14419 - DNA, 1201 bp, Oryza sativa
gcttctttctgatcataataatggaaagcttctttgtgacagtaatctacctgggagactgacttaaaaatgcaactgtagcagaatacaaaaccagaagcagaaagaacagaagggttattgcgcttctggcagcataaggggcacaatgtcctgtcagggggcaagggaagtccatctttagcaacctgatgaaagaagtagacgctcaaatcaaacagtagtcatataaagaactattaaaccacaaaatatatccaactgcacagtggcaaaacaaagagttctgttcaccatgttactgcaaattgagatttcagacaagggtaactgctttctgcatatattgactagcatataacatgtacctttggcagaggtggaggagggggtgggggatatacagtcggagctgacattctttcctcagcagattgataccaccattccatcatctagataagatcacgagatagagaacattaagcgaagcacgatgggggatcatgttttttcatcatattacatccattgtagggagaactgagaagattaaagataaagagagtgtgcaaggaaaaacaaatttgaccaccgagacaaacgaagaacttgggttcctagagcagaaattggagagctgaccttgaaaaagaaaactgcagcaatcaaaccagtttgtgcataatctaggctagtgtacatacagttaagtaacaccctttgcatggtctgcagggataatattaaaatattagtgttatgcgccattattaaatgactcaaacttgagcaaatccactatatgagtagtgatacaatcctttactaccttcagccatggaggaccacgaagtctctcaagttctcgatttctgattcttgataccctagaagatgattccatctaatttttcaagaaaaaacaatagaaaataaattagcaaaataaaggctaaccatctctaaatatgaaaacttaacccaatttgatatctgatatgttttcttggattttaaaaaaggacaatggtctgcatggagaaatcataatcataagaaagaaaaagggcatttgtatcaaggtaataggattagaaataggcttctgcatatttgagctaaccaatagtcaaggacacaaattagtaagtaactaagtatcaaataccagctcttgtcctgtagcacgacaaacatg

SEQ ID NO: 14420 - DNA, 12354 bp, Oryza sativa
gtcggcacccatactcccccatcatctccccctcaggttacaggaaccgaagccccgtggcactctccgctgtgtcaggccagcgccgctccaaccccgcccacaacggacgccgcacccgcccccaccggcaccgacatccaagacgtcgtcgtcgccgccgccaccacctccacccttattctcctctctactcaacgtcgccggtcccatcaacgctcaccgggctgcaacgacaggaacgacgatggtggtggtgttgccgtggctgagcacagaagaaaggaggaatgaggcgtcgtcatggttggcgggtcctcacgacgagcagaaggacagagggcactgatctggggcgagctcgagagcctggtgacatacggttctcctcttctcgctgctgccaccgccttcattgatgccggctccgtcaccaacgtcgtatcttcgatggcagcggcaacggaggacggagcagcggccgtcggcgatggcggcgaaggacccagcaggggcgctcggcgatggcaacggcagcggaggacgggtgctgcggcggcggcgctcgacagcgccagagcgaggtggaggcgaaaatggcgatgctcggcgacggcggaggaggagacgctgcccagcgcatggacggcggtcagatccgcgtccccgacaacatggagtccggatccggacgccggcggccggaggaggcgcctcgcagcggcggcgctcggcgacggtggggaccgaggcggagatggctgctcgcctcgccgacggcgacggcgctcggagacgccgacgcgacggccacggaggtggacgcggccgcggcggcggaggcagaggcggcggcgcgaggggaacgcggagacggaggcggcgacggcggcgggagagcgggagggagagggcgagcgagagacgagagggagaagggggcggcggcggatagggttttgggagttagagcatctccaacagtctctctgaattggcctctccaaatagccatatagccaactctccatgtaatttagccagtcaaactagatgggacggacccacgtgtcagcctctactcctcttccccccccccccctctccccttctttcttcttatccttcagatccaaagctaaagctagctagctagctacccagctcacgcgaatggcctcctacgacggcggcggcgacggcgggcggtctggcgggggcgggagcggcgacctggcgtcgagcgccaagctggtggcggaggcggcaagtcggtgttccaggaccgcgtcgcgtcgcgacctggagaaggtcgacaaggcttgcatcgcgggtggcgcctcccggcgagaggcggcgcaaagcagtggcgcggaggagcggcaccggtggaggggcgacgcggaggagcggcgccggggaagaggcagcgaggaggagcagcgccggtggaggggcggcgcggaggagcggcgccggcgaggggcggcgcggagcggtggcgcggaggagcagcaccggtggaggggcgacgcggaggagcggcgccggcgaagaggcggcgaggaggggcggcgcgaaggagcggagccggcggaggggcgacgatgatgtcgacacttggcgacgggatgacgacgccgccgggatgctgctgcgcgccttagagtgtgcggagagagagagggggaagcacgcgtgggtcccacggatggcaagctggttttgactggccaaatttggctaggcagggagccggtttggccagctgatagcttggccatccaaatagcaagtctgttggagtctgtctaattttgaaccaaacttgctaaatttttgctcggagagtgagatagcaagactgctggagatgcttttacgtagtgtgggcgtttttttgcgaaaaagcccctattcttttcactttttacattcatgtccacgatttttcctatacaaacactgtttgtgaggggcctatacgtaattaaagaaaaccggagggctttttttcaaaaacacacccgagcactatagcaaaatccgacgtggcgtcgctcctcgcacgccccttctgcgcggcataattgttgcttggaagggattggattcatgctaattgttgtattccttcaaccatgcatcaatgcttgattcagtggcaaggcgacaagattgaaatcgtgccagctgacaggtcagtcaatgttgccagtgccgatttagctctttgggagatggatggtcttgattatttatctggaatagtttgagatggagattttctaaaagtgtccgattctgatatatagccaattgaagatagagaacccaagctattattttgagggcgtcttggagggttcagatgtctacaacaaggacacaatagatgatctcaatgacaagcaaggacagggttttacgtcggccgatgatttggaagaaattgatataggtctaggtgatcgaccaaggccgacatttattagtaagaatttatctgcagaatttagaaccaagttgatagagctgttgaaagaattcagatattgcttcgcttaggagtattatgagatgcctggactcagccgatcgattgttgaacatcggctacctatcaaaccaggggttaggccacaccagcaacctccgaggagatgtaaagccgatatgcttgaacctgtcaagactgaaattaaacgattatatgatgctggttttatttgttcttgccgatatgctgagtgggtttctagtatagttcctattatcaagaagaacggcaaggtcagggtgtgcattgatttccgaaacttaaataaagctaccccgaaagacgaatacctaatgccggtagccgatcagctggttgatgctgcctcggggcataaaattttgagttttatggatggtaatgcaggatacaatcaaatctttatggccgaagaagatatccataagacagcttttaggtgtcctggtgcaatcggcttgttcgagtgggttgtaatgactttcggtttaaagagtgctagagctacatatcaaagagccatgaattacatctatcattagggatgatggcaatgggtcgggtcgggcgcgggtagagtaaaaccatgcccgacccgatacccgacattgcctgcccaaaccctacccactagagttagcgggcaaaactctgtacccatacccatgcccggcaggcgccggtacccaatggatctcacatgaataataacttgaaagatatgtaatttaacaaagagaaataaaatcaataatttaccaaattattggttatcaataataatttgaattacatcacaacttaaaccttggaaattcagcttctgtcacagatggccgattgacaactttcaagaccatcaggtttaaccaggtctgcagcaaccaccatggtctacctactccaactaccgatccgacagctatcttggccgatgcattgttcaacatttggtataaatagtcgaggaggattttgcccaaaggaaattgtttctttgattctagggcttcggctataaattgccagttggttgtaggaccacaactggatccacagaagaggaacttttctaaccacattagcaagaaagctacatgctctcgaggagtgacaggccctttacccatgtatgcagctacatagccagaccagccacctatgcttttggttctaaaatcaaattgattcttggtattcatgctcatagggttggccgatgaggttacatctagtccagtgatcatggtgatgtcaatcagagtaggagtcatcggccctcggttgaacagaaaggcattgatggtattggaccagaaataagtggcagcggccatcagaggttcatccttagctgaattggctatggtaagggcaagtgcttggccaatcccgatttcatcccagtgaactttcttactagccgatacacgcttgtaccatgtggtccaactcctctcaggggtggttttctcgagagatggccaagacttaaaagttttcttccagtgacctaggttagggttggctaatctaaaggggattctgttgctttcgccgatgatgaaatcagtggggtcaaggttgccgattggaccaagaaagtaatggttttcatgcgacaggctgggaatcgcaactagattggagaggtgctgcaaatccaaaagaatcgagaagaagaaaacaagatgaggaaaggggaaatcgatttcatgcgaggaaaagggatctagccgatgagaccttacctcagcgtactcggctgatggcgcggtagacgggctggcggaggacgacatcaacgcaggcggaggtccggtcggagatggaatcgctttggaatcgctttttgcgtcggtggagtcgccgcaaagagagggcaaagtttgtttcagcggcgaaaatagaagaggacggtgtgagatttctcgagggtgacgattagtatttaaagcacgggagtaatggtcggaaaatagcgaagtgcgaaacttgctcggagtcgatatacggcaaatctgaaacattaccaaatattccggacttggggggcatgtgttaacaaccaaatttggcaacatcggcatcggaaaggaagattagatcgaagtggaatcagagataaggattatcgcgagaacagagtaagaatcggctggagtcctgatcggctacgattggatcggctgaattcgagtcagacttttggtttggtgatacagccgattccgacaatacgacttggtgtacgacatcgggttgagttgatatgcttcaagatgatggccacgcgtggatagagtcctgggaaggcaattgtatctattaattatgatattttatgtaatttccttagatatatgtttgggcaaaagtctgccgttaagacttatggtatcttagagtttgttagagataagagtcgtgtccgatatggacatagtttgtaattttcgagtataaataggccccgaaccacatgtaatcaaagaacacacacgttcaatacaatctcggcgcatcgccacccttttgctttagttttatttcgacgagttcttactttcgggttgagctgcatcggtttcgatcctcaacaagaggtaaaacttgttatgacggcttgcgttctcgggattagtgcttccatctttatgatactctaatcttgtctatgtaattcgtcaagttatcatatatcttacataatctctggcattatcgctatttaacctattatcggctaacatctgtcggtagagggcagttatagttaaacatcgatgttgacttagattatataggatatctaccactctatgaaacttccagcggcttgattgtctagatattgttctttttttcatacttaatgcggcatcagttgagtttgatctattaagtcgtgcttagaatatcaatctctagcctgccttctggttgccaattagaatagtatcggggtttcagccgatcttacctgatttaactatattcaccctatatgcttcattgatatgttaaatctgccctttatattaagatcttgttgcatttaagtatattaggcctttgtttgatatattctacttgctttaacatcttagtatagagcggtatcggagtattagccgatacatgctagatctatctgattggctatgctatgaacatatatagtcctattattaatatatatttcgatctaagtgatttatactgtctcggcatggcgaccgatctatcccaatcacttgatttaaatatatatcgatatgaggagtatatatcgttaatatctacagctgatcgagtagatttagttctttcttatttatttatgactgtcgatcgatatatatatatatgacatcggctcaaagataaatgatatgtcatcggtacttagccgatcggctatcgtttataggtttaaccgcggtttccttgtcgttatttcttgttgattgcaggatcaaatcaactggcacgctagcatacccgaaggcgagttttggacctgcactggagttaagcagatctcccaggcctcgtgttttccgtcaacactttggaatactctcgggtgaaatactacaatggtatatccgtgcgcttgcggatgaaatctgtaaccatagtataccataagtatttcggcgccattgcaaggaattcatatttctagtaatgacgttaagaaataccaacatatacgtgtgcggcaaatgaggtaaaagatttaagccgctaagcttaattgaagacatggcttctattatggctagaaagtgcaataatgtcacgcccagaaattcactagtaatttccgaacttatttgtgcataaaatcctcgtccaggaatcagccgaggtacacaaactgacaatttaatatacaaatccatcataataataacgttacacacttacaaaagaaaagaaaacagcagcggaattaacggtctagcgatggcttcagctccactcccacaggcagctcaactggggtataagccaaacgtcttctccttctggatcctttttcttcaactgaggttgattgattattgcaagaatgagcatatgacatactcaacaagccacacagcaaatatgcaagtgcacaaggataccaaaggatggcataatataggctcatttgcaaaatcagcatttagcaaaacatttaggagaagtaaaacagtggagtaattaatcagaaattttaatcaacattgaacaacacacccatgctgcacaggcccaaccatcctgaacaaccatacccggctgtacagatctaactccaaaccaggagctaagcaaattattaccaggtataacatccataattattgtgagaggtgtgagactaatcacgaaaaacattgctcaacccgcccataaccgcgggcacggctattcgaatagttttactctggccagaggtgtaccactgtacccataagacacagcctcaacatcatgtctaccatgcgtcgcgatactggaaagtacccgaatagaggctgtgacaataccctctgcacaacacaactcaccacagtgcaccattcctggatcataatcacccccttataaaacaaggcatggactccccagcgacccccgtgggcttatctccgccacttctcagtctggtgcttcgcaatgaatcatgttatacaaaaggtaaagccgttgcctacgctggcttgtggttggcacggttaatgtttcacaacagtagctcgcgaaccggtccttaattgccatgagcacgactctcaaaaccatgtgctcacaacccaccattatcaagttttagttggcaagtaattaattaaccaatcacgattgaccatcgtgaactatcattaagccatcattaaataataatgagtcataagttatcccaatagtgtgctaatgtttctaagcatggctaagcaatcatacctaatatctagctgaaccaatatataaagcttaactagtcaaattataataacccaagatatcaaagaataaagtaatcaatgcaaattggccataacaaaggaatagattcacaccacccaatgacattcgaaaataaatacacggttgaaataaatagagaatttaaatataggatcaacatgctcaaaggattgtgtttaggatctgtgtgacttgccttgcaataatcggtcttcaattaatcctcttgaatacttccggcgcactggcgaaccttcgcaacgacggaaacgacaagctaacacgcaaaacgaagaaaaagactaataaaaaccaaataaacaatacatataaagtaaacaaacatgtagatcataattttagatgaattatgagacttgaacggcctcattctgacttcatatgaatttattatgaattttacaagattaaatctaattaaagcccatttaaaaagaattaaataaatttaattctatttatggataattttattatgtagatctttattttacacaacttttgcaacttgaaccacattaaactgagttacaaagaattagttatgaattttcaaagattaaatcggattaaagcacttatatagattttaattgaattatgacgcaataatgaattatttttgaaaaggaaaagaggattattgcgtcagcgggctcgagttcacggtggaccgggtgcacagcagcggttcacgggaacggacggccgagatcgatcctatccaaaacgaacggccgagatcaaccgatccacgaccgggccacggcggacggtcccgatgacgtcagcggtgacgtcaccaccggcgacggctcgggcggcgcatgctcgccggcgaacgacggtgcgaggacgcgaacggagggcaccaaaacgatgcgggcgacgaggcgaactcaccggtgaccaaaacggcggcggaagagcaacggacggcgccggcgatgaggaagaagcggcggcggtcttcgggtcaacggtgacggcggtgctccggcggtcttcggcggcggcgaagcggtggacggggatggcgacgcaacggcgaccacgacggtgacctccccgagcgacggcgacgactggagcgacggcggcgcacggctggagcggcggcgacaacggcggcgcgaggtctcacggcgctaggacgctacaggcgacgagaggcgaaggcgagggtggcggcgggtagaggagagctcgggggtccttttataggggcaaggaggcggcggcgaaggcccacggcaaccggcggcgagaaggaaaggttagggttcgagagagagaaacgaatccgattcgacctcgaatccacgagtttccaaaccgaattaggcgatgattccaaaagagaaaaggaagaggagatcgagaagattatttcccctctaaagatttcaccggatcgagaaaggatcgaccggattggaaagcggcggcggcgaagcggctcggctagggtttcgagcggcggccggcgcgaggagaacgacgaccccgacaagtgggtcccgcctgtcagcggctgagagagaggagggaggggcgcggcggactgggtcgacttgggccggggaggagagagaaagagagaggtttttgggccgactttcggcccaaagccaaaagagacttttaaaaacctttttcaatttaaattattcatgaaatgcaattccatttattaaaaatactttcttggctcaaataaatcccagaaaaatctaggaactatagaatcaagagaagtatttaatgaaattttatctggccccattttatattggaatttattaattaaaattagatcttctcttttaggcttttaagatcatttctaataattcttttaaacaacaatttataatttaaggatttttaaacaagaaaagctcttaacaattataattagatcattattgatcaaataattactgaactgttctttgtatcatttagaaattgagctctgaaaaatccgagaaaatttcagagagtgtaattaaccatggagaatttaataaaaattaaatccatccatgctttaaatttaggaaattttatttcccacatttaacttcacttgtaaattaaagaacatttaatataaattctaataataatttattaaataatttataaatcctgaaaaaatcaggatgtgacaaataagaaactatatttttcaaatccatcatctaaaaaaagcaagtgatcaacgcatacaacgaacgacagccattttatttaaaatttttaaacgcatgcatccatggcaagataacctcatcactctctggtcataaggaaggaatgagtctccgctctagcaaccgaagatgatataaatgcctatatttagtctcattggtggtccatgaagctctctcggccccatatatatatagctcttgtactatcacgtacgtagtatataacatgagcattagggtaaggaaagtcatcttagctccacaccaattctgctcagcataaacggtgctaatggcccaaaacaagaccatttcggtggctctgctcctttccacccttgtggtggtggttgcggcagtagcagccaccggaccgccggatttattacaaggttggtgcgccgatgcgtgtagagaggagcaacaaaaagaccccatctacaacaagcattgcccagacttctgcgtcatctcgaccaagcagatttttagggcctataagggagccacggatccccccgtggaaagattcaacgccttgtgcgatgagggttgtagtaaggaatttaaggaggatcctgccatcagcaagaagtgtgtagacacctgcatcgtcatgtctaaggaagccaaggaatactttgcgaaaggtggcactattggtgctcccgcgggtgcatgatcgcgtagcagctgcacatctgatccttcttccatgatcgagtgacaatccccataaatggttctcacctggggaccgtccttgtatcacatttgtcctgttgttcccttttcatcttcggttgcttcattatttggtgtttataactctatgtggttgatgtgatatgttgttcttaccaatgttaccagaaacaattgttatctttatttgattaaatatatccggctgtgctttggcttttaccactcattaatctatgattccgtatccaagtaagtagagtgcgtgtaatgttaacatatagatgtagttattgcctccgcccacacgcatccgacgcacgtcgtgtgatcatgcgccagcggaaaacgcaaccaccacggcaccatgatacacatacatctatttctattcctaccgctccgagagagacaaagagaatacgtgcggccacgctgagcgattgcaaatgagtctatttctccaatcccaaggcatgttgcttctgaattgctgcaaccagtagcctcaatgacgatattatacatgtttttctagcgtgcgacatatgtttcaataacttccttgacatgttgcacgagtgtgttgtttcgatcaaatcctagtaatgttgtttcacgaacataatatcgatgtttcaggtttgaaaaatatagtttccaagtgcaagattgaaacaatgcttttcttcctcaaagaataacaccatactaagtcaattcaacacaaatgtttcaccacaacaattttttaccttttgatagtgggcccaacgaaaataatgtatcatgttttaacaaattaagctaaacttttttgtgtcgcaagtatattccgatttttcgcataggcgtgttttataacttaatatatcattgtcgtgcgatgacgagttaggccatgagattttttttttgggatttaaaattatttagttaatcatttctataacttaaattaatgtgcaaatcatttctaggttgctgtcgacctggtggcctagcccaactgcgagactaagtttatgacaaggtttgtagagcttgtaaaaggacacatatgtgttgacagtccttaaatcttaatatctaaccgtcaatacctgcatataataaaattaaatatggtatccaacttagtggtaggtattattactaatcattttcactagtatttgtgaaatatgtgtatgcaggtattttgagaagaaaacacatccgtcaagcgacaaactgcacccccgcgctttcaggacacatttacacgaattggaggtcccataagtcaattaaacaactccaaatgggcccaagtatcatgccaatgggccgagggcctcaaaaatagtgtccatgacgaaaaaagggccgaacggagccgtcccgggttcggtcgaacctccagttcggacgaaccgttttgctggccgttgatcgtcaaattttgcatggacggccctgatcacatcctaatggcggttccagggtagtttggtcatttcgcataggctgtaaccgtcatacctgcctataaaaggaggagctcactctcatttccaacacacaactttgagctgaattacaagaggctctattgtatcttttgtacattagaataaggtagagagtgaggggaagctctggaggagtgcccggaagtttggcgctcatccgactttgtcggtgacatgggaccgggagtatcatgacttagagacttgaggcagacacgatcacccacgtggcctaaccccctcgggggggggggggtcgggcccgagggtgatacggccgcccttctctttgtctccccgaggggtcggaccgctcccgtctcgggcctaaaggccaaggcgccctgaccccttgagggttttg

SEQ ID NO: 14421 - DNA, 3284 bp, Oryza sativa
ctccaatgtccatatagtctgaatcagctgcaaccaatcccaaatccaagaaatctacgaatgccagttaaatccccagcttcgccgtggactgagaagaataaacaaattaaagtgtacaatgaacttaactataatgaaggtggatgagaaggtcagaactgcacatcccactactatgtagcagtgcatcctcatgcataaaaacatatattgatgaacaaagtctaaatgctaaaagtctaaacacaacacatgaaacaccaaaccgtataatcaaatgtgcttaatagaacggcataaatataattcaatagattgacattatacgtaaccaatgtcataagggaccaacgagaagctaaaattggaacatgtcatcttttgtaaataaaataacaaaacagctaacatcttcatgtaaaatctatgttcttataacatagatacaaaggcatgaattatgcatggccgtctgttatctacatggatatagtaagctagttctatataacgctcaggcaagacaaaaacacatcctgggttcgtgcatgtggattatatttatataaattagcacctaagttgttcttgtgaacaaaacctgtataaacctaaaattagtaaaaaaaggaactggaagaaaacgaaagatcttcccatggaactgataaaacacggtgaagacataaaagcagaggtaaacctatagctcatgcggggcagaaggaaaacaaacaagtgaacaattcataactctctttttttattctaaagcagcacattagcaaacacatatgtatagtggaacatatatttgaactgaggctattgcatcctgaaagctcagcagctgaaaaaaaaaaagaaagcatgcacaaagtgtagggcaggcgcaaagagaaccaaaaacaacaggaaatgtaattttcatgcacaacattcaggataattctggtcgtaatgcaactcaattccaaaatcgcatgtatctgatcatataaaccacactcttatgataaaaaggctttctggacatcagaatatcaatagatataaaaacatgtaatcaaatgtgcaaccatttagcagcaacttttaataataacatgcacagtttttcatggaaagcagcatgaaactcaaatttcaccttcctattaatgaacattaataggcaacaattttccccagatctcaacattcttccacagcattagtcatgtataaaattaacgataatctgtatgttttttcatcgacttaaatttatgaccattatcataggataaaacaaaacactaagttttaagaaccaatcttagcatggccgggtctatcatcatgtctcttacaataagtggcaagaagagtagcgcattaccttgttagttttctctgatgaacaagtacggcaccatcacactggagacaataggaagctcatttattcgtttgcctcaaattgatccagtagaaaatacgataagaagcatcattttacaaacttaatcataaccagaataacaataccaaagtaatatttgtgatacacataatccccaaggcccaactacaaacttttaggtagagcaatatacaaacgcaatatcaaaatctatatcacatcacatacagtttccaaccagccagaaatgaggaccagaatacataacgaaaaggtaacgccaaaatcataactgaaaaggtgacataataaacatggtttgctcatcttagataagcatcaaacacaaagactatgaggaaccacaccaaacagtttttttttaaccatggcctcaacatgtatccagttaaatagattgaccgaccataaagttaatcagaccatctaaatataattataatcctggcctatgcgactgatctaggtaggtccactcacccatccgctaatacgttttttccttccatcttttgctgccaccaaccatagagtgctgtggtatacacgctagctgtttggaacgaagcctgttgcaatcaaaccgagaaatacctttttagtctttaaaaaccagataaaccataaattaccctatcccaaacatcgccacataaccattaaaaaatgaatataaaaatgatacaacgcactaaacaaaaccttgaaccctgccatcctccaacaatagaaaagcacaggaaaaaaacgaacaaccattcaccgatagaaaccgagctggacagaaaacgcaattgactcttcccatatcacccaaccataaaatctagccagcttacattatgctattaatcatattatttttgcacttccagaaagagcactgcagtaacagatttctgactaaggcatcaattaatagagacctgaaattataacttcactctgctgcaacaattaaagcgcaagctaagatgttctcccatacaaacggaagcaaataatagggcaaggtactctcttgactgaacctaccaaaaacaaatattcaatgtcagcaaagtgaagtagctttattttattttggaggcaaaaccaacacctgtagtcattctgttttacctatctataatttttaaaccaccttgagcagcctcaatcgatacgcacatttcttgcaggtgatcttccatgtcttctgtcagtttgtcatagagctttggcccatgttcgtgaagtgccagattataagcagtcctgccagaatataaggacaatattatgttctggtacataagaaggatattggttccaaacaagtaaaaatactatactgtgccatgaaaggctagtaggtcagacatgataccatggaaagacctaataatactaacgaaagtatttccagaacgaaagaaaaaaataattcaaatatcacaataacacatcacttaagggcaagcaaacagggcagttggcctttgcttctctcttaaaattctatttattgcactttttaagagtaaggggcatagcgactacagagttccattgaacaagttgtatgacagaagcactatctacagactacacgaatagtaaaagcccatgcttgtgattgtagaaatagagtttttatgtaagaaaaataacaattttccaccgaaaaaaacaacgatgtaaagaagaaagactttcataagtattttgaggcattgttcagctaatcttgtttcaaggggataaggacctgtttttttatgtgcaaacaaatgcataacatagaccacgctgcacgcaaactctcaagtgataaaaattgatccgagatgaatttccctagatgtaataggcg

SEQ ID NO: 14422 - DNA, 1428 bp, Oryza sativa
  unsure (1)..(1428): unsure at all n locations
cccaccgggccccgccggtgatcgacgcgcccgccgccgcggtcgagttggcgccgtacccgggcgcccccacggtgtccagcttggcgcggatgcgcgggcacccgacggtggcgtcccagtccgctaaagccgagagaagctacgtgaacggcgaccgctcgcgggtgccgacggcgtccagcgccgtggcgaagagcgncggcgccggcncgncggagtagnagnagatgnacgggagctcgaagtagccggagacgaggaggaggaggatgacggcggaggccagcatcggggccatgtagttgatccgcttcgggaagagcatcgaggtggcgcgcccctcttcttcctccggaagcttctggaagcttcgcctcctcgccggagcgcgagatctcggtctcggaggagggggaggcgataggtagaaggattcaggattaggtggagtggaattaaaagtttttcgaggggctcttttggaaaagatgtcagttcgcgtatcggaggtttatttcagctacggtgttttttgcgattaggtccttggaagtttaagattttacagtgaaaagggtggaaggttgtcgccggcggctgccggtcgtttaccaggtgagaattacgatggtgttgactttgaccatagatgggctgggccctgcattgaaaggccaggcggcccaggcccaacgccaaaatgtaggagtattattttttagatttttcataaacctccatccatttcaaggttgacctcacttgacaacttctaacttgtagccaatgtttggaaatgggtttgggatatgatttcccactcccaaagagtaagtttcaattttagccatccattcatctcaccccatttcatcctatccctctattcatttttatttctcaatcccacctctcataagtcataacccattttccaaacacacatgtagagagagttgtacgaatttatgcctctcccttcccaattcctctaccaaaatccttttatactatttttccccgtagtttgcagaaaatcatcaaatgcagaaatgtttgcaacatcatctgcataactatcttaataaagaagtgcatataagatggtacaagatgggaagaacaacttcttccactttagataacacaatgctattacaccatgaaatacatacgtcatatatatatatatatatatatatatatgatcatatgcaactcgctacgcatcatgtgcaccttcacttgtcaccattctcctcctgatgatcacccgcgaattgctcggatggcagcagcatcgcgagcgaagcatccaactgcccgaatccgaaatccatggcgccgaagcttcccgcggagaagaactcatccccaccaccggagccggacccgacgccggcgatccctttgacgtcaagaaac

SEQ ID NO: 14423 - DNA, 3058 bp, Oryza sativa
cctgttcgtctcgttattacgagccgagctggagctctcgccggcggcgaggctgaccgcttgtgcggctccggccgcggcggcgggcggcggggtggtgcggctgaggaacgaggagttcttgagcgacgggaggaggctgccggcggtggagatgagctggacgatgaggcatgtcaggtcggcgttgacaagctgctgctccggcgtcgccgccgacgacgacgaggcgcggcggccggccatggatcggatgacgtccttgacctgccggatcttctcctcgatgaaggtgaggttgtccagcatcgtgtccgggctccagtccatgtgctggatgctaaccgacggcagcagctgctgcggcggcggcggcgccatgccgaggagagcgtcatccgccatgaacgggtagaagagaggattcatggaggtcaggttcgcagcctgatcgcgcatcgtgttcgtcatctggtcgcgatccattgcaagcttctgaataatctcgcgtgatctttattaggaaaagagatggcgcctctgaaatctgcagaggaagaggaatcaagatcgttagccagttcaaagattgttcttgttttttttcccccaagaaactatttgatgttatttttgagttggttgaaaagtcaagaaactgggaactaattagtagtagtaatctactagattatcaagtgatgcaagatttgcaatctgctccatccttttcactgacacagtcagcaatgctaaaatgaagtttaaatcgattttttttcccataaattacttgatcaaggttcttctctgaacgaatatgctacgaattaaaagatactaccagctttgatcattttcagaatcactaatttattactaacacaagacaggagaaaccaacatcctttttttttcctaagaacaaagaaaaaattttgcaactactgcaggctgcaggaacaagatatcttaagaaccaaaagtctccttcttagttcagaataacctaacaattcacctaaacttaactagttaaccgtaaaccctgaagaaatttctacaagaacaataaggaaaagccttagatccaagaacaccctctctatcctcccaagatcgcagaaaacaggggaaacttatatccatccaaagttccaaaccataataacctagaacgaaactgtcaactgtacaagaagaagccaaaacaaaatcaccagcaagatggttccaatccagcatcaagccaaaacagaagaagcttacaagttgctgatcagagatcacatacccaatcaaatcaagcagggggaatcactcccagctcgtcgccatggacgcctagccgtgtctccacaccaagaacagcagaacaggagaggagaggcgagcgagaaagctagaggagatcgaaggaagcatccgggaagctgggggagctagctaaggcgtgagctgtaggtcaaattaatttgggggtgggatgggctcccgattccaagatcaggatcgagagaggagggggacggatcggtcgtcgattgcccatcatcctatcttagtttagtcggctgtcagtgactaatagcgagggaaattgtttgattagtcgcctcgagtctcggttcactctgctcgagcagttgagcttgagctagacctctctgattgtgggtgtcgcagcctgatttgcttgccgtctctttggttggcagtaacgcaggtgcttagcacatgggagcacttgtttatatcagcttgattatactatggtttagtggagggtagatcaggcctttgcgtgtgattgtatttgttttcagacggggtcctctccgtagggtttgcaatatcgcacggttacaccacggttattgtgcggtaaccttctttccggttttttaaactttatgattcgtaacctccggttttcgcggtaatcgtgatactattgggtagagataatcctcaccaatatggtagtaaaggaaagtctgcctctccactattatgtggccaccgagaactgatatagaactgaaagaaaaatatgagattatttttaagggcacatttgaaatgcaggattatagaaatatattaacattcatgtacgatagccaatctataggattttgcacagtccatttctttgttttaaatgaccttatacaaatatttcccaagaaatgaaatccttcagattttcttttagggcccctttgaaacgcaggataggaaaaacacaggaataggaaaaacgtaggaattgaagttgtatgtttttccaatcctacagaaattgaaaacacaagaaatggagagaggagccctttgattataccacaggataaactcaacaaaggaaagtttcacaagaggtctaatctcttgcttattttcctatggaattgatcataggaatgcaatcctatggaagttttcttatcctctccctatgaatcaaagggctctataggaataaatccttaggaaaatgaatcctccaaaattcctttgctaatcctccattttaaaggggcccttaaatcctttcaatctcaaggagccctaagatgttggtgtttttgttaccttatttttgttggaaatttagtgaggttcactgatgtatcaatggcctttactaggtttagcacttatatttactttacgccatgctatatattgtacaaagttccagttagcattgttccagttagcatcatgatatacatcatcaaacatatagaaatttcattaaacctcacaaaatcaaaatgaaacttcatgaaacatgatctatatttgttaagtctggtatgtctcgctcatgtttttgtgatatttccctctgattatatgaaataacctagtgcaaaagtaaaacttatttccaaatacactagtataaagtgaaagtatacactagaccccatgcaaagtgaaactagatacactatacccaatgtaaagtgcaatttgatcttaatgtatgttagaagagacacattcgtaggtgtgcgagtaaacagtacatgtgtgtattttgtgc

SEQ ID NO: 14424 - DNA, 3655 bp, Oryza sativa
attacaacaacagaacagttttgtttatatgtacttatgtttgacatattctttggctgtcaactccacactgagatttatgcaaccttcatggcacaggcaaagtttgcacatgggctggtaggcctatagatgtggggtaaggaaaaaagggtgaattgtaagagttagataaaaagaatttgctggtggtcagtacatgtagggcacatggaacttaagaaaattttggtacacactcctgattttatagtgtaatgtttaaaatttagcgtaaatatactttagaaaatttacaaactgttttggacttttgacatgagcccgatgtcttttgctgctttgacaacttgcagcagcaactatgactactaatgttcaagcgtacacatattagaaccaatatgtacatatattagaacatagtgaactattaacctatttgattttaaaatttaaaatgattagatattatcccgagagcagtacatcaagtctcagaaaaatacaaccaccaaagccaacctacctgcagcaatctacatgcagttgctacctcaaattgcatattgtgcaaatgtaggacaactaggtcttgctaaaagtgctttttttatggttgtggattgtaatcaaagacgtgcttaaaaaaagagtgagacttgttatacccatggtttttatcacttaaaaagatatgagaatgacggcaatactaaaataacagaagaaaagtacggtgttattgaatgaaccataaacataaactctcagtgtaaaatatcccaaacaaaaatgttatgcatctagaaagtatattttaggtcaagagattcgttacatggctacaaggtcacaaattagttacagccttacaggtctcatgtatcatcgttttgtgtttttttttacaatgaacggacttacctattggatagggtgggtcggtcggtccagctataacctgtgtcatcttacacaccagaacctcttctagcactgagccatccatattaaccaccgtctactaacccataaacaacccatcaaattaatattttactccagactagaaatgaggcaaattgctcgtctcttcgtcccgagccatcgactattcattcgtcttcatcacctgttgcttgatacttgttccttcgcagtatcgatgattgtgctagtatacatgtgttgacgatgtattgtgcacaggcccatccgcccatggcccgaagccctagccagcaacatgttagtgggttatgtatggctaagcgactctataattgcattctatttttcttttttgtctttgatgttcttttgtaccttaatttattgattgcactcttgttctcacacggttgcaaaatatgaaacagtatgtgttatattccattatttttttcaagcatatctgttatatctttattttagatttagagctatgtccgccgaccatttatcatggcgtgcaccgtatcttccgttattttgtgaagcaacccacgcaatcccgctttcaaaccgcgaaggcgtaaatcctcaatttcccgtcttcgaagcgatatttccactccactccacgcaatcaccgtgcacctggcttggcgcgcgccacgcgcgggaaccggacgaacacccaccttccacacgccaccgcccaccggcgcgccggccatggctcccctcctcctcctcctccccccactccgccttctccccgccacccttcttcgcgccacaagccgcccggcgtcgccaaggcgcggcctctcctactcctaccccaggcgcgtcgccgccgtcctgcgacaatgccgcgcccgggcgccgcctccgcctgctcctccggatgccgtgccccggtggcacgcggcgctcgcggctgcggcggggctgtacccggcgtacgtgacggccggcgccgcggtggccgtggcgcggcccgatgcgttccggtggttcgtcgcgctggcgccggggtcgtacacgttcgccctgggactcatcatgctcgccatgggcctcaccctcgagctccgggagttcttggctctcctccgcgagaggcccctctccgtaagcaccccaccccaccctgcaaattttggcactaaatatttctccatttctaggtgtacaattccatggcaatctttcaaatttcaattgtgtccttgaatccaagatcccaaaattgtgactgatccaaaggaaataaattgtgtgttttggccgctgtagatattgtttggttgtgctgcacagtacaccataatgcctgcctttggagcaattgttagccgggtgctggggctctctccaccaatatcagtgggactaattctgctaggatgctgtcctggaggaactgcttccaatgtggtaagattctcaaacttgctcagagaatatgccccatttgagatggatcctcgactggattattgccgcgaactgtctactttattgtggagataaattaaacattttgagaaataaacttaacaaaataatttagaacaagtggtctaagcaatgtagtagaatttgtttttaaagaaaatgtatttttagaggcgtgaagccaggggcggacccagcccagaggcaaggcccggaccggcctatagtatttgttttcataatattagcccatgggatattgggctttcaaccccaggccccgtgccatggcctagggtgcccggggtcggggtccgcccctgcatatagcaaataatacatggctcgactatgagtctatgacccgttttgtactgaaggggaattaaggatcaacacttcaacagacacatagtagtgtaaatcaagaattcaaatgtgcatattatttgaatgttcgagtgttctagcaatttcacagtgccacagtccaatgttgaattttaaatttccaactaggattaagatcaagtgtgctttatgaaggtatatcgactatttaaacgattgattccaacagttaacatatgttttctgagtgccaagaaacacacaattatctagagcaccaagttatttttggtggttcctttaggttatttctacataagacgttctgttattttactttatcttcttggctttatgaaccctgagctctccaagtatatgctgtgtgagtcaaatatgcatgattaaacaaagggtctctcattcaagataaaatcatgatggttggaggcagagtatcccacataggttgtccatgtatgtggatgatgtagttatgttcttcctagcaatattcggggaagcgtcgggtctaaataccaagttcgcaaaattctcggtgtttctgagctgcctagtgtggaattgcccctgtgctgttcatgattcccatgtaccttgggttgcctctgtatgaaaaggcacacaaatattttgcatgctgaaaaaatcatttgtacctggattttctttgttatgtattgacctagttcttccatatagtggttcaggtgactttagttgctaaaggtgatgttccactatcaatcgtcatgactgtgtgcagcactcttggtgcagtgttccttactccactgttaacaaaaattcttgctggtgcttatgttccagtggacgcggtgaagctttccttaagtactctgcaggtgaaatt

SEQ ID NO: 14425 - DNA, 6578 bp, Oryza sativa
ggttcctctatacaaagtgcattcccatcagtagttaaatttgttactccttttgcccctcttctagcggtcttaacttcatcacttctggcgtgcaggtttgagttcttgtaacatgttatgttattggattttgaatagctgaaacagcacgcatttttagttttttttaccatttttttattcttatggacagcgtgttctctgagaactttgtacggctgagatcaacaattgctgatgcatcatatgggaatggaggcctgttttctggggatattggggttgtgatgctgtctgtcttcttgctgcactgtgctggttttgttgtcgggtgagcactggactgtttgctatagttatttttttatatgaaggaattacattggttgtgtgaatagtagaaatttttgtttaagaaaaactgtaagggaacaaatcgtgatgtttcatccttccattaattcaaccaaaatgttatggatgcttgtagtagttagtatctatcatccagatttctgattgtttacataattttaccacgcataggtacacgacagcagctataggtggtttcaaggaaagacaaaggagagcgatatccattgaggtatgcagtctgatcgctaaagctactactagtaatttatcatcgtcagaaatgcagaacatagcattccaaagctaccaattttctatcatcattaaacgtggagtcttattaaaatatatgaaatcacacttccatttagaaaatcagatggtttaaattgcttcggagagatcaacactaaacgtaacaatatctagccattatcaacactgagttactaaccataaaaatatctaaccatttgttataatttaaacagttgcattccccacagtgtaagtttatttctcatactacctttaaatatgtagcattacaaaacaatactattactatggccttgatcatatttatttggtctttgttcagtttataactggcatgaatataatttgtttctggatagttttctccaggatgatgaatattatgcctttttggattgcaggtagggatgcagaattcatccttaggagtagtattagcaactgcacatttctcctcttccttggtcgccttgccagctgcactctccgctgtcatcatgaacataatgggtagcacattaggtcttgtatggcaatttatgacaccgcctgattcgaagaacgaaaaccgttgactcgcgtgatgtatgacctgctcctactttgtgtggttaatctcctgtcatagtctgctgtaagaaacattagaaacgttaaaaccatgccgtgtatatcctcaactttcagcccttcctgatgtcaacttgtcaagtagggattgtacatagttttggaatgttgattttctgaacttttgctgatatacagtctaaaatgcacatgtggccaaatccggaacactcaattgttgtctcgaggaataaacgaataatgcaaagaatttggtaatgtatgctgtgacaaaaaaaaaaaagagggaaaaaggaacaaagctctgagtcctctgccaaaaaaaaacagggaccactctgaatcatgtagcatgtgattctgtacaatattatgctttgagacagccatatgccatcagttttaaatccatgtatggttgtcaatgcactaggaagcagggtgcaatggcactggtcaaggacatgtaccagcattcatgctacttatgatagattatcaccaaacattgcatcaccccacatggagatgttgttggttggtgaggttcaaggaacccttggagcacatctctatcttgtttttatgtttccacacacaactttagatatgtttagtctgtatatgttgagctgagataactctactggaacagctgcagaaattttatttacattttaatatcagaatgattttcctttttttaatccatgttagtggctagcaactttgcatgataattgatatggtcagatttgaaaggaagctccagggcacatgttgtccagaagaagctaatcatgtgttgaatgagtcataaggtttttacaggtcagattctatcgaacatttctaggtgaaactcaaaatatgaaaaagtatgcaaaggaatatcaataccacctccgtcccaaaacgttactacctagtaatagatgctcatgtccagattcgtagtataggatgtgtcacatatagtagtactagataacaacatttcattttgagacaagtatagtagctgggatgggatgacctgatgacagtcttttacttgccttttcactctgtgtcactgatgggatcatgtgcagaaaggagtttagcattcattggtttggtccaacttgtgaaaaatgaacggatgcatgacaaatctttgtatagtgtatcccaataaatccatcactctactgttcccattaaaaatgaataatttaaaataaaatcgatgatctgacctgctgcattgcgtgcttgagcacccatatcttggttcattggttgctatcagcatccccggggcggctccagcatacagtcgaattttttcatttttaaatttttattttttaatatttacagaaatattgtaccggtgaaagtatttacaaaagtaggtgacgtgagggacggacaagatgaaaaagacactagaaaaatgcatttttggcaggataaaaattacatttgcccccttgcagtccttgtagagggcggcaaggcacctcagtgcaaaatgcacacaccttgccgccccaggggctatttctgtaaatattttagatggtataatatttttgtaaatattaaaaaatgaaaatttaaaaatgaaaaaaattcgcatacagtccgggtggtccaacctttgaccaccctggatcgcgaaggcccaaacgaaaaaaagcccacaagcatcagagccaggttagggttagccggcagaggagagggctcaaagccccgtgcacgcgccgcctctccctccgctgcgctcctcgcctcctctcggctctcgctctgcgccacaggcccacagcgccggccgtcgcccatcggcggcgtcgggtccctctccctcctgcagtcctgctcgagctcgacgacgacgacgagtctatgcctcaagccctaaacagctcctcataggtgagttactcattttagtctttactctttagtatttacttttaatagatcggtcatcgatgaattgaaaaatgtggatgaaaaaaatgtgattgaaaactgaaacttagattttttttttatcaacaacttagttagtagtcaatataacttagtgtatgaaggatgggaagaaactattgtttcattttgcaataaacatagtatccaagttccaactttcgatggaaaaatatgtgcctcatggaagatctccacggttttatccggaccaaacaaatgatgatcattttagaaaacaagtgtacattggtgtacaaagaagtagtgtattgtaatcttctacctatctattgtaatgtaagatatttgaattatttatgttgtaactttcgtaacttcgaacttaaatgttggttttaatcaatttgtgatgttctgagctatattgcaatatttgaattatatttccaccgtatttgtcaattttgatttgattttgtaacatcgtgacaatttgggatgccaagtaggaccacccaacgaatcgatcctagagccgccactgcatcgtctcctcgtccgccgccgccgccatgtgggcgctccgccgcgcgggcaaccccctcaggtacctacctacccccgcctcctctctctcccccgccctctgccactgttcttgtgggatttcgttaacagatgattgattggtaataaatctgtggcttatgttagttcgtgtcatccgtgcctttctcccactcgcgtttttctgtccctgttgcgtggtggcgacaagtagatccatccaaatgccttgtttagttcttgggggtttatttgtgtgattttccggtgccaagttgtgtggtgtccccgttaataggccgtagtttcttgttaagattgatcattgggtcttggatgagttgatcattgccagtgatttatttttacaggtggggagtagggagttgctggtattattcatctgatgttgggactctgttttgttgtaatctcttgaatttctatgcaaattgcagtcttaccatcttgggtttgactgaaatatatcagtcggatgtatgtgagagacatgatagtgtatctactgtgtgtatatgtgcttgaagaagtacccatcttagatgtttgtctatgtagacatgattattactttgcgtagcattatgtacggaacgatattagatgtgtttgaagatggaacaacacctcttcttgtttcaatcatctggtcatgttattgtgaaatgaagcagatattttgtatttcgttttgcatgtgaatccatgttcacgatcataatttgtacctatcatcccatgtttcatgcgttgttaatactgatatttggcttggctaactgtttgctgctgttttagggtccgtgcccaccaagctttgagtgcccgtggttgtgcaaaccttgaagtaattctaaatgcagatgcaaagaatgtggaagagcatcatgagggggactgtcagaaattggattgctgtcatcaaccaaagccattggtctgccaaccatcattctcatcaggccgtttcatgtggagtaggggtttctcttctcaggccggtgcaagttctggtgataagcaggatgagttggaggaagggttttctgatctggaggttccaccagaagctcataaaaaggatttagatttgacatccgatgagagttctgatgaggacaccattgatgcaattggcttgtctgaagtggaggctgatgcaaaacctgaggagccgataaagaagtcacaatccactcttcttaaggctttgctggaatctccaagggttgatgtcgctggagcattgaaaaaatggcttaatgatggcaatacattggatagaagtgagctcttttatgtccttcttattcttcggaggcggaagctctacatcaaagccttgcaggtgtttaacttggcctttacgtgttttattttttttcaatgatagcaagtcctttctgtacatttataattattgataatacatgtagcgactgttatgctcgttagcttggcatgtgttaagaatgttactttctgaaacatatttgcaatgtcaatggtgaatgagcttttggttttgcacataaatgaagagttatagccttgtaaaatgtagcatgcactagatgaggtaggggcactttagaatgatatgtctatatgcttcttcttcgagtcctagagtattaaaaaagaggaagtgatgaagtactcttagtcaactatgggaatgatgctagacagctagagggtgaagataagaagcacacacaatttccttgactattgaaaaatacaatgttgttgagatatcaccagttcaccccctgtacttctatgttacatcctaaacttaatttagtatgagaatgttattgtgactttgtagatcatgtgaatggtgtgcaaactgcatcttcttttctatagtatcagactctgaaatttgttagagtgcttgtgttggttttgtttgtcaaagggcgttgtctttttctgttcattccatgcacgttttgagtattactccatttctttgattccctctttatgctgcagcttttattgaccaccattttattttactgttaagcattccaagcatgtttaccccttaacatacatattgtgccatctgtgcttttaaacctttcgttgtaatactcatgtttggttatacatgatgtttgaaatagcgtagccatacttgtttctttttatgtgcaatctaatttgtgacatgatgaaatgaatgctacctttctttgtaaattactagctaaattgtgtgttcaactgtctatactcttatgtacaaaacaaattcttgtttgtaacttagtggaccattgtagctatctaatagatcttagtcatgcagctataactgtcttagataataacaaagccaccttgcttccgaatgcatttgtaccgctgcatggtaaattttcaaaatctcactattctttggttatttgtagctatacacggtgtttactttgatggaacttgttacgtaaacttttttcatgtgaacaacctcatatctaaacacttaagcttttttcactgtaattatttacctcggtctttgtgttttctaactcagaagatatttacttcattttctgcagcttctggagtatgttgaagaatccaaactaattgatcttggagaacgtgattatgcttcacgcgtggatttggtagctaaaacccacagtatttacaaagctgaaaagtacattgagaatgttcctgcatctcataggggtgagattgtatacaggactctttgggctaactgtgtggctatagccaatgtgaaaaaagca

SEQ ID NO: 14426 - DNA, 722 bp, Oryza sativa
ttatcatcagcaagagcaattaatattcagccatttccatttccaaaccatataaatgaggtagcccttgctagtatcagttgctttgcaaagctgctctgatcagaaatcccaatggcaatggagaagagccctcctccggcgccgcacttcctcttcgtggtgagcgggatacagggccacatcaacccggcgcgccgcctcgccgcgcgcctgatggcgtcggcgccggccgcgcgcgtcaccttctccaccgccgtctccgcgcaccgcctcatgttcccgtccctgccgtccccggccggcgaggacgtcgacgacaccggcgtcgcgtacgtcccgcactccgacggctacgacgacgggtacaagcccggggtgcacgcgagggacgactacatggcgcgcacccgcgccgcgggcaccgagtcgctctccgccatcgtcgcggctctcgcggcgagggggcgcccggtgacgtgcatcgtgtacacgttcctcgtggtttgggcccccgccgtggcgcgcgcgctggggatcccctcggcgatctactggatccagccggcggcggcgttcgccgtgtactaccactacttccatggccatggcgaggccctcgcctcctgcgcgaacgaccctgcccgcggcgccgtcgtgcgcctccccgggatgcccgttcctcaggtccgacgagctccctccgccgtgtccatcgtctc

SEQ ID NO: 14427 - DNA, 730 bp, Oryza sativa
atgagcttcttaccggtaacaaaccaaatgtctcttactttcgtgttttcggtagtaagtgctacattcttaataagaaggctagatcctcaaagtttgctcctaaagttgatgaggggttcttgcttgggcatgggtcaaatgaatgcgcataccgcgttttcaacaacacctccggtattgttgagatcgcgcgtgatgtgacatttgacgaaactaacggctctcaagtagagcaagtcgactcacatgtgttaggtgaagaggaggaccctagcgaagcaatcaaaagattggctcttggagacgtgcgtcctagggagccacaacaaggggcctcttcctcaacacaagtagagccacctacattaacccaagccgacaatccctccacttcaagcttggatcaaggtgaagaaggcgagcaagtgccaccctctccgataaatctagctcacccaagaatccaccaaagtatccaacgagatcaccccaccgacaacatcttaggagacatcaacaagggagtatccactcattctcgtattgcaaatttttgtgagcattactcgtttgtgtcttctattgaacctctaagggtggaagaagctcttaatgatccggattgggtgatggcgatgcaagaggagttgaacaatttcacccagaatgaagtgtggactttggtggagcgaccttggcaaaatgtgattggcacaaagtggatctt

SEQ ID NO: 14428 - DNA, 537 bp, Oryza sativa
atctccagatgaagatgccgggccccggtggccccatcaccgtccatggcgacctcaaagtcgcacttgcttgtatggagcagcgcgcgtaccacctcgccgcggcgtccaagcccacgggtggcgacgaaaggctcggcacctccgtccccgccgccccgaggcagcggatggtcacgtgcgacgaggtcccggtcaaggaggttgccctgggcgacggcccgtccaagaccacacgaatcggtggtcttctggacgataaataggaagacgcgctcgtctccttcctgcgggcaaatgccgacgtcttcgcctggagaccggcggacatgcccggggtccccagggaggtgattgagcaccgtctcgccgtgcggccgggcgcaaggccggtccggcagaaagtgtggcggcaggccccggaacgtcaagccttcatccgcgaggaggtggcgcgacttctggaggccggattcatacgtgaggtcatccatccggagtggctggcgaacccggtcgtcgttcccaaggcgaacg

SEQ ID NO: 14429 - DNA, 3743 bp, Oryza sativa
ttgaaacgtttatttgcctaacaaatccatctcccccttgtgtagatccaacatggaattgaggaagagcagatcttaatctcttttttgcactttttcctcttcctcttccatgcatgggaaatcccccaaattgtgagtggccagtgggtctggacagcctctgagatataggcttgttttgtgaatgcccataggttattgagttcgattgatgattgttttcctgatcttcatcagcccacccatcattgttgtcatctcgcaaagtaatccttgagaaaacattacgattgtttggtaaatcatatcttgcatcatatttgtcttggtcatcaaccatatcataaggctctgccattctctgaggtgataggtcatatgaatccacatcatcatcataatactcccgtcctagagggctatcatcagtttggtagtgttctgtcacatgatcacgatacatagccttccggggtcttcctctagaaaccacaggagaaacttcttggtcactaaactcatgggtatcatcaaatgaagaatacccatgttgaactgggtgtcttccaagtttaatacgctcagattcaggagaacgtgagtagcgcacatcagaattccttgtcctgcgatgacgtgttagtgcatctccacggtaagagtgctgcacatcacgctccatcccatcatgcatgccttggaaggtatcctcatcttctgccatcctaagtggcagcctcacttggtggtcaatcctttcatccttgcggccagtcaaagatgatgagccaaacatgcgcctgacactaggacttgaaacctgtgggccatttccatgtaagttctctggtggaagatatgcatttaccggatcccttcttacatattccatggacgcatctcttggagaatgattcgagtgtttctgtcttgtaatgtccaacaatatcttgccatcacgaccactgccatgctctaatggacttcctgagaatctgtgagcatggccacttacatgtcccagggtgtcatgagaaagcctgccaagttcctccatggcgtatccattggttggctcataactagttccatcatgcagtctgtaaggccgctccttggcaagcaaagatgaggaagaaccagcatatgcagatggcgcaaggtcagcaccaagtacacccttgctagggtaaagcctatccatttctccatccctttccagatgcaggcttctaccagcatagagcctgtcgatctctctttctctactcctctcaacatacgggtcatccaaacggtcacggtactgaaactcgccaccgccgtcaagcagcgacctgctacttcccgtgccaaagttctcgccggccttcatcgcggatccccctgtcaggaatccagtctctgcaggtggcactaaggtgtacagcggtggcgacgccactcgcactggtggaggtggcggccgtggtggcagcggcggcgacctcctgtccagatacagcgagctggtccttcccatctccgtcgaacaaacccggagtgtcatgccgggttccccgaagaactcaccgtccttcctcgcaggacgcagggatgacgggtggtcagggagcatgtagtctggcggcccgtcatacctcccgcgatcatcgccgcgatacggcggcggcgacctcccgcggggcgggtcgcggtcccggtcgtcgtcgcctcggcccctcgggcgtcccgccgcgtggcggtcacggtcacggtcgcggtgcggcgacggggtgcggcgcgggtggtagtccgggatgcggcggcggtcacgatacggcgacggggtgcggcgatgcggtggtcgcggcccggcgacggggtgcggcgggggcggtaatcacgggggcggcggtcgccgtgcctaaccctatcatcacgggggccgtccctgcccctgtcatcacgccgccgcgcgtcccggcgggggtggcctcccctacctccaggaccacctcctcctcctcctcctcctcctcctcctccgccgccgccgccgcctccccgccgcatgacggagacgcgcggcgacacagggatgggtgtggctgggtcagatctgggcccaccccgcgctgctccgacgcgggatggggatggcggtggtttcgattcgacggcgacggcggcggcgtcggcggcggcggcggcgaggggagtggggggagagggtgcatggggttcggcggcggcggttgggatggcaatttagggtgcagtggtgggccctcaagggctttgggctttggctgggcctactttgctgtttatgcacagactttttacgaattacagccctataataagaaagcaagggattattttatcctttttaacggccgttaaaaaacgcgaatataaaagaatggcctaatatcaaaaattagaagaggtgagtcttcgaactcagattttctagtccactaccttgtggagctagccggaagattcttgagtgtttctcatttgacaaccgttcaatttggttataaatattgatgtctacagtgatagtatttgataaaaaaaattgaaaactttaaaatcaataacttctcaagtagtactcagttgtatgttattttaaccatttcatactataatacgctttgactttataaaaaagttaacaacatttataacgtcagattagtttcactaaattcaacattgaaaatattttaatagtacgtttattttatgttgatagtgttactatgtttttaaattgaaaattttaaagcatcttatcatatgaaacagatgaataccaaatttccatgaagtttgatgttactatttgaatttcgagtaacaaaaatttgagttgacacgatgtgagcttaatttaaatggttagattctttatgcacacatgctcgtttttgtatcttgttagtattcattcagtggtaatactatcggcgttgtcatacgaatcatctgatcgttgcttttagttgtagtagtgctaacgggttaactcgtactccgtatgcagtaacttgtgtagcaacaattcccctgaatattgttccagatttctaataaccctacaacattcagaaacgaagccacgaccatttcaacatttgttccttattactgcaacaaatgcagagtggcatcatcacaagccatgcacccgcaaatcaaaaataaattaaggattcgtcatcacaagtcaatggatcagcttcagtatcatcaagaacaccacattttccccacatcgatcacatccattatcatcacacttctttcgctcaaaaatcatcagggagttgaaaagaagcatctgcagtgtgcatacatcgatcagcactgtaaactctcaaatcagttgatcagaatgtcatattactgccggcccagtctttcggaggtgctcataggggtagggtgtgcgtgtgtgcgttcataggggtgagtgtgcgcacgtttgtactatgtttctcaaaaaaaaaaaagaatgtcatattactgatgcacttaacctgatatttacagtgcatcagtaatcctgagtctcttctgatgcatttaacctgacgtactccctccgtcccaaaatataacaacgtttagcccttaggatttatcccaaaatataacaacttatcaaccaacattctcttctcaaccaattacaaccccccaccattcatttttctcacctacattcactactcatccaa

SEQ ID NO: 14430 - DNA, 8490 bp, Oryza sativa
agaagagagaaaagagaagagaaggagaagaaaagaggagataacggctgatatgtgggccccacgtacttttcttaatttttttactgactaggatgccacgtccgcaaaaccacccatatatactgccataggaccctgagtgcacggtttgtgtgagattaggggtacacatttatggttttgtggttaagggatttcaaaaaatctcgctgttaagttgaggacctccggtgaacttattccaatcggtaaccgcccccatggccaagtgggcttcatttgaggctcatttgtctccggcccggcccacttcccttcccatctcaccagtgacgtgcttcttcatcatccctatatttccccgacacttcccatcgagccgagcaaaagccctagctttcttatccggggaaagaaaaagaaaaaagaaaaaaccctagcgatcgatcttggcggcgaggcgagcgacaggggatggaggtggattcgggtcggaacgggaccggccacggccagatcgctggccccgacgaggagatccccgccggcggagacgcgaagaggtcgcgcgaggagggcggccgcaacaccaccaccacctgccaagaagacgaggacgaggacaacgactactacaacgacgactccaatttcctcgactcctaccgtaccacctgggccaccaactacggcaaaaacgacggatcctcctttgaggacgagagtgagtaacccccacttcttcttcttcattgcgcaccaatcacatctcatcatcttaatcttaaggacaattcattgcgcaccaatcacatctcatcatcttaatcttaaggacaatcttaaggacaagaagcccaaacaatttctttacaggcgtcatcttaatcttaaggacaagatttcgatatatggccatcaatttgctcatgtgcaaactagttttttttcccttcttttttgggcatactagtaagataaattttaaagtaaattgtactttggtccaccttttattacctaagtttcaatttggaccacccttaaacctatctttttaatttggaccgggtaaatttaccattgttgcggtttggactaccataaacaactttttctcatcatgtctaacttccctttcggcaaacatatgagctatacatagaggagttcggccgtgtactaaagctgatgtgtttaaggtcgctgattgtactgaaaaaaaaatcgttcatggtggtccaaatcgcaataatggcaaagtcatctggtccaaagtgaaaatatatgtttaagggtggttcaaagtgaaacttaggtaataaaatgtggcccaaagcgtaattcactctaaattttattaggcaaatggctccgttcgtttccacttaaaaaagtggattaagttttagatattcgtgacacgcttttcaaactgctaaacggtgcgtttcgtgcgaaaactttctatataaaagttgttctaaaatatcagattaatacatttttcaagtttgaaataattaaaactcaattaatcacacgttattaccacctcgttttgcgtgaaaaatttaatattcatcttcaggagattcaaacaccaccattgaccactctgctgtaagttaatctgagcgtacacaaacagtcctggtctgcactggatgtgtcaggaggaatgaggtcgcacgacagaatttcactatgaaattccacatggttcgagaaggtgctagacgcaaggtggtccatagggctaaactcttataacaaacctgtctagcgctttccaagcaattaacaagccttcttttttccaaaaagaaagtagaattatatcaatataaccagacaggacagctgcctagtgcacattcaaacacaaaatcacagtggacttttagaacactgaaattccattccatgtattcaataatgattcaactagtgctatatctatatgcctacagctgcaatccggcccatgcagcacactgatggacctgtgctgccgatatcctcgtggccaatggacgtgctacaaatattttcagtcaaggtgacagaggtcatggggaaccttgagtggccactgcgtgtctacggcatcgttgctgtccgtgactcgctggatcacaagaggaacgtcctcttccgccgcgacagggacgactgccagaccctcacctcgccacaggcaagcatcacattcaacgtatttatctttcccatgatttatactagtactagcttactcctctctttgatcataaatataagcacttttagaacaagccaaacctttttagttttgactgccaaattgttaaagagaacataatgatggatcacgtaagaaagatgttgctaggtttatcgttaaacaaattatcataagactctttttatttggaataatttatttttatagatacaggtcaaagtagcacattggaaaccgtgtctaagtccaaagtatttatatttgtaaacgcatggagtatttagttttatcagtctggcatcctttttaaaatggaggtaatagttagtatggttttatcggtctgaaattcggggtttgcatcctggatcacagttgttgcttatattttttgaactgaagatcaatgtgtaagatcagaatccagacatgatctgtatattgcttactgtgcatatatatttatgtgtgtttatgcatgtatatatacaggattcatctctgacgctcactggccctagccgtgccgtcgtgctgatcaaccctgtcatgttcgaggttgacctcaaggtgatcacccacaacaatagtggcttgccgttgtctgaatctgaagaggacgataaggtgctaagctacaacgccttcttctacgacggcgtagctcacatgaacaacactggcttcgcccggagatccgtcgagtcgacggagcactccacaatggagttcgtcttcgcacacctgatattcgccgtggaggccaccatcgcagttcgtgtcatcgaaggctcaaccgatttcagggcccgtctcaccgctcgcaccgctggcatcgatgaagacgtggtgctgctcgactccggtgacggcaaggtggcggtggtcaatgacgatgacgacagtggcccactcgtcgtgctgcagcggcgcgtcgtggtggtggaggagaagggaagcctgatccttggtgtggaggctgcagagattggcagcgaagagattgtgacgagacaggtggacatcaggcctaggcatgcgttgagaagcaggtgtggattcaatcttgggttctgcaggatgtcggtcatgatcgcctggtcagtgctaccttaattcatgtctcatgtgcattcaatgcttgactaatccatggctaactactacctttatgaggatgacacttagtactaattttaagcctctgtcaaattgcaagtactgctttgaactaattaagctagatgtgatgtgatgtgatggtgccgatggtttcttttgtacttgtgaagttgtgaccagccggttgatatacctttgttggcatttgtgtggcaatttcagttaatccatttgttgtttgcagtgcaatttttttcaggcgtacattaactatgaggtgttaagattttttttaggagctagatcagtgtgatcagtaacaaagtgtatgtagtttctcatttcctagtcgtattggcgattccgagaaccaattctactatatctgaatcccacaaatagagatgaatactctacattactagggatgaaactggttcggatagttccgtccgtccggaccttttttcggattcggatagtttcggtcggaactatccgaaaattctcggattcggaaacgaattcggattttttttctcggaaacgaaaacgaatacagtatgggtactatccgtcggaatcggaaaacggtcggaaactatctggaatttttttcggatatccgcagacattgagtaaattttagaaaaaacatgtatatatacataactttttcatacggaatcagatgaagacaaactttatatcaacattgtagagctcgatgagatctacaactttcatattgactattttattatttgaggttatttaagggtctaaatattcattataatataccatattaatttttacaaaatctcagatttacaattcaaacgatatctgatggagatgtgttccatatcaaagttgtagagctcaacgggatctaccactttgtagtttataacatttgtatttgaaagcatttaaagcataaaacaaatattgcaagtttcgaggatgtgaagtaaaataaataacatctccaatttatacaatggcaagtaagttatacatatagtaaaaggtcttgagaatagaaaatgataatcatatttgcatatggatctcttagaggaacaacaataaaaatcgatttttcacatacggttgtgagaccgtctacaaaattgatgatataattgttagcgatgtttaactaaaataataagtgatatctcttcctttatcaagaaactcaatttgaggggctttttatatatcggtaaatattcgctaccgtattcgttccgtctcgtattcgctccgtatctatattcgataatattcgatttcatttccgtatccgagttttcgattccgattccgattccgaaaaaaaatatgaaaacgaatatgataaagctagtttccatccgtttccgatccgttttcatccctatacattacttcgatagtgggtgattgctatttgagaaatgaaaccatgtttgtttctggtttgaatttttgagaactgattagacttaacaagttaaacaatctagcgcgtggttcagttcctcatctgaggagtggctattttaccggatgcagatgacagtgtcatctggcaaaaggatggtgatgtggtagaaagaagaaatatgaaaaattgttatatgtaaagtaattatctgggcttaaaataatttttcttgagttgatggtgtgtttgggttagttgggagtgcctgctgaattctccagggtgaaagtttgtgattcggaattctcaagtcggaaaaattgccaaaaggctagatttatcttattgaagtgatgtttctgttggaggaagaataacttcaattaattcattcatgcttgactagcattccaatgtaacacatgttaatgatccttttgcttataaatctttaattgactaagcttctggcttttctttgagagggtggtcaccctaaagaaaatatggcattttcagtgaaatgggaaaaggtgtttgcaaacccaagcattaagatggtccgcgtatcaaatcctttagactttcaaatatcaatttgctttgcaagtgttggtggaaattagaatgtgaacaaggattattatggccacaaattgttaagactaaatatttcgagggtgatttaactacttatatacctccacagctggatgattcctaaaggttagaaacaaatgttttgaaggcagaaaaatgcatcttggtagaattccagatcgttgtcaggtttgtggcatgggcaataccccgactatttatcatgttgatcattgcattactagaaaaaaaaatctctctgttggaagatggttaccagaagaacgttataaatgatgactttgaactttgcattcaactatcttcagaacgtttttttcccaacggatggctgcgtcgtaacaatcttgtactccctccggtcaaaattatttggagtttcagacaagaaaaattgcactaaatcactcactttttttttgttcctaaacgtcatataaaagctattggagggagagtacactcacaaaagagaaggcaatttattcaagaggaaatggaaggtggagaaatacagaaatgcctaatcttcatggacctctctcgattttatcttttttaggggaggttttattatcggttgatacgattctctgtctgaaaagaccatgactattcttcattccatgacctgaatagcaacagcaacccaagtgatgtactaacaattttgtgtagcaaataacttttttttgggcacccaaacaatcataatgcttgagtccagatatcaaatccagttagctgcctagctcgatacattgctttgttgagctcgtcgacgatttaagctgcactagatgtgcattcctgttaccagtaacatttcacatgtagtgcagtgcattttgtttcatgtcctcatctatattggagtaattaacaatgttatgatagagagctttcacaataaaattggtgacataaagatacccaactatagttatgttgcacatgagtttagttatttttgctttgcagcttcattggcgactcatatgtatccaggtacgtgatcaactgcagattcttcagaacaagcacagcagcaaatacccaaccgggaatacgatagtgtttttgacaggataactagacggagttgtaatactttctgccagatttgatgccaagtaacagtgttgctttgctgtcaatgtctgaataatgacttaatgagggcttagggacagggagactaagccagttcaactaagagcatttctgaatccatattacactgccagctacagctttgagcatttcagatgcacatgcataggcagccaatacattataacataatgactgactgcaggtgaacccaaatccgtatgtatgggattcattgttttctactggagaaaatccctaatagtgaaattgccatggatgtactgtactgttgcacaatgctccattgcttaatgtaaagggcgagatacaaaaggatcagactgaagatagccaaaatcaatctaggatgtcagataatcaggacatacttcattgcagaaacaaacattcgcgagaataaccacaacagcaaattaatgatcaacaaatgacgcatttaagaattcaaccataaacatctccactgaaaggtatgtgacattctatgatgataacagaaaacttttcataatcgaatagcaatttgctatgcattgaaggaactctacaaacgaaatcctctgttgactgaatctgctagtcatggataatagcattgtcaacctagttggaggaggtacggtatagcttgccgaaaacatggagaagggcaacgaccgcgaaaaacccgatgctcatgatcagaacagcattgggggacatcttgcacccagcagcctcttcagtgtagaactgaagcattgtgctggtgccacctctagcaccggcaccggcaccgccagtggttctgcgcctgcgcaagcttgcggcagctgctgcgctccctctggcagggccatcgccattagccggcatcttgttttagctctctgcaagggcaatacaggcttcaaagattagaatgacagcactagtggtatacacacaatgcaaagttcaataatcaaacatgttgcatcaataagttcaacaagaaattcagaagtacaggcacccatcatatgatggaagcacaaattgcagacgacagataggaaaggataacaatggcaaaaggctgaatataagaagtagaatctactcagtccccaaaggacatgagaccaataaacagttttctaatagactagctaaactgcatcttctaattgaatcgacactgtgagacttaggtggttttcgtttctattttacctcaatccccatcatcacgtctttcaaactactaaacaacacgtttcgtacgtacatataagttgctttgtaatatcaaacaaatccaacttttaagtttgtcataattaaaactcaacttcatcttcatcttcatcttcattagaaacgaacaccacttggatgacactatcaacaggcaacagagacatgaacaaatctacaaatgagccttatgcgatgcttcacttgtagttgtagcaccatatgcaagagatcacagagacaaagaagaagagctgaattatcgcggggatacgatacgcacgcagtaacgcggatcaggaattcaagtagtaacaacaagaacgaacagatcagagatccaaaccgttcatgaacgaggcggaaggaagatcaccgcccccataaatctcagaccaaaaaaaacaaaaaaaaaaggctcgggatctaacataacacgtcgctacgcaccacgcgtcagagatctaacatggcaagaacagatcgccctcggctcccaaccatccataaacatccatcagatcacacgtcctcccagaacgagcagagagaaggcggaagcgagcagatccgtaggaggagagcggaggagagggcacccagcatacaccgtaccttgcggcggcggcggcggcgacggcggcggaggaggattcgtggagggagtccggccgcagcagatgaaacggggaaggggagggaattggtgggggggggggggggg

SEQ ID NO: 14431 - DNA, 3642 bp, Oryza sativa
gcgatttagtgcaagaaataagtaaaccggtacatgaacttaacaatcacgtgcattttagtcaaaaaaaaaacactgatatatgtctttcattaatcctgatattataagcataactactagattgttggctcatggattcaatttcgtgtttcgccatgttcataacctgagacaattaatatgttgattagtcaaattgctcaaaaattatgttatttgcatgcacttacttttgataatcatatatcttttggtttcaaatcgatagattatttattattacaactaaccaattaaaagcaatacatataatacatgtagatctttatcaagatggcataaaaggtatggtgtggaatattttgatcttttaaccaaaatgcacgcactagccaagtttttacatctatatactcatttttaagtttttcactagattacacccacatactaagtttatataccgtagacgcagtttattactcaaaagagagtaaggagcaactatccacgttggaacatgtgacgtgcatatacccccggtccacgtcagcgtggaggacacgcgttacagatcttatccgctgtgggggtattgtcgtcgtgttaattgggtggtcgctttctggcactatttagtgatggctgattggtgctgattttcctttggtttagtacacccagatatatcaaacaaacggtgtgagctcaactgaatatagttttcaagctacctttttatttggtgccacaggatcgctgacgtgtacgtaatccgatactgacaccaacattatcaaattgtacatatgcctttgacaaaaagaaaattgtatatatgtgactcgtgctatggaaacatgatcaaattatcaagaattcttttttttttcgccagtccaaacagggcataaggttatttagtcgacttaggacctggttggagaaacttttggcagcggtagattttctcagaatcagaatcttccctgaacaatctaacttttcgttaagattctgaaaagttgtagttgtagaatccaatttttcaaaaatctaaataaggtagaaaacctagtttattcaaattttcagaagctgactaccaatcagctcttgtatcttaaactctctcaaaaggcatttaggcttgggccgagaagggtttttcaaattcgctccgattcgaattgtatctgggtactactttcattacccaacatatgaaatagacaaaatactttcattacacaacatatggggtgtttcaatctcacctcgtgactgacaagtagctgacctcaagacaaatgactgaaagaggccttccttggtgccatatatacagttcaaatgaagggggaaaatgaggatctggcatatgagatatgtgcatagtaaaaggacgggctcaacagaataagattgagacaggttgactcatttgctgaattcatggaggagctgaataatgtgaggaattgaatgagtagctgataagttgaatagctgatgctggccaatgtttacatgattgggaccatggtccaaaatccagcgtgtttactagctacaaggatatgaactcgaaagaaaatctctatttcagatttggtggtgtttggattcagggacttaactttaatctctgtatttagatactaatttagagtattaaatatagactacctacaaaactaattacataaatgaaagctaacttgcgagacaaattttttaagcctaattaatccataattagagaatgtttactgtagcatcacataggctaatcatagattaattaggcttatagattcgtctcgtgaattagtccaagattatggatgggttttattaatagtctacgcttaatatttataattagtgtccaaacatccgatgtgatagggacttaaaagttttagtcccatctaaacagggtcaatagacttattctatatggttacaagctacttatgccctagagattagggtgagttcgtttcagcattttggaccagttactttctcatttttcatgaaaaaaattttgtatagaagtttcttttaaaaaatcaaataaatctattttttaaatagtaataattaatagtcgattaattataggctaatggtttgcctcgtttcacgtgccggcgaaaattataagcactgaagcgaactcagcctaagaaaacgtagggaggctcttgattaagcaagatacgaggttgttacacattttctgctcttgttaaactctatttgctagaatttacattatatgaatatgtgattctctgaaccaaatcgctagtaatttaattatgtacatttttcagcatttatggagattattatgatatgtactcccttgattttaaaatagttttgttatcggtttgttttaacttaaatatatctatatttgaccatcaatttttataaatccgtatagtttagtatcgtaagatttataattttttacaaaatttttttttcgtaatatacactctttcctgtcgcctcctggaccagaatgaaggtctttgttaagttttcacacaaaaattttaaatcatgtcacatcgaacgtttgaatacctgtatgaagtattaaatataggctaaaaaaataaccaattgcacatattacgactaatttgcgagacgaatcttttaaacctaattgctccataatatttgacaatgtgttgctatagtaaatatttgctaatgacagattacttaagcttaataaattcttctcgctgtttactgacgaattctgtaattagcttttttattaatgcccaaacacaccatacgacaccctatataataactgatgtgatatgaaaaaaaaaactttacaccctcgtctaaacacccccgaaatatttggctgtagcagcaggatggaggcaatgcggcagtgatgatatattgataatttgatgtggatatgagttgcagaggttgcagcagtggcagtggtagtagctgctagccaatgggccacgcaggaaatccacctttgcatgcaatgcaatgcgtatttgcgtttgtttttgtgtgtgtgggtgtgggtctcccagaatcgaatcacttttcaatgataagaccactgcatccattcattcattctttgattttaatttccacacgcgcatttggacaggccaacaattttgactctccttgctgatctcttttaagtaattggttttctctttgcatagaggttggtaaaataataggtttttcttcccatgaattaataatttttagtagcctttaaaatcaaatgtttggatttagttgaagaaagtctggctctacaaagtagtccttagtagtcgctgtcgagtaggtttccttaccgttcgcggtttcaattatggtcctgttcttttctccaacaagatttgaatgaagattaaaattttcgtggcacgctttttaaactgttaaacagtacgtttcgtgtgaaaactttctatatgaaagttgctctaaaataccatattaatatatttttcaagtctgtaataattaaaattcaatcaatcatacgttaataccacctcattttgcgcaaaaaactaattttcatcttaaaaaaaaagcaccacc

SEQ ID NO: 14432 - DNA, 4325 bp, Oryza sativa
aggaaacatgccatggataatcttcatcggctcataaacattcgaacagggattaatattatttattaatcacgaagtactacttgacattgacgataaccctactacatactccctccgtcccaaaaaaaaaggcaaacccgcggtttgcgtgccaacgtttgactgtccgtcttatatgaaatttttttataattagtattttcattgttgttagatgataaaacatgatgaatactttatgcgtgacttatctttttaatttttttcataatttttttaaataagacggacggtcaaacattggacatggaaaccagggtttgtcttttttttttgggacagagggagtagtacaatattatacttatcgatcttgaactagtgaatgtgtacaaagaaagtggcacccaccctagctttgaaggggaagaagagaaggaaaaaagaagacgtttgccatgaatacccgtgcctagtcctctcgggccaagaggcaaccgttgctcgaaaagcctgtcagtggctggcactgcagtgcaccggtgcaaacaacaattcaaagctttggttgcttggttgatgccatctactgtactactcttctccacttaatctcatcaatggcagcagcacacgagaatggcaactattacagaacagtgttattgtagcagcaacagaaattcgtattgcgtagaaatagcaaaaggggttggttgtttctgcacattcaaggcacagattattctggtactgacacagctggggacagacaaaatagaagtactaccataacaatccagttccagcttagcaaatttctatgccatgatagatgtcaattttcaggcatggaaattggcaggaagcattttcatgctgcaatcttagattaccaatacagtaacagtgtaacacccctattaaccgcactctgttctgatgcccaacagtgttaaaagatggtcttaaactcttagtacatattagcaacagtaatgaggcacaagtttcacaactttgtggccttcagatgctctttcagtgagagcacatctctggccagtaatcaaccattttcattccatcattttccatcccaacacttccaaacaaaaatgatatcacggagacttaacataagaatcatgtgtgcatgtggcattcatttgatcacgcatcatctggaaaatatcacaactccaatttgaaggtgcaggagaaagaaaacgattaaatgacagaaaactagaatataaaagctcaagggcttggataaattgcattaaggttcaaccgtagcagtataatggattccaaggttgcagccacgtggtcgagcagcgatacaatttaagcaaaaagtaggataacttgatctgttcaactagccgcagtaaacctagcctagattaatttgttgctgttacttcacgaatccaagttcagtgtagcatctgctttagcctcaatgtcattcttgctcctgaccaggcatctcttctttgtttcctcatccaggtagcccaagtcttcggcgactgcaatatgcgcatatagcaactcctcgagttcatcaacaggagcatccttcttacctttgccacctttgatatgctggaactcttccttcccgtggcttttgacggtgaaatgctcgtggattctcatcgcctcctgaaatccagatatcgttggaagaaacttcactaggaacacgctctgattggctggtctgccatggctaatctttgccttgtcacatgcaaccccaatttctggatacagaagaaaatatcaacttaagggacactaagaataacgcatgagggcattttcaaaactcaacattatattttgtgccagaaactgcagatatacaacaccaagcattcctcttatccaaaagtactaacagattatatctagaagggaaaagcagttacatgatttcacactgtatcagctgatcttataaaaaattctaacagattatagccataaatgaagatgcatactagttcaaggaagcgtgcgaccaaaaaaatggtttgttcgagctagatagccacgatccttaggttgaatatctccagggacaaacaaataaaagggggactgatagaatgtaaattatattgggactaaatgaattactaacctgtcagcacaccttcaatttcttctttcgacacaatctttgcatcggtagcctttgccttggttgcaatggagctgttatgtattatgacaactggtggccacaacatgagatcatccttcatggcatttacttcctcatctggcatggaatgataggttttggtagtgtcaggagcaacatgccaattccatcccatcataacacagagtgccttgtgaaaccccaaatgttttgtcttcaaacccattttgcatgtatcataagcatgtgatatcaaggcatcgatgtccggaaacttccttgggacactgttatgcgaaagaagtgaacaaaaaagaaaacaaataaacaaagcagttcttcaggttagacatccaatgtaaatgttcaatgaaatcagaattctacgacacaagaaatatggtatccattatgcttttgagtgcagtataatgtatgacaaattgtaatgaattcagaagggtttatgcagaacatgctgtggcttctgtgcagcagacgaaaacatagtggaaaagaaaagagtatataagaaatagcaatgcaaatattccaaatatttagtatccctaaacaaaataaatggttaggaacagcaaaaacatcagccaaacaaattgttgcaactaagatggtaaaggtggaaaactatacagaattgaagatactttaccttcagctatctcaagaaatgaaatgcagtactgttgattcatgcacccagcaaaaacaaactgttgcttcatgcaataaattttaatagaagtctaaagcttaaaataaaccaaaaaaggatgacacataacaaactccaagaaagcaaagatcaacgatatctgatttgaacaagaaaaataaaccaagtgtttaaggtttgttgtatgcttagcaaccagaagagtaataaaacaaagttgaaacaaagctaaaagttaaaaaaaataaacattaagtcacttaactggcaaaaacttctgtagtaattggtacttcaataaaaagtaatattcaatatagagattccaatttaattaggactaggaagatgtcaaggcataaataatggcaatttctgatacctaccaaaggctacagatatgaaatgaaatcccaatccatatgaagcttatcagcgctatactaatgctcatattgtaaacagtaggaattgactaatgcaaatgcaaaagtgaattttcaagcataaattactcaccaggatggaaagagcaaaatagaagataacaaaatatgcagcatgtactgtgtacccgaaatacccaacatcaaatgcagcaattggttcaacctacagtctctactctctagccagaatataaaaaagtgacatgctgtaatactgcaagagccgatgctattggtttgtgtcttagttcgcaaactaacacatgttatccatcagccttaacgacttggcaagcgttgaatgcccttgaaaaaagacataacaattctgcctgattaaggaaacacaagtttttgtgccttccatgtgtttgattatggtaatccaaagaatcataacagcaatttggtttgtatgctcctgacctcaacaggatacaaacttggctgccccagacccagatactagcaaccaaaagcaacaatcagtcaacagaaccatatttcacttgtacactcttcatgtcatcttgtcctgataaatccttgcaatgcattagtccacagaatgtacatcactattggctgtggcattagggaagattgtcaaatggtcaactcatataacagaccattgctgcactgatcaaaatctttggcatctatctctcagtgcctgaagctgataaaaaatgccaacatgcggtagtttattgcctgactcttgattgaaccatgaacagacaatcttggcagtaactctacatgaaatttcctcaaaatcatcccgccacatactaccctatcgtccgatttcaccctaacagtaccatatacaagaaataacttgacctataattaaactagaaggttaacttctatgcgctgtgtggagggcacctaaagtttctcgtagaaccatgtggaagtcaagtaccataaaattcataatatgatttagctattgtaacctaaactacaagatcgaggg

SEQ ID NO: 14433 - DNA, 651 bp, Oryza sativa
gcgtacggcccatagtactgatgggagttcttcgacccattttttgtcgtgtgacatgagcctgtcgtagacgcgggttttgatcccttgtagtactatgccgtttgccctctcgacttgtccgttgctttgagggtgagagatcgaggcgaagcatatcttgattcccagcccgatgcagtaatcctggaaatcggtgctgatgaactgggagccgttgtcggctatgatgcggtgcgatagtccgtatctgcaaaatatccccttgatgaatttgatggcgttgtcggccttgatttccctcgtgggtactgcttcgatctacttagtgaatttgtcgatcgccacgaataggaacctgtaaccgccctgtcatcgtgggaatggcccgagtatatctagcgcccagcacgagaatggccaagtaagagggatagtctggagcacttgcgcgggtagctttgtgtgtttactgtggaattgacaggcttcacatcgctggaccatgtcgcatgcatctttgagggcgattggccagaaaaacccttgtcgaaaagctttcccgaccaatgtccgaccggcggcatgtgacccatagatgccttcatgtatatcaaggaagaggtgtctgccgtcgtcggacgagacgca

SEQ ID NO: 14434 - DNA, 17092 bp, Oryza sativa
cgataaccccttgtcgcatgctaaggtaaacccaattgtctaccctagatactctctcgatatcatagagttgcatacttatatcatatcatagagttgcatacttatatccaaccgctagtcaattcattctaaagcaacttcctccgttctcaaataactcataccatcactatttaaatttaaactttggtccatgtttttttaagaaaaaaactataaaatatgctacgtatattattaaagtgtgtactatcacagatagacccatataccttccatccatcgtaatctaaacatttaaaagtaatttgtagaaaggaaagggtataaaatttttcactatactgaaagaagtcagcaaagacagtgcagcgttacaaaccagcttggacagtgtctgaaagagatctcaattatgggataagcaatcagctggttgctgtcatcgacggtgtagacgcaaaatactcatcctaaaaccatactaacaaaatgaaaaataaaaaaagtaattttctgtagcaaaaccaaacaaatatctgggccaacaaacaggctacgccattggatatgcctcgagatccacgcggcagcagtatagcacagtagcagcaacagagagagcagagcagcagcaaactgaaagctgacgcgacaggcaataattaaagggataaaccaacttgtgttaccacccattccagataacgacgccctttcctctgttaattaatccaatcacccgtgaaaacgccatctctctctctaatgaaatagtacagtacaccctccatctcttaataagtgtgattttgatattttgcttatattgttttgccattgtcttgttcaaaaaaattttagaattattatttgtgacttattatccaaagtactttaaacacaactttttatttttatatttatataaatttttaaataaaacgagtggtcaaacagcaagcaaaatatcaaaatcccttatattagaggagtgagggagtacattatactagtcctagtactataaataattttctgattttctcacccattttttaaaagctcttttgtctctgtaccattgcatcaccaccgaattatcttcactgacatgctttgctgatctcttcattaggtttgcttgcttttccaccctttttttattttgattaatttggtatcctttttagtaatatcttgtgtgtggggtttgccattcatgattcaagtagagatgtgatgaccaagccctgaaaaactttgggagtgtgtctacttgtgtgaaagagatccatcatctccaatgcatgaataggaatagcaaaatgaatcatttctatttggccaacccataaaagccctaaattagctcatctcattctactaacagaggtgctaggacaagggggacattatccacaatgttctctctttgttcatatctcggaatttatagtttttgtgaaattccggcgcaccaaacaaggtaatcaagtcttgtaaaacaccctttggtaatatttttaaaagcttattcactttattatccttttcagcatgcaaataaactaaatatgatcttagcaatgccatagttccggaacttttctctcataaaagtgctatcaaattttacaaaggcgtcaaactaaatacattcaacgctatcaaaatttgacaaggttgatttggctacaaagtgaacaaaccctaaaaaaatgttatagtagctgggataaaaatccaccaggtgaactacaattaaacaaagatattgagatagtagtacatgcaaatattgtttcagtaaccacagaaaagaatggaaattgctgataatgtttgctgccatacaagataggagtagtaatactaaacagtgacatcacaagacaaaggagtagtagatcccaaggtgataagcacaagatcattgccatgtagagcaacacggttgtgtttagttcagcgtaaagtttagtttagattttaattgaaattggagatgatatgactgaaaagttgtgtgtgtatgataggttgatgtgatgaaaaaggaccaaagtttggatccaaattttggatctaaacataaacacagccacaggcacactgaaaaaataaaattaagagagagagagagatatacactagtactagtagaacacacatggaaagaatgaaaaataaactagaattaattaacagtgcaacagcataaatcaagatgatcaactgtacaaatcctccccttctctctcaaactccttttttcttggccctcctaatttggacccactactaatcatcatcaaacacccgtctcaacaagacaaatggttcttgaatcttgatagatcaatccaaaaaaaaaaacaaacaatacaaaaataaaaacaatacccccaaaaaaatttaattaacaaggctaattgaactagcaagaagtgttgctcttgcattgcattgcattggcttctcttggctttgctcaacataagctttgtcttgctctgcttcttgcacaaattgacactagtgtagtgatccattttcttgattgattcctcctttgcccaatccaatggcagcaaaagaagttctaaaccctaaggtgatgcttgcttctaaaccactagcaccattaccaagatatgaatggacgatcatggcgaattcagaggtgatggtgatggtgcgagcttactgcgagctgttgttgttgttgttgtttgcgccgccgttgtcttcgtcgccgctgtcgtcgccgtcatcgtcgtcgtcgtcgttgcggccctgctggtccatctccggttgctgctgcggctgctggtctccggcgccgccgcggttgtacgcattgagcgcggcgagcatgccgaggttggtgtccgacatgccggcgccggcgctgccggggtagttgacacgcgtcgacatgaactggagcggcgcctgcaccgtggcggcgccgccgccgccgccggcgaaggaccacatgggctgctcggtggggcgcgcggcagcggccgagctggcggacaccggcagcatccagaacgcgccgccgggcgccgcggtgttcggcgcgacggcccacattgccgccgccgcggcggcggccgccgccgcctgcggcgtcgtcggctgctgctcgcgcgccttgggcgcgctgggatcttggcggtcgtcgtcttcttgaagaggtcctccctgtatcgcttcctcatgaacgcgcccgcgccgccgggatcctggggcgactcctgctgctgctgcggcggcgggaggaggtggtggtggtagccgagcatggcggacacgtcgtgctgctggtggtgcgggtgaagagccagcgccgggaagggggaggcgcggttggggttggaggcggaggaggcggaggcggcgccggagcggatggagatgttgagagaggagaagttggccgggatggtgcccgtgccggtcgccgcgatgatggccggctccgcctgctgcagcagccactcgatggtctcgccgtcggacttgtgccccagctcccgcgtcagctggaacacccgcgccgcgcacagcgccggcatccgtatcctcctccccctcccatccaccttcgtgtgccggtccttcgacggccgcttcgccagcgtcgtcgtcgccgccgcccccgccgccgccggggtcgtcggcgccaccaccttcttctccccaccaccagacgacccctgcggctgctcagcgaccaccggcgttatcgccagcgcgcccatgaacgtctgctgctgctgctgcgccgccgccgccgccgcggcggcggcagccggaccggagtagtagaacgggtggtgcgggtggttctccctgccaccaccaccaccaccgccgccgctccctccaccaatattactgctcgacggcgccgctcccccaccaccgccgccgccgccatggtccatcctcccaagaaaccaagaaaccgccgccacccaagcccgcaagtggaaaatacggcgagtccttccgccgcacgggtggtccgagtggtcgccggagttggaggcctccgggaacacgtggaggacacggtggtggtggccggagatggggctggggggggggggtggtggtggccgccggtggggttggagaggagaggagggaggagagagaaagagagagagacagggagaggtggggttgcctacttactcacctatggttattgttttatttatggagccatttcttttcttcatttttttacacactctctgtatatatgggcatgttttatttatagatctccagtaaaaattttcaccctatcacatcgaatgtttggtcatatacatagagtattaaatatagacgaaaaattaattacacagattatttgtaatttgtgattcaaatcttttaagcctaattactccacaatctgacaatgtggtgctatagtaaacatttgctaataacggattaattaggcttaataaattcgtctagcagataataggcagaatttgtaattttattttgttattagtttatgtttaatactttaaatgtgtatatgtatatccgatataacacgccgaaatttttcatcttggatctaaacacaacctatatatgcaaattccataaacgctagagaagatattgggcaccctgctagtgtagcgtcccctctccttttcactttccacttttgttgcctcacaaaaatttcaagttttccctttgattggggtgagcaaaactgctagaaagttctgatgttgaataaacattggtgaagatcatcatgcaaatggaattttgaaaaaaaatgcttgagcttatcgaaatgtcatctggtagattattggcgtatcgacgtagatgacgacgtattaacttgagggcggatcaatacgaccggagaagacatctacgcggaagcgatctgttccattgattttaatggtaagatgaaacatataattcagtaacaataattatcccaagctacaaatgtctcatgcgggacattaaattctatcacaaaatacgaaatggcatgtagtatagtggttataaaagcctaagtacattttaggtcgtgggttcgacttcctacaggagcaaatttatgatttaacctttcagtggtaggcgacgtattcgtcgacagcgaggcacatgtggtgacttcgtcaatcttaaggatttgccgatccagtcttcgaagatgctcatagggttgagtgtgcgtgtgttgtgagtgtctgcgttgtactttgtaatttaaaaaaaaatctatcacaaaattactcgttgttcttttgacatggcttgatgaaaagaactcgaagcgaagcactatatatgaatatgccatttcattacaagtatatgctttgtctccatgatcaatcatgtacagagtaaaacgatttcaatcgtttgcttttagaagctatcaacatgaatttgagatctcatccatcttgatctcgagttcgatgcataatgctccttgaataaattccttctaccatataaccagattggcagcaacaataacctactatatccacttgaattcaacatcacattcactccgatctcctgttggatccatcacaccccttataaacaagtttctcttaactcatatccagacagacaccaacaattacctactaaacactaaaaaggatataattaaaaaaaagatgggtgtcatagcataataccaagtgtcaacctaaatgttgccaaactgacagcatcttgtcttaaaaccaaaacatccacacgtgtaaatataatccatctcaaagaattttttttgaaattccaatgggtgtattgggtgtggtggcagtgtcactttttcgtccctctctttttcaacttttttttgaaggggtccttttctaattatttggagagaagagagcggcagagaagtaggccactcgtgggtcctcggaatgatggacgaacccaaagacgagagagcgcgaaaagcctctgcaaaagaaaccccacatgcgcccaacactgcacataccacccccatatttcattgaatttcaacacaaatttttcttttgagggaaatttcaacacaaaattgaacaggggtgcatggtgatttattttttgccttattttgtttgtgattggatgttgaaacaggttgtccttttttttatcataatgattggtcacaaatataggaatgtaataatgggaaatatggttgtgaagcatgtgttattatagccatcgagtaatagcgatggtctgtcatttttttgcacgaggcttattatcaatgattcattagttattatatgtgctactggattggttttttttttctttcttgctgcgaagtggtctataataatgatgagataattgggttttaagcttcgtataatggatttttcgtttttatgtgggctctctttttaccaatagcaagctatgacaatcatgtgggtgtgaccttgctgttttatatacagttcagtaacctaaaatatccagatcttacaatgcacacggcgttagagcctaagtattttaaaactactacaatgttgcactattagcattgtttgccttttgaattataattgaatcatgtaaagctaagagttgaaagcatggaccaataagtggcacttagatggagggggtggctttttgtaacttttgcatgattgagtgggggtgttttcttgtgtaggaatgaggggggaagtgaagccaagggagacactgcaggtggagggtgtcagagaggggagcatcccaacagcaccaaccatggcctctctctccctctccttttcccccctttctctctcctctcttcttggctcttgctgcctgtactcctctactctacagcctacagcatccatttatcacaataaataatcccatccaataatttatcatggacaaaatcaccaattatccctaaaaataaaggcctcaatttgcataaccactggttgtgcactgggaaaaaattaaaaataatactagtagccagagaaaggaacatctgtgaccagtgagtataacagggttatctcaagtatctatacactttatgcaatataatgataaagaaactgatcacacagaatgtcttttacctgcacataacatggcagaatataaaattgcagggaatatatattttaaaaatccacccatgaggcagataaaagaaatggaattccaattaaacaaagagctgggacaggtaggggaaaggtctcctgccagtcaactccaggctggcccaccagcctccttcaaattaaataataattccatgttggttccaaaaggagagatatttttttaaaaaaaaactgaaaaatatacttaactgatcagcagtttcatacacagagtgtcagcttggcgtcttcccaaattgccatgattagggtaacagtatggaattgggtatgcaatgtgagaggtgattatccaccccatgctacaccaaagtgggactgatcattcattcctagctgcaggcagtgtcttgcaccttcgtcggttatccatattttttaataagctaaaacaatatattagataagaaaaatttatttctaggcaaaactttaatatacgtgtttctagcaacttaaaaaccaatgctaaaaacaaattgcattgaaaatattttaaaatcaactttaaaattaagtttgaaaaattatcccaaaactataaatttaagctacgtatcttataactacagatttaataataaaactatcataaaactacagattttagggtttaaatcatgagcactaatgtttgagttatcaacattcaagttttgtgcttaatttggcactaaacacttagttttactataactttgttactaaacctatagttttacgatactccaatttaaatttgtatacatatgataaatttagtgttaagtctatagttttgtgatacttcatcttaaatttatagttttgcgatagtttgagtaatatatctgtagttttatgaaatttacttaaaattaattataaagtcacatctaaacaaacgctcgtaggcatactaaagagaaggtttagccaattactctatctattttcgaataatcagcacaatagactacaccgtttcactttaaatatagtttacttttaaatgattatattatgatgaataaagtgtatggtctatttattacactataaactacgataatataccacatttttaattattccaaacttcctttgaaaagataagatgtcaaagtttacaattgacactcagaacccgtttgagttcactgaagatggagattaaatacagacacgcaaaacggagatgttattagtttaagtttaaacttaaagttagatttatcttaatatttgaaagcaatttttatataaaaagttttcgcacggaatatattgtttagcgatttgaaagcatatcaatcaatataaactaagataatatatgcatcttattcagaaaagaaccccaatgtaattatttcaggacagatgggtaccttatttcccttttttaattactgcataaatgccagcacagctgagttgatgatccaagccaggctagccagtcaaagaggaggtcaacgtccacattgcactggtacatggtacacgtctcaccagacatagcagtgttggccaagcttcccagtatgaacgaacacactctcttgttgacccgggttgctaagggcatgtataatggtagccacaagtaattgtggtctcgagacgccacgtaggatagaatcacagaaaggtcacactacccacagtggaaaccactctaaaactttttttatgtcagcccttgtattatcaaacctattgaaactttatattttgaaccctatagtaaaaaaaagtatatgtacacccctaaataacttgggacccactgtcagcctcttcccatccattctcttttttattcccctctctctctcttcgatttcttctccaacgaggcaccaacagcgtcgctcggttctcttctcctctcccctccctcctcgtcggcttctcccctcccctcgctgctctcttctcctctcccctccctctgcctccggcggcagatcggcgccgatcgagctctggcggcgatggatctagcgaagacggggagcatcggtggcggcggcggcggatctggcggcggcaggaggcagtggtggcggcgggctcgccggatctggcggtggcggccacaacgcgactgtggttccttgacgccgccgtcctcctccccccacgacggtgcgaacgagctcgccgacggcgtggcgagcttggtggcggcgggctcgccgaatcgaggcgtgggctcgccggatctggcggcagggagcagcgacgacggggaagcggcggcggcggatccggcggcggcgagcagcgaagacggcgaagcggcgcggcggatctaggggcggtggctggggagcagcgacgacgaccacggcggctgcggcggtgtggacccccgtttttataacaggaatcaatcgtgtaaacagtaccatttccctggatcaagtagtttggtacacacgaattcatagctggaatatcaagtgcacatacacgagtgtctaatacgaattattacatcataggcccgcaggcatagtcttaaatcatcggaccgagaggtccggaatacatccaaaagcagaaatagataaggcagcggaattcaggctgcggcatgccattgccacaggcaacgaccgtactaagacctactggacgccatcgtcttcatctccctcctgatagtaggcatagggatcctccgaggcttcatctcccgcttctgataaattttatatttgcaaggatgagtaccaaccgtactcagcaagccaccacagcaacaatgcatatgaaagggggagttcaaaggatggccatagttcttttgcgcaaagcaagttttgtaattcttttcacaagcctaagacctagcattgactgatcaaattttagtaccagagtttgtatttaaacaacgacggttctgtccaccatccattgtgatcccaaggatagcttcccgccattgattcgtcatggttttctgaggacgtccaccttcctgcctctcaggaagtggctccaacagcataaaattgatcatgcaatatcccctcccacacaagttaagaatttagagtctagccaagtgtaatacatgtcccggtgctcaataaccgcgagcacggctattcgaatagatttggtttactcacactgcagtggatgtacactttacccgcactccgcgactgcccaacacatgagcctcgtcccaacacatgagacgcgtcacggcaaagcttttcgataacctcgcattggcagtacccgctccatgaacttttcatcctcatgcactctaggcgtacacggtttctagcagtgagaggagttctggcgcacccgggaagggaagactcacacatgcattaagttataattatgttttagattctcacatggcagtcctaccgatggcgacaccactgtagacacccgcctcgcggtcctaccaatggctgccccaccgtagagcccctgcctcacacatcaagaaaccactatgcatagatactgcctccgctcagctatctactccgctaggtctatacccatacgagaagtgcggttatacgggggtcatttcatgcttaacttcatggctcggtccttaattgaccagggacggcactagccttttccggacaccacccaagtcctccagccgccccagtcgaaaacagttgttttactttattttcctttcacaaatcatgtcatcaatatcatggcaatgtggcgctcatgtctccacatgccgcatctcaattaccttcccaaaggtaattgcccaagcatatagcatttgataaatatgagtatgcatgaatctaaaatagcatttctaagcaagtgtcatagttgactagggactcgtacgtatctatggttacaaagatttaaaggtgaacaataatcaaggcatggtataatcacaagtaggatgttcataattgcatgcaattttatttgtaaacaaaacaatttcgcaattgggatcaacatgttcaaagaatagtgatgacttgccttgctcgaggtcttgtgagtcttggccttcacttggatccgcggctccctcggtctctatagttacgtgcgtaagaacaatttgaattcgattagaattcaaacaaaatccaaataataaccgaattgaaaaacgagcgcgggagatgaattctatataggctacttaattcgcgaggtggaattatttttctccctaagatattttgtaatttatagtcatgtcctaagactcatcgaattattgagttcttaatcacatgtaaattattaccgcgaaattgatttcttagggagattactaaaaataatctataatctataggaattcatccaattatattttcattaatcctatatttaaatgctagtatttttggtatttaattagtaagaattcatctaactatattcattaatcctataattaaattctaatatttgcaaatattttaaatttcccccttaaattttccctttcttttctctctttctcttttcttttcttttcttttctctccctctattttcttttcttttctctcttttctctccctctctcttttcttttcttcttcctcctcccggctcccccccttcttcttcctctctcggctctggctctcccggcgacgacggcaatagacgcgaggagggggcggcttacctacggcggcggctgcgacagcggcggcgtcgacggcggcgacagcggcgcgagtcgcggcgcggcgtggcggctctaaggtggcggcgcggcggcacggcgacggcggcacatggggaaagggaaaggggaggggaagatgggggaagtgtgtgtggggaggcttggggatggagggagggcttatatagggcgcgggagaggggcggcggcctcatggcgttggcggggtggcgcggcgcggggctcgacgcggcgatgtgacgactacgcggcgcggcagggcgcggggcgcgaggcggcgacgcgacggcgtaccgcgcggcggggcagccgcacgagaggcgagcggcgagcggggcgcggggctcgaagcggcgacacgacggcgtaccgcgcggcggggtagcggcacgagaggcgagcggcgagcggggcgcggggctcgaagcggcgacgcgacggcgtaccgcgcggcggggtagcggcacgaggctcgaagcggcgcgcggggcgcgaggcgcaggcgcgcggcgcgaggcggcgacgcgacatctgcgcggcgcagcagcggcgacgcgacggcgatgggacggcggcgcggcgacgggacggcgcggcagcggtggtgcgcggcgcgaggcgcggggcgcgggcgcggcgacacgacggccaggcggcgatggcgatgggacggcgcgcggcggcttaatggcgatgcgacagcggcgcacggggctcgggacgacggcgacgcgcggacgacgacgcgacgggcggcggcggggcgcgtgggcgcgcggggcgacgagatggctgcgcggcgcggcagcggcgaagtgacggcgcgcggcggctcggggtgcgaggcgacgtgacggcgcgcggcgcggcagcggcgacgcgacgggcggcggcggcgcggggcgcaaggccggctagggcgccgggcgcgcggcgcgcgggcgcgacggcgacgggacagagggggcagagctaggggacgcactcgagcacctagcgggcaatgaatagtgacttttcctattgatcccgattttaatttatttcccatataaatttgattctataattcctaattttacatatatgcattttactcaatatgtgtattatcccaaccaatggatccacccctgattaattttacccatattttatttttatataattttcttgaatttaattagagttaattcttattcctacatttttaaattgaattgatacaaatatgatcgtgataatattttatttattactgtccacaccaaatcttattttaaattgcactttaattatttactttgtccatttattttttttttgggtttattcctaaccaattatccattattcgcgatttataaactccaaacccaactccaataaaataatcgaataaaatcggcatgatgcaatttatttaaaaagtttttgaaaatccgtatttttagagttttgatattttgtcggtcgaattttcagggtgttacaggcggatttggtgaggcgacgacgaccacgacatgaggagaccggacgaggaaatgcgcggggcgccgactcctccaacgcgaggcttcggcttgtggcttcgcggttcccgaacctaggcgtggcgcttgcaccggttcctctgcaagctcactgacagcctgcgagaccacccaaactcgtgccagctcggctcggctacgacgtggacctgcaagaccacaggccaggtcacgtgttgtacatggcctaaatgactaacatctggatcttctgaatgttggctgtgtacaccttaaaaggtgtagaggccaggttaatttataattctttatctaaaaatcttctgaattagaaaaacaatgctgatcagggacaaaaattgtaacagcaccaaaaagaaaatcagtgccacacatgatcgagaacatctatgaaaaaactgtatcttgtattaatttggtaacgtgagacggtaatttaacgttatactcaaataaaatagattgaaaaaacatactactactatgttaaaaaaagaagagatcctaactacaaacctagctagatactgacacaattggtgtctagtgggagccaccacctgacaaccctggacggcagcgcaactcatcgacgaacatgcagggtttacccgccccggcggttaccgcgcggtaaccgcggtaaccgtgaaaaaccgtacaaaaccatacaaaatttatcaaaaattcaaattattttttaaatttatttgtatttaaggaggttaccgcggtatttatattaccgtacccccgcggtaagcccggtaaccgcggtggcggtaagttaaaccctgcgaacatgtagggattaaaaataaaattttcatactatatactcaggtctcgttcaagtaagcgtaaggatgaatattatcatcagtatagaaaataagataagttattagtgaatgattaattaagtattaatgattaaaaatttgaaaaattgatttatttaaatttttataaaacttctatataaaatcattttacacgaaacacaaggagaagccaccagcagtccagcatcagcgaatttgaattcaaccttcatcgtggttagatttgttcaggctctagaaattattggtttcacagctgagcacattgcaaggacctgttggtaaagagaaatggcgcagcagtaaagagagagagagagaaaattacaaagcttttccagtaaattcagcatctatctcatgtcgcgtttcacctggtggctgggtgggaaattcagggatcgagctagcagtagcacctggtcctccctgcaattggcaagtgactgataaccatcactggctacacacgtgatcgatccatccaatcccaacccatatcatgcatcactactcaactagtatcagggtaacgacaatatatatagcaaaagtaatctatatagatgggactcacacatatagactataactatttttctcttcacaatgtatatagatattactattggttactcgttggattcatgctgctatactcattcatctatggccccgtttagttcgcgaaatgaaaatttttgggtgtcacatcggacgtttgactagatgtcggaagggtttttcggacataaatgaaaaaactaatttcataactcgcctggaaaccgcgagacgaatcttttgagcctaattaatccgtcattagcacatgtgggttactgtagtacttatggctaatcatggactaattaggcttaaaagattcgtctcgcaattttccccctaactgtgcaattagtttttgtttttatctatatttaattcttcatgcatgtgtcgaaaattcgatgtgatgtttttggaaaaaaaattttggaaactaaacatggcctatgttgagcagtatatacttacttttcgacaggtgaggtcgtcattaatatttgagatggtaagtatcacagaatctgttgtaaatacttgttgggggctagagtcatgatttttgtatttgattgctaaccaggaaaactacaaatgttaagtcgtgctattgatatgattgttttaatcttcagcatcaaccaatgccaaaatttaaattttaaaatttaaatttgaatttttttatcaaaagtttatttttcagcattagcgtttaaatcactaagaatatatataaaaaagttttacctataaaagtcaacaatattatatattttgaaaataacggagtactatacaaagtttacataccactctatgctgctacgagacgagtatttgtcgtcttagataatgtctttcgtcaaacacgaacttttgccgaccaaagattaagttttgaggctccctttgactcgcgggatagtaaaaggtataaatagaaaaatgtattaaataaaatgtgtgatttttaaatcccatagtaacaaaagatcacaagaaacaagatatgaacccttcaattgtgccataggaaaagccaagaaaatattgagacacaaattctaccttggttttcattaacatgctttttaaacgatcaaatggtgtatacgtacaaaaactttatatatatatatatatatatagttgttttaaaatatctgataaattgttattttttaaaaaataattaaaacttaatttatcatgtactaataactttcttgttttgcgtgttcatacttaatctttcatccaaagcacttttgaatgggcccgcaaaacgagctcatacctcttgttattttcctataaagtgtaaaagatataaatacaatcatatgaaaagtttccttcctttatatataaagggaactgggcctgtttggcacagctctagctccagctccacccctcctggagctggagctcagccaaacagtttcagctcctccaaaactgggagtagagttgggtggagctctctcacaaaatgtactagagttgtggagctgggtttacgcagctccacaactccactccagcctcaactcctgaagttatatttaggagttggagctataccaaacaggccctaaagagggaaaaaatccataggaggtttgactcctacgaaaaaaaatcattgcttatcatatgaatcaaagtaaccataaattttggcggttaaaattcaaattcaaattttttattagggcggtaactctaaccaaactggtacggaactcagctttgatgtccggtagtatgagcttgactatttgaggatgaacaattaaacacccaacccctctgttgacccgatctggttactaaccacctcctccattaattcggaccagtcaacgaccatctgctcggtcaatccggatcctctgtggccggaaacctggatccgtacatgtggtcaccacaaatcagctagcacacctgtacatgcttgaatttaccaagcacatttaatatttcttttacataatttttaaaagtgctatattttagaacgaagatatcaattacatagtaatcagtttcttaatatacgatgacgcagatttttgtatacactaaccattcgtgttctttaggtcatttattttgggaaaaagtacgaattaccccccgaactatcacggtcatctgaattaccctcccgaaccacaaaaccgagcattcttcaccctcaactataca

SEQ ID NO: 14435 - DNA, 690 bp, Oryza sativa
tccagtggcatgtagccgatatgacgaatagtagtgatattttatttaatttcataaagttggagtggcatggatccaattaacctaatttgtttaattgaaatggtatgtatttatttaaaagctttatgtgaagtttgagtggatctaacgatccccatgacatttgatgtcttcactggaaaaagcatttttcagacgcccaaaccatccgcatgtacctaaacgcctacaaaaatcatcaatttttctaggcggaccaagcacctgcctacgaaaatcattcacgggcaaaaacacaattttcccaggcgatagcggccccacctatagaaatagttttggtgcaaaaaaagaaaattcgccaccaaaccagcccgccctcgcgtttcacccacaaataaaaaattcttcatccattcaacaaaatacaatcacaaacatccattcatcaacacaatctatacatgaacacagatacagcggattcaaatccccacaacaccgatttgcattgcaacatcaatcaaaataaaaacaaataaaaaaacacagctctgtggcctcctccctgccgccctctactgctcagaggggagggccatgccgctgccgccggtggcctctccccaccgggcggatctgagaggaaagagggaagggaggccgccggcctccacccgtccccct

SEQ ID NO: 14436 - DNA, 1453 bp, Oryza sativa
ttagtttcagttgaccagatgtctctagaacttctgcatcaacaccaagatcgatctttaatctaaattttttacaacctgttttcaccaggctcatactattgggacaagccttggccttgctggggggcgatgcgaagcctttctcgaggctctggagagcctacccacagatgccagcttcagcgctgccctgatcttgacccacttgcgtggggacaatggcaccgcaactctttcgttgctagaaaactgagaaatgaaattctgtatgagctgatcacatgagctggagtcaaagctgtttgttcttgatggctggaatggagcggcaatttgctgtgaggtttggtcattgcttgataggttgagcaggttactgaaattctcgcctgcagatgccatccttagtaattagcatcaagatgaatgaatcagatgtagccaaaaaaaaatcagcatagagtaattactgttgcttggaggcactaagtgaggttgcatcaaagccacaacttcatctgtatggaggaaattatctggagaaaagccctgtcaacacaaatacaaaatggattagttctgttgaatgaaaagcacaagtaatgtcaaatttttactcttcgatttctatctagacaaaatacatagatttttacataaaaaaaggttcttaccttgtatgattcttcaggtgaatgagatcgctcattatgtgcatactggccaattcgtgtggcagcatgatcagcctggatgctgctatgagcgtttggattaaaatatgttttttcggtattaggtatacacagaggagtgattcttggtctgggtatgaatgttccttgatttgaatgatgtgggataaaattgcccatgcccaactgttggctaaactgcacgttggaggtttgaccctgcacaaatcttgacatatccactgaagcctgctagaaaattgatgaaactatcttagactaacatgcatatgtattttattatgtactgtattttgtatatttcaaaatatcttccttacattagaggcttcttggaatgaagaaaagttctccgttgattcaaatggttgaccagccagggctgaattgtattgacctgtaaacaattggaatagatgaccaaaaatccccaaaaaagtaattatcgctagtgattgaaattctcagaacaagatattaccacaagttgggatctgctgtttaggaataaagtcagtcaacatagaagttcccccacaatggaacctatgaagcggtacaggatagttgttgaccatcttatggtcatactgaataccacttatattcgcataagccaattgcttcattgtttcaactgcactctgtgaacaaaaaacaccaaattattaggaaaatagtgaaaaatctcctgttgaaggaagtgaggaaacagtacctgctctatttcgtcg

SEQ ID NO: 14437 - DNA, 544 bp, Oryza sativa
aaatgtgagctcaagcgaacattcccagctcgttacaggagctttccctcccattctcttctcctctatatcaccccgcaaccatgcctctcctccattgtttcctccaccgatggctccttccacgagtctcctctcctggtcctcctccgacgacgacgacggcgccggcgccggcggcgagctgtcccgccctcgcaggcggtggcgggcgcttgtcctgtgagtcaacggccgagtcaaccctgcgttcttggttgggttcagagatggtttggttgctcatgaatttgtgttttttttgttctttggttggttgcagggggctcggggtgaggaggaagaggagcatggagggggtgttcgggttcagggagatgatgggggaggagttcatgggcatgttcctccccttctttggcaagatggttcagaaagtggtaatgattttcatccaacctactagtatttattacctttccttcagggagtggtaaaaaaagccatattttttgaagttttttacccaattgtgaatttacac

SEQ ID NO: 14438 - DNA, 587 bp, Oryza sativa
atgttcaccttgattcagattaaagacaccattaaaagcactggctagatcaaattcttcataaaaataaatactccctagtcccatttccaatagagtaacatgactagggtggaatgcaatgtggcatggtagatttcagcgtagtgccatagtggatttacaaatcaagatgattaatgatttagtggtttttacaactaaattgcagcctagtcctgaccacaaacagagtacatgatttgttgctatgtaataaatctattgtactagactaaattttgcaattgatacattaaatgattacctcactaaggttcatgtcaaaattttcaatccgtgtgagcaagctgtgtgcaagttctgctgcaggttccacaggcagctccatggaaacatttgaaatagtttgcaagagtgaaacacgatccacagcccataatgcagaatttggttcccctttaggacgaactttgcctttatcttggccaacattatcaaggagtttccagtggtgtgagaggaatttccagttaactgatttaggtgcaaatgatgagacctcagaaagaagccaccatgccccg

SEQ ID NO: 14439 - DNA, 588 bp, Oryza sativa
gcatcgccgtcctcctctctcgcttttttcccatttcgccgatctctcccgagctccccatcgcctccgcgccgtgcaaccacccgccgccgccgcttttgctactccgaccgccgctagccgccgctaggctcgtcgccgtctcgcgccgtcgccgccgttagcttcgcggggtcgagatctacctcggccgccccttccccgtcgaggttcgccgccggagacccatccccgtcgtgtgccggcaagtggcgccatggccgccgccttcggccggcgctctcgccctcccacgctctttcctctctctctaatccctctccttttgttcgttaggaggttccggagctcgtcccgccgtcgtcgtcgtcctccgtcggccgccgtcgtcgaccgttgtcggtgaggcttccccctcccctttctccttttccccgtaccgtgtagccgcgtgcgcgccgcttatccgcgtagccgccgctcctcctctagccgccggtccccgccgccggtcggtcgccttcgggcgccgccttgcgccgctgccgcatgcgcgccgccgccgtgtgggcgccgcgccgccggcgc

SEQ ID NO: 14440 - DNA, 723 bp, Oryza sativa
atatgtatcataatatctgagaaccacagatcatacaaattacgtttcatcaaaagttagaagaatcatttcatccaataaaaaggttaaaagggtcattaaactgttacctgacagctgcttcgcgacagtgctctgcaacatcatcaaaaatgcatatggcaatccttcgttcctctactgttttgtccttggcctaatattattaacaaaaaaaatacttataatcgcagaaggttcttttttgtccttgacagagtattttttttgtaataagatgttctatgtttatcacaggctacaagatctgaaaatgaactggaatagtttctagtagctttatgtttactctttggaacatttaagcaaaagatttctatggcaagccaagaaaaattctgggtaaagggaatatctgaaaatgacccccaaaagatatagggtccaaggtttcacattgctagaaaaatcacttttggtgtaaagttcagcattcagtatgttgcccttctatcactaagaaaacagaagttccaatcaaatcagatggatccacttaccaacataggtgtcaaatagacggaaagttcatcaaagaatggaaggaaataagtcttgaacgtcttaacaagagtgcccaaacaatcaccaatctgtgaaaatcacaaaagataaatctgtataagttatttccaataaagcttggaaagtagggctgcagga

SEQ ID NO: 14441 - DNA, 697 bp, Oryza sativa
ccgactcacgtgctaaggaagtctctagtccaggctttaattttgtgcttcagatgggtcgcattggatcatcaaactggtctgagagcatgcgtttatctaatgctgacatcccaaggccaactagcaccttgtttgaacaaaatactcagttttattcaaattataatgtcccatcttaccctgacaatcagttctatcaacctgctaccattcatggctatcacctggcaacctctttgaaaagtatgaatgcaagtcacagcacgcactccagcatttcactagatccacggcgacttcctagatcatctgaatctgctggttctaactacgcagattctgcaaggtatgctcgtaaccaagatgtaattggttcacagggaaccgcttcgcaaaacacaacaatgagctgtttagatacaatgacagtggagagagctttttacaatcctgcctctgttaatgagattgaaggggttggttcatctgcttactcaaagaagtaccatagttcacctgacatatctgcactaattgctgcaagtaggaattatttgccaaatgaagtaaatttgggaggtgctgctggaagcagttcatacttcagtaatttggcatgtgaaagatcacaatatgtgaacttgggatccagttccacagctcaatttgcacttagcaagcactcacaacctaa

SEQ ID NO: 14442 - DNA, 944 bp, Oryza sativa
tttggaagtaaactcggccgtccatctccgatctataatactccttccgtccctaaatatttaacgtcgttgacttttttaaacatatttgaccgttcgtcttattaaaaacttttgtaaaatatgtaaaactttatatatacataaaagtatatttaacaatgaatcaaatgataggaaaaaaattaataattacttaatttttttgaataaaatgaatagtcaaatatgtttaaaaatatgtttaaaaagataaacggcgtaggtacggagggagtgccttcctttccaaggagccgaagccgacatcccgcctgccgccagtggctgcccgcttacacgtacgtttgtaggtgccctgtataggctgcaacctgcaatactgttaatggctttggatcacgttaatttagattgccagcagcccatggagtgatttggactgtacatgtatgaagttggttcagatgctgacgaacaagtaataatcacactttttctttgacgacctatgtcgacgggtgatacccgtagaccggatatagagggtattagggtacgttggtacaagcatctacgtagtacgacatcaagcaaacaaaaaataagaattatactggttcagaccccttgataggtaataaccctaatccagttgatgtgggattatatggtagaaaatacaggttacaaagggaacaagggaacttgtcggatccggcgagattatagtcgagttgtttcgactagctctcgatgacttggctcctcgtaggctctggcttcgtaggctgtataggttgtgttggctctgagatttgatcccttaaaccctccccggggggtcccttttatatcgcagatctggaggtctccacgtagaactcggagatacagaccctatacgatacgtcaacgacccaattctgcccgagtaggattct

SEQ ID NO: 14443 - DNA, 647 bp, Oryza sativa
agtggcgctttagctgcaaaatttatgtcaacattagacagataacacagaaaggggtaaatccttcagaaaaagaacttgagtgcttgactttcccaagaaaaaagaaaacgtgtggccacaatttttttcaaatttcaaataaaaaaaatcaagtaaaagataaaacagaacgcagggtaaacctttcaagatgttcccaaaaaggaagtctgccaaatgccttatcttctctgactcatcaactaaagatggcaggaaccgaaggaagagcacacctctccactttacatagtccctctaaataaaagaaaagtttcaataaaccatgatccaaacatgtggaagtgatattaagaaaattattagcacctgcagcaactttgagagtaggataaatgtttgcctcctcactacctcacagggatcacgcaacgattttgttatttttgacatataactgcagagtgaataaaaaggggaggtcagttagaagttgaactattttaatgttttccctgtttcccacgtgcagtttaactgataagatcttaatcaaacagtaaagcagttttacatcttttgcaactgaagctgtaacaaagataaacccaaattttgtgaatattgacagtatgtgctaattt

SEQ ID NO: 14444 - DNA, 628 bp, Oryza sativa
gatcaatttacagtagctcatatacttttctgataccgagatttcagagaagcctgacctttctcttcattaggagcatttggcaccggaccaacaaaatcagcatccccactgcttggccagactagaggaatcagcttctgctgatatgcattcgtattatcgcatatgccaagctggatgacaaacgttactgtgcagcctcttcctgttccttcgctatccaaccagatgtgccctcccatcaaagtaacaaacctgagataggatttttcacattttcagttaagtcgccgagtttacagtgagggagtgagtatatagcagcctcagcacaaattgggttgcagaaaaaggagctgataggtaagaaggtggtgatgtatagtaaactacctcttgcaaatggcaaggccaagaccactaccactgtatcctctgtttcctccaggctgagattgagcaaactttgtaaatacttgaggtagatcctgagggctaatgccacagcccgtatctttaatctgcaacagaagaaataacagatgtcataaaacagtaaaaaaaaaaaactggcaaacagttacctgactgtacacaactctagtttttctttatcaaccagtaa

SEQ ID NO: 14445 - DNA, 1167 bp, Oryza sativa
aaatcaactacttcaattcaggtttcttgatccgttaataaatggacaatatccaaaaaatatgcgagatattgtgaaagaaagattacctactttcacgcctgaacaagctaagctagtcaagggctccgcagattattttgggatcaatcaatatactgctaactacatggcagaccaaccagcacctcagcaagcagcaactagctactcatctgattggcatgtttcatttatctgtaagttcccaacttataattaaggattatataatataaaccaatagagtactcaagatatcattaaatttatccttttctacttaattttacagttcaacgaaatggcgtaccaattggacagcaggtatagttgtttcctcttgccacattcaattttagtttcttatcaatgctacaagattagcaagtgtggctaagacgagaatctcttaccatgcattatttcgtgcaggcaaactctaattggctttatatcgttccgactggcatgtatggagctgtgaactacataaaggagaagtataataatccaacaatcatcatatctgaaaatggtattttcaaactacctatctagttttaattcaaaattttccatgcatttctcaaaaaaatttatggtcatggtaccaggaatggatcaatctggaaatctcactcgtgaagagttcctgcatgacaccgaaaggattgagttctacaagaactacctcactgaactgaagaaagccatcgacgatggtgcaaatgtggttgcgtacttcgcatggtctcttctcgataacttcgagtggctgtcaggttacacatcaaagttcggcattgtctatgttgatttcactactctcaaacggtaccccaaggactcagccaactggttcaagaacatgctgcaggcatcagggcctggctcaaaatctggttcaggcacttcagattctcaagttggttcagcaacttcagcaagccatccagttggttcagccatctcaagtagccatcggctcttgcttccctgttggtttccttgcattttcttttcccttccttcttcatgtttttatccctgtagaagtagcaatttagcagtgattaataagtagtggatgccagcagtatgttcgctttaaaaaatgtgctgcag

SEQ ID NO: 14446 - DNA, 848 bp, Oryza sativa
cattcagtatgttgcccttctatcactaagaaaacagaagttccaatcaaatcagatggatccacttaccaacataggtgtcaaatagacggaaagttcatcaaagaatggaaggaaataagtcttgaacgtcttaacaagagtgcccaaacaatcaccaatctgtgaaaatcacaaaagataaatctgtataagttatttccaataaagcttggaaagtagaagtcacagctgtgtctacagtttaagttggaagtacaataatcatgcttgctccttttggtgtctaaggtactaccgcgttcaactttacaaggcaagatttaacttagcatggtcttctagattggactttgaccataaatttcatttgaatatgttcttactaactagaaaatcacgatcgtgtgaaagcaaaatacatttgagtagctgcatcaatttggatcactaaacctaattgttgatcataacttgcaaagtttgaaagtagaaataactgctcgccttataaatttgaatggaatagttaattagcatgtgtaaatctttcaatttcagtagtgcacagaactgcatacacttgtcaattcttgtatcaggaaaaaaattataaacaggtacatctaaatatactatttttttccagaaatattagcagtctagttttcaatagcttacttgatcgaagatttcatcctcctgttcattttcttctctgagtagatcctcttcttctgaatcaaaatcttcagcttttgccctgtctgttcgttctctccttctgagagcactcgcagttattacttctttaattccatctactatagatctgacctggccttcct

SEQ ID NO: 14447 - DNA, 2669 bp, Oryza sativa
tactttctataaattggatcgaaatcattttttatgtgcagagtacatgctgaatctggatggctgtcttgcttctgaattctgatagcattcccatatcttttactttcttgatgtttgttttcccttctgaaaggtggcttgatatgatatttttcctttccagatatgtcaaattctcgggttagctggaattgatttgtttaccccttctgatgtggttgagaaaagaaatgttcggaaagtttgtatgtgcatacgcttgctatctaagaaggctcggacgatgcgcctgactgtaagccctagattcttatgaaaccatttattaaaaataattcaatcagctaatcattgcacaatacacatcctgaaagatttaattggtgtgtttctgctctctggtgacaggtgcctgattttgatattgtcactcatacaatagccatgcccaactacattgttggaggcatccggagaagtctggagcaaccacaatgtagttcatctggttcaagtggttacagtccaagtgccaactctaaggcattaaatcagcaggtaagctatttgaaaggatcagtttttttttttggggagaaaggatcagttttattggcatgttcttgctaattgatcctttattttaagtcaatactatcattgtttaaaacaatcaactcattaattttgatatatatttccagagagtttttggtgcagagaatgatcaacaatgtgaaacacattatgattctgatgaagctgaaagtaagctctctgcattagaacctgaggactcagtcagtgaagacaatatttccacacttttgaaatcgggcaacatgcccaaggaagaaaaggaaggctatggagatagtgagcatggtatgcatgaagagaagtcattgtctgaatcagttggatcgattgatttcggcaatatggaatctgattctgttggttcaactcctttatttcacaaaaatgaatcatattgctgtattgaatctccaactgaccagtgttcaagaactagaacaattaggtgttcattaagttcagaagagtcagattccataagcagtcatttggtagttgacagcagcaaggctaaaaggactcatggcgaacatctcgagcctcttaacggaaatgggaaaagatttgctaacgatcccgaaaaagaaagcgatgccctccaaaaggtcacctttgatcaacaatgtgatctgcttgcctgtgatggggagtctgtatgttcaaattgcgacagtacaccatactcgagtttaaccccaatagacagtgcttgtggcaaattgccagcagtttctgaagatgatagtgcatgccgagggctggaactcgaattccgttgtgggaatgaaacggtacctcctgaaatgccaaacctgtgtatgctagtactacttttaacatagtcatcattttgtctcatgtacagcaaacacgctttaacatttctttggcatccaggacgtttcccaaaaagaagataaacaggtggaatcagaatataaagctgaaaatgacagctctgctcaaatgaatgagaatgatgttcccaaatcagggaaagggatgctaaagtctgttgctggaggaattacacttgtcggcgcagtgttcttcatagctcatctcaggtaatggtaccacagtatcaaattatcgtcgtgtgccgtttggtgtactgaacactaatactcctatatattatgaaattaatccaaactttgctgcagaaggagcaaggacagaagcttcgcaggtgttatagctccattctctgaaaaatcagttcagggcgactcaagggcaaagaaagtagagaaaacaaaggcgggtgccgtgtatcccggggaatggctaaaagtttaatcaagaagaacggacatgccacggtgccacctaagcgcaatttggaagtttattttgcaatatgcatacatcttgtaaaagtaaaatccatatgctaaagaacacttttttttaatcagctactccagtttgcacgagtagagggctttaagaagcgactccactagtatagcaagtgttaatatttattttcttatagcagtccaaagcttacaataatctgtaatctggataaacaagatgcctcaagttctctccatgtacagaatgatccatgaagttgattaatttattataagcagcagccattattcagagtagattttgtactatgatgcagtaggccgaggtcttgcagcgtgcagcactgcagttaattaacgtgtggctgtcgagtttgcctgcaacagctgccagccctgagcaatctctgtgctaaccccgcgcctccaacctgggtctgggttagttttcaactttttcatcacatcaaaactttttacatatataaacttccaacttttttcttcaaacttttaattttagttaaactttcagtttaaatgtggaactaaacacagaaaaaaaaaactagcatatctcatcggggaagagacgaagagtagaagccccggcacgtcgccaccactcgccgccgagcgaagactagagactcacccgatgattggacgggccagcgcacgcgacgaccgtgcgcgcgaaagcgccatgtcgccgtccacaccaagagcgcccccacaccc

SEQ ID NO: 14448 - DNA, 10248 bp, Oryza sativa
ccccccccccccccccccccaaccccgcatgccccattgaccgacgaaaacaccgaacaaaccgagcacaaaccgcagacgcggacgccgagcgaaatgctcgttcttttcgttggtggaatctgcaaaagcacactggaggctggtccggtacgggacaagacaaccacgcgagaggggataaaaaaaaggcgataaaggtaaagctagctaccgcgcgcatccaatgatcggatgcgatccggaggagaaggtcgccgaattccgtcttatccagagatggggaggtaaaaaggagggggatccacctaaccaaccaagttgcgtcgcgcctaaaaaaaatggccgcacgcgctccgccccggcagcaccggtcaattcctgctgcttcctcgagtcaactgctccagcgcagcgccccacccacgccttttacccgcgcgccagcggcggcggcggcggcggcggggtgaggaggtgaagtgggagaggcggcgtggacctgcgacgacctgcttgctgcccagcctgcgagggcaagccactggtaggtagtacgtgcttctctcttcagtcttcactgtctgtgtgtgtgtgaattggaatttggaagtgctggaggtaagcagtaagagaaggatcagatttggagaggctgaatctctgattctctctggtgtttaaagagtttgttcaattcgaattgtgggtttaattttggtgccgtctctcactgggagggatcactggatcacagttgtgctgcttctgggaacgttttggttaattctatcaggtctgtagttcttcatgatttttttttgaatggatgtagttcttcatgatagcttctagaatatctgagtcttgctaatattccttttttttttaatagcaagagaatttagtggtgctgacatactaaaaattagaaggtttatgtgctgtatgggcatgttcagatattttgatttgttaggcaaatttagatatttttaaccatggcgaccttttggtttgggggcataattgggagcttggttttgcttccttttttttgaacggaagttttgcttgtttcatgcgttctctttggaaataataattctagtacgttttgctgtgatgaattcaagcctctattttagtataccgatgaaacaattgtgcatttcaaggcaacttttgcttttcagcataactaacagcataacagtgaacagatagtataataataacagtaactacaaattctgctttgcctatcactcaatcttgtatgaacctcttttcttatccaataatattttgtctatcttataggtgccatactggactggcttgcttgttaactgggttagccagggactccggtattatactactatgatcagttcgtgtactttttttcgccgggcaagtttccccaaggaactcttttgatgctgtaattataactgaagagtcatggatctgctcagcgtcctcctaattatagcatctctgctcccattttcagcatctgaccgtcaaggtttatttacatgcctatcatttatgtagttattcaagctattttggagtgcttccacaatcatgagtttgcaaatacttttgggtaataaataaatttcttttatttccttaggtgatgcactatatgatatgaagctgaagctgaatgctactggtaaccagctttctgactggaaccaaaatcaagttaacccatgcacttggaattctgttatttgtgacaacaactacaatgttgtgcaagtgtaagtttattttgttgatgttttgcttcacttttattttctctccattttgagttaattctatatttacgtatctcttaaacttatatggcataatagttcttgatttatgttccacattcattaccagtgagctccagaagcatctgtttgagcacatgattatgatttttttgatgcacttgcacatgctatctgcacttctttgatgcacgagcacatttcataattgaactatatgaaaatggaaaaatcatacaacatgctgtttctttaaatcttcttcacaccatctgttatttctggcaaaacaacatctagatggttctgttgaccccgttatgcatgttccatatctaggttttttgtttgttccaagttggtgtgcctgatgacagatgccctcctgcagaacattggcatctatgggattcactggagttctatcaccacgaattggagagcttcagtttttgaatgttttgtaagtgtacttgtgttgattgttggaatttctctcagatatttggtggtagttgtgatgaaatagctactgtgatcctagaggaaaccagaagctggtattatgtgagaagtgccaactgttagctatttctgtgcttgctgcccaaagatttggttgtcttagttaccatgtactgtggtcttagactccagtttttgctaaccactgtagtgcatgtcattgcaggtccttgcctggtaataagattactggtggcatacctgagcagatcggcaacctatctagtttgacaagtttggatttggaagacaatttgttggttggaccaataccggcttctcttggccagctttcaaagctccaaattctgtatgtacttgaaccttagtcctttgttttatgaatgtataatgatttaacctgctcacctttttatctcttaaacaggatactaagtcaaaacaatctcaacggaactatacctgatactgtagcaagaatctcaagcttgacagacatgcaaggactcatacatgatttctgttgacaacagtccatgcctgaattatttgactaacatattttttttcttatgattgcagtaggttagcctacaataaactctctggttcaatacctggttcgctgtttcaagttgcacgttacaagtactgttggatcactgtgacttgtatactcatgttttttcaagtttgagctttgagttctgacaaatgttaattttctttacagcttttctggtaataacttgacttgtggagcaaactttctgcatccatgctcatcaagtatttcttatcaaggtaggaagcaattttttccctgttcaacattgcacatctgtcatacagcatccattggatgcctgtcagaattttcgctggaatatgctaattctatctgtttaataggttcatcccatggctcaaaggtaggcattgtactcggaacagttgtaggagcaatagggatacttataataggggctgtgtttattgtctgtaatggaaggaggaaaagccatctacgagaagtttttgtcgatgtatcaggtagtattttacttcatgattttctttctatccattcattcaactaaaccttttcctacagtcttgtttattattttattgaaacaaagatgtaaattatgccgcaaaattttatcatgcgacccccaaaacaaaaacagtgcaagcagagataactcacacatgttggtttatttctaaactatggtttccaggttgtgtatgtcaacacagctatttttactggcagtttcgcttactgctccatgtttaataaataatcttggtgaagtattttggtcaaaaaaatttatggcaaaataagaaaaaaaaagtagcatgcaatatgcaaagctgtcaagtgtttagcaccttcagtaattttctgataaaagatatggaaggttgtttctaaggtagcgtttcaatttacaaatttaggattaggatatgcataggctgcatttacatttagtcaagagtaattttagttaactaatctgtaacttatgtccccaggcgaggacgatcgaagaattgcatttggtcagttgaaaagatttgcctggcgagaattacaacttgcaaccgatagtttcagtgagaaaaatgtccttggacaggggggtttcggtaaagtgtataaaggagcacttccagatggcactaagattgctgtaaagcggttgacagattatgaaagccctggtggggaggctgcattcttgcgtgaagtagagcttatcagtgttgcagttcaccggaatcttttaagattgattggcttctgtacaacacaaacagaacgtctacttgtttatcctttcatgcagaatcttagtgtggcctatcgtttacgaggtactttctataactgatcaataatttgtttcgttcttccaattttatgcttctactactgtactataaagtttctcggatacttcactattgtgcctatggattatgcaactgatacttgtagtgcttttaatttacgcttgttgggtaatatggtgcatgtgcactattgatttcaacatcgcatatgctcactttcttatgtttagattcaatattggaagatttcaatatgtacctcattgtgtttaacgatgcagaattcaaacctggcgaaccaatattggattggtcagcaaggaaacgtgtggcaataggcacagcacgtggactggagtacctgcacgagcactgtaatcccaagatcatacatcgagatgtcaaggctgccaacgtcctgcttgatgaggattttgagccagttgttggtgactttggcctggcaaagttggttgatgtacagaagacatcagtgacaactcaagtccgtggaactatgggtcacattgcgcctgaatatctgtccacagggaagtcatcggagagaactgatgtttttggttatggcataatgcttcttgagctggtcactggacaacgcgccatcgacttctcacggttggaggaagaagacgatgtgctactgcttgaccatgtgagtctactcttgcgaagctggaacaaaattatcctagcctctgatagccatgtgttgacataattgaacgaattttttttgaaactaactgtgccagatagtgcgaaatttcatactgatatagcaagaaaaattataaaaatacagcatgagaggctataatcagcaggaaaagaaaaaaaacaaaataattgttgctctcattgaacatcatattcattctgaagcctgcaccgcttgaatcatcagtgtcatgatcatgcttgctggttgctgctgaaaatgtgcaggtgaagaagctgcagagggaagggcagctgggcgccatcgtggaccggaacctgagcagcaactacgacgggcaggaggtggagatgatgatacagatcgcgctgctgtgcacacaggcgtcgccggaggaccggccgtccatgtcggaggtggtgcggatgctggaaggggaaggactcgcggagcggtgggaggagtggcagcaggtggaggtgacgcggcggcaggactacgagcggatgcagcagcgcttcgactggggcgaggactccatcttcaaccaggaagccatcgagctctccgccggcagatgacgactgcgtacgtcctgatgcatgtcacttcccaatcccagtgttaatagatatacatgtatgtatatgtatggttggctcttagttaccatagggttggttatgtcactaaagaacccatgtcaagcctccatttgtgtagaggaaaacagctagagacgcatgtgttcagagttcagacttcagaagtcccaagtcgcatctgcttggcgaagccgagccacattttctaccatcatacgagaaaagaccaggaattaaccgagcgaagctgtgagaatctaccgtccgattccgagacaaggaggacggtgccaccgtggtgcgtcacagctggtcgctcgcgaggactcgagcacacggtgcacgacccgcggcccacgccggcatcattggctccgcgacgcacgcggcgctgcctgccgtacctgcctccctccgatccaatccgattggaaccaacctggcgaacccacccaccgaccaaaaagctcagaaaaagcgtcggggatggccgatggcggggatcacatcacgtgccgaaaccgggggccacagtacggtgaaaaacaccggaaaaaaaaaaacgtcaaaagactcaaaacccaaaacccgcgtgctgacaaaaactcgctggcttccaccgaccgcttcactcgcagcactcgttcactgagactcagagagtgaggtgacttgaggcggcggctgggagctttgggttgctggcttgctgctgcgatgggctgcgctccggcggcgcattacctcccggggggagggtggcggcggctgctggtggtggtcgtggcgctggtcgtgctcgaccgtgccggggcccgggtccgcgccgcggacgacgacacgggcgggctgagccgggccgcgttccccaaggggttcgtgttcgggacggcgacgtcggcattccaggtcgagggcatggcggcgtccggcggccgcgggccgtccatctgggaccccttcgtccacaccccaggtgacatgcaccgcgagtttacaagaaccgtgcttaactaatcctgctggtaaactagatcctgcgtgagctctcactgggttactgcgttacacgttctcgcgttctctgttcatgttccatttctcctttcaagattattaccggccatggtaatacttcgaggattaattctggtgagcgactcgtggaacaaagcgtgattttggacagttcagctgagtagtggagaatattcgaattttcagataccaatttggcttaacgagtttgagggaatgggggatagaatcagctcatctgattggatgatattaaattcgtggatcattatcttaaaaaaaatcgtgatgttgacattgtttttttccggatgaacagggaatattgcgggaaatgggaatgcagatgttactacagatgaatatcatcgctacaaggtaaatgagatcaattgagactatcttctgttctttttttcttgctcctgtttcacctacatatagtattgaaaggcagttagttttgtcagtcaattagtagatcgcaattttcctgtccatgaggatgctttgggactatctatacatttcctgacaatttttctcaaatataatataatagtaatgtaattacattataatttacatataactacaatgtaactggtatgcagtaactttcatataattttgaaaacgttagatttgctttaatattcatgcaagcggagaagaaaaaaatcacaacgcacacacaagtgaggggatcgcttcgtgaaaatagcatgttatcgtaagattttacttacatacaagttgtattgtagttacatgcagttacgatgtaattacaatacgattcgattacactatattacatttgtcaaatttttgggagaaaatttgtcagcaaatgtatagcaaaactggaatggttttgtttgtgtagttgatatccatatttgttttcaaccttaagcaagcacaaccttatagtgtatttatactttattgggctgtgagcaaggctcaagtttggccttgatctggcgaagcttagctcacagcgccatgctgctttggcaattatgttttcaggaaattagagaatacttactgtagaaaaatcttgagtcaagttaatcaataatgaatttcggcagcttgataattgcttactttttttttctgaaagaagataattacttacattgtcttcttgctagcacaggaagatgttgatctcttgaaaagcctgaatttcgatgcatatcggttttcaatctcgtggtcaaggattttccctggtaaataaaaatatggctctggctatagcatctacttgtactggttagctggatgaggatgaattccactgatgcattttggttatttagatggagagggaaaagttaacacggaaggtgtggcatattacaataatctaatagattatgtaattaagcaaggtataacttcagacatattgttcgacgtttgagttttgccaacataagtatattactgtctgaatatttctatcaaaactaacagggcttattccttacgtcaatctgaaccactacgatctcccacttgcacttcagaaaaagtatgaaggctggttaagcccaaaaattgtgtaagtcgtacatgccaattcttttttttaatgttttcactcacttatctattggtattgcctttccgttttaggctaattatatggtgataaaacatatgatcttgtcacaattctatatctgtataatcaggacttaatttttaataaatacaaggttttctgcaccagccattttttcacttatttttgttacagtgtgcaggagagctgagaggtgttttttataaggtgctatgaaagcagaaatggcttaacagttgatttcttcagaatgatcaaatttacatttgtgaagaaaatgaaattcgaaactatgacaaaatatcaagtttgcattttgcaatataggtgcatataacatatttacttgtcacagtctgtgcaaggagcacgtataatttttcttcatttttttgcagtggtgtattttcggactatgctgagttttgtttcaagacatatggcgatcgagtcaagaactggtttacgtttaatgagccaaggatagtagcagcacttggccatgatacagggacagacccacctaaccgatgcaccaagtgtgctgccggtgggaactcagcaacagagccatatattgttgctcataatatcatcttatctcatgctactgcagttgatagataccgtaacaagttccaggtattttctttctactaaagaataaagaaacagaaacagttagattgactctttcgttgttagtaacatggcaatttatatctcttcaacagttaaaccaacctgtttggattaatttagggtggtttataatgcatacctgctcaaaatgatagtctgtactcacgtctttaccatccgatgggcaacagttatcatcgaaattgatcccacatgctaattttcaacataaagcctttactatggtcaaaatgcatcatcttctttttcctcttcctttaataccgcagatgagtcatgagtgcattattgtactctttactccctccgtcccaaagtatagcaagtttgaacccttggcacggttattaagggaaggggtaaaaagacttgtttgccttctcagggtgggtggggtgtgggcctggactagttgagatgataatgaagctaaggggtagtgtggctagtttagtggtaaaaatcaccttttacaagtactaggttgcagcaatatttgggacaaaatttgaactctaaaagttagattttgggacggagtagtattctattaagctagcttattttaatgacattttgtatgggacatgcaaaatacaatggcagtattgataacaggtcacaaaagcgcaaacacatcttcttgcaaaatatattttccgcacagtctaatgatgttgtaatgatttgtctacaatatttctcactagtaattcaaaggggattgtttatggctgcaaattcagaatatttgtttgcctagtcttgtgaatcatgcatgccaatgaaattggtgaaagtagtttgctgtaataaatgtggccagaacagttgtgcccgaactatctgcattttgggacaatgcaatagcatatgtattttttaagcaaaagtaccacatgtatttcttagtgaaagtagttctaggagcatgccatatatgtcacatatattgcttgtcatgtaaggtcatattattcaatcataatagaatatatgtttaaacatttaggcaagtcagaaaggcaagatcggaatagttctcgattttaattggtatgaacctctaactaactcaactgaagaccaagcagcagctcaaagagccagagacttccatgttggttggtaagaccatagaagtaacatgtgacaaagttaaaggttttgtttgatacaatttccgatgctgataaaaatcaactacttcaattcaggtttcttgatccgttaataaatggacaatatccaaaaaatatgcgagatattgtgaaagaaagattacctactttcacgcctgaacaagctaagctagtcaagggctccgcagattattttgggatcaatcaatatactgctaactacatggagaccaaccagcacctcagcaagcagcaactagctagtcatctgattggcatgtttcatttatctgtaagttcccaacttataattaaggattatataatataa

SEQ ID NO: 14449 - DNA, 563 bp, Oryza sativa
gcgcattttgtgcaccttttaggaggatttgttccttgggcataaccaagaagtgctactatccttggctcattaaatgtaaaccagtgcttgacacgattgccaaaggtcttgaaacagaagtccgcgtactccgtgaatagatccctacagaacaagtagtatgaagataatccagacttcagagtgttacttatacagctagtgatgccagagatacaggatgctgcatttagctagacaacaggtaccaataatcataatgcagtgcagctttcttttgacagaacaatagaactttcacgttcataataattgtcatttgtctagaattggagccaattttagtcaggaatttttgtgttaagaaactgataattttgtcccaagcattcatacttatcatgtgtgcttctatgtttaaaaccaagtctaaaatagtcaataaccaacaaatgacgagagttctaatagattaacagacaaaaagctaggataaattactaatttgacttacgccatttttgcattcaaccagcctccgtacttcttctcaagcgcaa

SEQ ID NO: 14450 - DNA, 1316 bp, Oryza sativa
  unsure (1)..(1316): unsure at all n locations
gaggggtctcttnngnattagnatgccncgttagtaaaaccatctattatactgccataggaccctattctacatgatttcgtatagtttaggggggagatttctggtatttttggggggggggaaaacaccccaattaaaaaaggggggagaaattgtttttttacagacttcgacataaagttgagggacggtaggtgaacttattcctcgtaggaatcgtgcaagctgggaataagttcactttgtgaccctcaaaagtgattgaaatctaatccgtgaccctaaaccacaaaaccggatatcttgacccccaaactatgaaaaccggtgcaatttgactccctcagcggttttggagggcggtttcgctgacgtggcggtattgaccaggtcttctttacacgtggcgttgatgtggcgcttaggtggcatttcaattaaaaagttatacgtgggactcatttgtcattcacacacaattgtggggcccactaacatgtgggccccacatgccatcttctccctttcttcttccttccctctcttctctctttctttctccctctcccctacggccgtccgcagggagcgagcggcggcggcggccgccgtgggctggagctgaagcggcggccgctcgccgttccttttgcaccaccaccacccgcatcacccagcggccggcatcgagacgtcgtcagcagccggcatcgagacgtcatcggcggccgagcggcggcggcggcagcccgcgggcggtggcgtaacatggggagcggcaggtgggcttggggaaagtatttacagctcggcgtatgggacgacgattactggtggccggtggctgctgctgtttactgctactacaactgcaacccttcgttgccttgtcgatttgtcatccgcgcgagagcgctccgggacaaatcgatggtgtcctcactgccgactcttctctcaagaagtcttgggccgtgtttggtagggctataaacttcaactcctagctctaaattgctatttcagttggagctagctcctattagagttggagacccatccaaaagtgtttgacaagcttttagctcccgatctaaaaaatattgaaaaaaagggaaatcctgctgcggccgtgcgccngccaagcatngtntncacgcacgccggnctngcgctacttnccctgcacccaccatnncgcctttgtagcgtgcccgccgtcacaagctgtgcgccgctcacacgttggnctcgctttgccccgacccgccccgacggagcaacgtttgccgcgcaccccaaccgtgcgccgt

SEQ ID NO: 14451 - DNA, 4406 bp, Oryza sativa
tttttgcattaattaagtacatcagggaagccaatgatttgagagtattccagttaattcctagcaattcttcttattcttgcaaacaacaagctagaatataaggtgttggggaaaaagggggaaaaaaaagggggggcctttttaaaccttaatccaaatggtaggccaaagcgattcaagatcttctccacataatgggactgcaagagtgtaatctcattctcacctctaattagcttaatgtttaagataacatcagctactcccaaatccttcatatcaaaattttgagacaagaatgatttaacctcatttatcacctcaaggtttgtcccaaatatcagtatgtcatcaacatacaagcacagaataactccctcacccccaccatggcgataatacacacatttatctgcctcattgactgcaaagcttgcagatgtcaatgttttgtcaaatttcttatgccatttcttatgagcttgtttcagaccatacaaagacttcaacaatttacacactttgccttcttgaccttcaactacaaacccatcacgttgatccatatagatctcctcatccagctctccattaagaaaagctgtcttaatgtccatttgatgaacgagaagaccatgtgaggctgctagggaaagtagcacacgaattgtggtcaatctagcaacaagtgagtaagtgtcaaagaaatcttcgccttctttctgagtataacccttagcaataagccgagccttgtacttttcaatagtaccatcaagcctgagcttcttcttgaacacccacttgcaccccacaggtttacacccatagggtcgctctgtcacctcccaagtcccgttagtgataatggaatccatttcactacggatagcctccttccagtagtctgcatcaagagatgcgtatgcttctgaaattgacttaggagtgtcatccacgaggtacacagtgaaatcataaccaaaagacttagctgtcctttgtcttttgctacttcgaggagcttcactgtcatcctccttagtaacatgttcatgtgtatgttcagtttgttctggtggtgtgattgaactgggaattatttcagagggttggctagaactactatgtgtatccttcattgggaaaaagctctcaaagaaggtagcatcacgagactccataattgtaccaacatgcatgtcaggtacctcagatttaactattaaaaatctataggcaatgctgtggtgagcatatcccagaaagacacagtccacagtcttaggtccaagtttgcgcttcttcgttattggtacattgactttcgccaagcaccctcatgtgcgcaagtaagaaagtgatggttttctcccaatccatatctcatatggtgttttgtccttatttctgttaggaactctgtttaacacatgattcgaggtcaacaatgcctccctccaccatgctttaggtaatcccgcggtgtccaacatggcattcaccaagtcggtcagtgtgcggttcttcctttcagcaatcctattagactcgggagaatagggaggcgtcctctcatgtataataccatgttcctcacagaataagtcaaactcgtttgagaaaaactctccaccacgatcagacctaagtatttttatctttctgtcaagttgattttcaacttctgccttataaattttaaaatagtctagagcctcgtctttcgttttcaacaagtacacatagcaaaatctagtagcatcatcaatcaacgtcatgaaatatcgttttccacccttcgtcaacaccccattcatttcacagagatctgagtgtaggagttctagaggtgccaagtttctctcctcagtagccttgtgaggcttgcgaggttgctttgattgcacacaactatggcacttagaacctttgacaatggaaaacttaggaattaaacacatgctggaaaaccgagacatcaatccaaaattaatatgacataaacgtgagtgccatacattagcctcatcatccacactgccacaaatatggttcacagacttattgcagaaagcagaaagggaaaagcggaacaggcctccgcactcataacctttaccaataaaatatccatgtttagacacgactactttattagactcaaaaaccaacttaaatccgtctctagtcagacgggagccactaacaagattcttgtcgatagaagggacatgctgcatgttcttcagctgcacgatctttcccgaagtaaacttcagatctaccgtgccaacatcatgaacagaagcatgtgacccattccccattaggacggtagaaccccgtgcgacctgataagaagacaataatgagatgtcagcacaaacatgtacattggcccctgtatcaacccaccaattagtagactggttaactgaaaaaacagtaggtaaattaccatacccgcttccatctccagtgttgccaatggtcacattagcaaacttagaggtctgccctccaggtgccttcatccccttgcgttgtggacacttcctggccagatggccaggttgaccacacacaaagcaagtcctctcatcctgattaggattgctgttgttcttcttcttcttgaagttggtggtctgctgagctttgtatttccccttgctcttgttctgggcctggtgcacaacattggcaatggactgcccaccatcgcccttagacgccgcatctttttcccgagctttctcctcaacatcaagagacgctatcaacccctcaacggagtattcctgtctcttgtgtttgagtgcagtaccgaaacctctccaagatggaggtagtttcgcaataatgcacccgaccacaaatttgtcgggtaagacacacttaaggagttcgagttccttagccatggtttgtatctcatgagcttgttcgactacagaacggttgtcagccatcttgtagtcatgaaactgctccatgatatacagatcattgctagcattagtagcaccgaatttagtattcaatgcatcccacaactccttagcgtcggtcatatgcatatacacctcgaccagatgatcgccaagcacgctaagaatgcatcccacaaagagagtagtggcctcatcgaattctttctgctagtcagcattaagaacgcccataggcttgccagtactcacccagaagcatttcatagctgtcagccacagagtgaccctgatctgccatctcttaaagtgcacaccattaaatttatccggcctcagtgcatcggcaaaaacagccatagtaaaatcatagcgcctatattaagatttttggattgttgagaatatagtcatataatgatttaatatattccataaataaatcatgacattacagatgtatactagcattaacgcatcattagatctatacatgtaaactaagcagtaaaacatgaacagatcaaatatgcgcaacatgtcgaacacgtaccgaggtggcggaaagactgattgctcggcaggaactactcgcggttgcgagcgtcgatgaaggcgtgcagcacgcgagcggagaggaaggcgagccatcgcggacgaacagggagcagtcgcgtgaagcgcttcccaaaaaccttatcgccgccttctccaggtgcaggacgtcgaaaggcagaggttccggagacctgctctcccgatcgccggtgcacactgacgagcgggatggagtagtccacgagcgacgacgcaacacagaggaggaggcaaaccctagattgatttcatgtgttttgcgtgaaggcggtggctcggtttatatagagataggtcgcttgatcagggtgcccgcacgatctccactccgcgtaaccgaaccggataagtcgcgcgtaacttatccggactccacgccgttttcaggcaccggatttttcggaatgttttcaaaacaaaacaaatccaaattttcttgcaactaaacaaaactgcaaaaggaggctgcatctgcgcaagggtgagaagccaattttgcggaccattcgacgggtacgttgtgcacgcgagccgcttgccagtcaaggtaaggcgagtgagcacgcgcgtgtattccccctcttctctccaccacacatgtttcaagtggataggagggcatcctcccttttaaggaggtccccctctcctaaaataagcaaggtggtactaaacaccacatgcatgccatcccatgaggtgggctttgtgattttccaaagaattaattttagaatgggccttagcccatgtattaattccaacaaagtacccgtattctcatgtcaacttttgggagagtgcaaaagatgaagcaaatttgatgttatttttttcccaagtcagtaatga

SEQ ID NO: 14452 - DNA, 684 bp, Oryza sativa
  unsure (1)..(684): unsure at all n locations
atatttttggcattttcttgaacttttgatataattctttcatgtttctatgttgaagctcattattcattttctctttaatgttcttttcatcctaaaaagctcattgctacaaggtgatgctaatacttctttttttttcatggagtagaaaagacacattttctctttgtaaagtggggatcaaaccatttctgagtttaaggatatataggaacttgtgtatagttactataagaaactttttggtaaggaagagtgcaggaatgtacatttggggggaaatgtttggagtgcttctcttagattgaatgatgcttaaaaggaaaacatgatcatacctttctctcttgagtaactagacaaaaatatgaaggtgatgaaagctaatactgcccctggaccatcaaacaatatagccctatctgtctgcagaatgtttttttcaaaatcttgacaaagacaatcaatggaagggtttcagaattggtagataaaatattaagggaggaatattcttgaggggtgtgtcatcctgcatgagttgcaaagaaagggtgacatggggattatctttaagattgattttgagaaggcatatgatagagttaattggaacttcctgtatggggatcctctagtatagtcgtgctggngggctgcaagcatgttatactataagct

SEQ ID NO: 14453 - DNA, 1681 bp, Oryza sativa
tacagctttggtttctctgaattctggcagtacagctatctgggtgtactttttcggttaggaggcatactgtacactatacagtaccatgtttccattttaccagaaacagttatacttccaggtcataatcataagccatcactgttcaataggggtaaaatgttttgttatctcctggtaaattttcaatcaacaatgtcaaataagccagtaatatttctggaatgattccatccagtacgcaatgtacaagccatcataccacagcataacagttaacaatagttagtcaacaagttcttgctttgctctagtgatgcaagaacaaatacatccattaaatgctagtaagtttcttttcttattttgttcagcactagctagtatccattaaatgctaacttagtattgcctgcgagtattgagggttcagctcctccgcacttgcagagtgaggcattggcagaacgcctcaccaactaatggtttctgcaaaattccttgtgtgcagactgaaggatacggcgctgtataaatacaagagaactgctgtctcacgatcatgacgagcatgtgtcatttttatgcacttcgcttcccatacttcaacatttgtattaaatactttccaccaaataaatcattaacccacttcatctgaactgtcactatctgaggagaaatatatgtgctgtcctctagttgcttcttcctcagattccttgtcttcgtcagattcatcttcttgatcagaatcggtcgaagctgctgattccgtgaaaacaaattcagcgacaatgggcaaatggtcactgccaatttcctgattttgtttttggcataaaatcattgttagcagttaaagatgagaagtatataaaagcaacaatatcaaattattcatgactcaaattgttgcagatgatcatttaagttactgtgatgatcaaatgagaataccctggttggaagacccctagttctcctcaaaaaacccacaggcagagtatctaaaactctggagcattcaagccctgcagtgtaccttaaagaaagaatatcagccacatttttattttattttattctgcgtcatactgtacttttgagcaattgcatcatactgtattagaaagtatttagaagcataccacaggtaatcaacagtgccaagaaacttcttgtgataggaagttgcaaggggttcgccatgatgacccctattgtttgagtttccctaatataattggcaactagtttcagcaaaatatgaaatggtcaaacaatcagttttgatcttaactagaaactagtacctttaacatagcatacgaactacaaatattcaatggatgtttagcaaccatgacatttgaagacccagttgcatttcttacttcttcgccgctccattggtacttcagtgaactgcgaggaaggagatgagtattgagtagagaaaaagactatttgacaggtcaaccgttgtatcacgagaaaggttctgacctacaaagatcatataaagcaaactcagagctatcaagtccagacaactgccttctatcatgcaaagaaatgtcaagctggtgacacaaaaacacaatatatgcaatgtcaatttaattataattggatgtgatttcagctttgaaaaggcctaagaaatattttaagg

SEQ ID NO: 14454 - DNA, 2412 bp, Oryza sativa
ccatcgccccagagaaattcacacctgagcagaagaaggattttgaagcaatgttgcagcaagcctgggatcagttcttgaactcattcatgcagacccgcaagggaacactggttcagaagtataaagtaaaggtagttgccgatgatcctgggaccagttcttccaaaggtgaagacgggaaacaagctccagatggctcggctcaactgagtgacaaaggtgctaccgacggttctctaggaagtcaaggtgacaactctcaaggggtccatggagttcaaggcgatagagtgcatggagttcaaggtgatggtgctcaggggttgcaaggaggaaatcttaatcagaatagtgatgcagcacaagattttttcaataatttccaagaccgggtcaactatgctgtgcaccatgctttgatcaatcagtctggggtgttagtcaataccttatcaaacatgatgaagtcaatagccgatggatcaatagctgagcatcaggctgcagacccagtttatttgcaaggagttgtctttgcaaattatcggcctttgatcactgatgcctagccatctactcaggcagctttcctcgtcacaccatcagctcagccgacggcgccggcatcgactcccttacctacttcgtcagcattggcaccaggccagctggtgaaccctcagttgttgatgagagagcagccacagcatagtgggcaggttgtgaatcggccgacgcaagatcaggttgccgccatgtttctgccgcctcaatttgctgttgatccaatacagcagtagccgattcaacagacactcccgattcagcaggttgtacaaccaatccagcaacaagttgtgcaactagtccaacaaacgccaccaaggcaacagcctccgcggccgattcaacaaacgccgttaagacagcaaatcgttcagccgattcagcatcaaggctcaatgagcgcatcggccgggtttgtggcacctggtggacagcctgtgcaacgatttttaaatcaagtcgtcccagaacacttggttcaccatgtacagccggatggcacagtaatgcctcaagttgttcccgagcatttggcacgtaatattcagccgaaccttcataattaccaggggggcaacttgagttatcaatatcagccttcttctccgcaagcccaatatcagccagggggactggctcaacgtcagtttgcgtctcagtacggtcagttcgagcccatgcaacaacagtcacagggagcagctcagcaacgatcgtgggctgatgtgattgctgatgtaatgagggaacagtttgggcttaaaccaaaagagactggaagcttgtatcggcagcgttaccctgagtggtttgagagagttcctctccccaatcggttcaaagttccggacttctccaaattttcaggacaagatggtgtcaacttatgagcacattagccgatttttagctcagtgtggtgaagcatcggctgtggacgctctgagggttaggttgttccggttatctttgtctggatcggcttttacttggttttcttctttgccgtatgggtcgatcaatagttgggccgatttggagaagcaattccacaactatttctacagtggggttcatgagatgaagttatctgacttgacggcgattaagcatcgacatgatgaacctgtgcacgagtatattcagagattcagggagatgaggaacaagtgcttcagcttgagtttaactgacgctcagttagccgatctggcctttcagggtatggttgctccgattagggagaaattctcgtctgaagactttgatagcttgtcacatctgatacaaaaggtaaccttgcatgagcataggtctgcggatgctaggaaaagctctaagaaggttaatcatgtttgtccttacatgtatgggtcggatgacgatgaggatgactctgagatagctgcagccgaatgggtgaggagtaaaaaggttataccatgccaataggtaaagagttctggaaaggaagaaaagtatgattttgatattactaaaactgacaagatttttgatctgctactccgagagaagcaaatttaactccctgctggtcatacgattccgtcggttgaggaattagacaaaaagagatattgcaaatggcataattctgggtcccattctactaacgattgcaaggtgtttagacaacaaattcaggtggccattgagggaggcaagattaagtttgatgattccaaaaagccgatgagggtcgatggtaacccatttcccattaacatggtacacacagctggccgaacagctaatacggggcgcatgaggggtaatcaagtaagttcggctagaattataaacaaatatcaaaggaaatat

SEQ ID NO: 14455 - DNA, 3042 bp, Oryza sativa
tcaagccgatgtcgacgaggtggaagaggaatcagctaggttggttctatcactagaacaggtgatgttcgagaagcctgaggggatagagaatcggcatcttaaaccattgtatataaatggctatatcaatgtgaagccgatgtctaaaatgatggttgatggtggggccgcggtgagtttgatgccttatgctacgctcaaaaagttgggtataaatgccgaggatctcatcaagacaaatatggtgctcaaggactttggtggcaatccatcggaaaccaaaggtgttctaaatgtggagctgacagtcggcagtaagactattcctaccacgtttttttgtcatcgatgggaagggttcttacagcttgttgcttggaagggattggattcacgccaattgttgtattccttcaactatgcatcaatgcttgattcagtggcaaggcgacaaaatagagatcgtaccagccgacaggtcagttaatgttgccagtgccgatttagctctttgggagatggatggcctttattgtttatctggaaaagtttggaatggagattttctaaaagtgtccgattctgatatacagccagttgaagatggagaacccaagctattattttgagggcgtcgtggagggttcaagtgtctacactaaggatatggtagatgatctcgataacaagcaaggtcaaggttttatgtcggccgatgatttggaagaaatagatataggtccaggcgatcggccaaggccgacatttattagtaagaatttgtctccaggatttagaaccaagctaatagagctcttaaaagagtttagagattgcttcgcttgggagtattatgagatgcctggactcagccgatcaattgtagaacatcggctacctatcaagccaggggttaggccgcaccagcagcctccgaggagatgcaaagctgatatgcttgaacctgtcaaagttgagattaagcgtttatatgatgctggttttattcatccttgccaatatgctgagtgggtttctagcatagttcttgtcatcaagaagaacggcaagttgagggtatgcattgattttagagatctgaataaagctacaccgaaagatgaatatccaatgccagtagccgatcagctggttgatgctacgttagggaacaaaattttgagttttatggatggaaacgctaggtataatcaaatttttatggctgaagaagatatccataagacagcttttagatgtcctggtgcaatcggcttatttgaatgggttgttatgactttcggcttgaagagtgctggagttacatatcaacgggtcatgaattatatttatatgatataatcggctggctggttgaggtctatattgatgatgtggttgttaaatctaaggaaataaaagaccacatagccgatttaagaaaagttttcgagaggaccaggaaatatcgcttgaagatgaatccgacaaagtgtgcttttggtgtatcggctggccagttcttgggatttcttgtccatgagaggggaattgagataactcagagaagtataaatgcgatcaaaaagattaaggccccggaaaacaagaccgaattgcaggagatgatcggcaagattaatttcgttcgaaggtttatttttaatttgtctggaaaattagaaccttttacaccattcttgagattgaaggccgatcagcagtttacttggggggaagagcagcaaaaggcgttggataatattaaaggatacctgagttcccctcctgttttgattcctccacagaaagggataccttttagattgtatctgtcggccggtgagaagtcaatcggctcggtcctgatttaggagttggatggaaaagaatgagttgtattttatctcagtcgttggctcttggatgcagagactagatattctcatgtggagaagttatccttatgtttatatttttcatgcacgaggttaaggcattatttactgtccaatgaatgtactattatatgcaaggccgacgttgttagatacatgttatcggctccaatattgaaggaagggtttgaaagtggatattttccttaactgagtttgatcttcggtatgagtctccgaaggcgattaagggacaagctgtagccaattttattgtggaacatcgtgatgattcaatcggctcggttgaaatggtgccatggactttattctttgatggatcggtgtgtactcatggttgtggtatcggcctagttataatttcccctaggggggcatgtttcgagtttgcttatactattaaaccttatgcgactaataatcaagctgagtatgaagcagtgcttaaagggttgcaattgctcaaggaagttgaagccgatgctattgaaatcatgggggattctttgatggtaatcagtcagttggcagggaagtatgaatgcaagaatgatacattaatagtttataatgagaagtgccaagaactgatgaaggaattttggcttgttactttaaagcatgtatctcgagaacaaaatattgaagctaatgatttggcccaaggggcatcggggtataagccgatgatcaaagatgttaaggttgaaattgcagcaataacagccgatgattggaggtatgatgtgcatcaatatttacataatcgatctcaatcggcttctaggaaattaagatataaggcgttgaagtacactctattggatgatgagctttattatcggacggttgatggagtgttactgaagtgcttgagtgccgatcaggctaaagttgcaatcggcgaagttcatgaaggaatttgtggcactcaccaatcggcccataagatgaactggctacttcagcgtgcagggtatttttggccgacaatgctggaggattgcttcaaatattataaggggtgtcaagattgtcagaagtttggagcaattcaacgagcgccggcgtcggctatgaatcctattattaaaccgtggccatttagaggttggggaat

SEQ ID NO: 14456 - DNA, 889 bp, Oryza sativa
catatatgtgttcttcaaggttcactactagagaaatcatctttgttcatggtttataagcgcaacggaatgtgattttagtcccggttcactagcttgtcaggggctatcagccccccctatctttagtcctggttggtgttatcaaccgggactaaagttagcttcctttatatatgtcttcttccagcctgagctaagcttcaaaatttcttgaggaggagggaaggtgctgccaaaatttattgtgaatttattttggtgataatatacaaattggaggcgtctaaaaggttagcaacttcatcctccaatgttttttgcttagcatattacatttagagatatgttttgcatacattattgcctctaaaaactttgatggaagttgatgagaaagaaaatttgtgtagggaggaaagaatatagaatttttgtttatgtagaattttataaaatgttttgataaaagagttgagaaggaaaaaatattgaaaattaatctaagagaacagaaaaaaagttaatttaaaactaaaataagtacaacacattaaatatgtgtttgcaacaataaaaataattaaaacaagaataatatgtgggattattttataattattgtatgaataattatatacaattattgtatgattgtttaattggtttgacttttgttgattatttttacgatttttgtgtatttcatgtagatggatcggcaatggatgtacgcggaccgacggtcaaaagagtttattgatgacgtgcattattttttgagagtggctgatgctaacaagcataagggttttatctgttgtccatgcaataagtgaaaaaaccagaaggagtattctacattaagaactattcatttccacttatt

SEQ ID NO: 14457 - DNA, 8083 bp, Oryza sativa
  unsure (1)..(8083): unsure at all n locations
agaagaagaagatcgaatttgtttgcatgataaacaaaagaaggattatttgagcgaggggccgcgattcaaattttgcagccttttacaagantaaggaggctcttgccgggcccggccttattgccaccgcgggctccccaagtcctcccattgccacaagccgccgggttcacttgtccgccctcccgccaccccagcgggccacagtccattagccgccgctcgcaccgccgccgactcccctagtcttctcactgccgggccgagctcgccgtaccccgccacgtgtgcctccagccaccgccgttgtggtctcctccgtcttcgtcgcagtggagctcagcccaggtgccgccgcgcctccgcccctcgccaccatctccgcctgccgcgggaaagagagagggaacggcgaggagagagagggaactgagggaggggagagagaagggacacgtgggtcccacaatctattttctgtgtcattgacaaatgggtcccacatatattttttaatctaaatgccaccttaacgccacgtcaacgccacgtgtaaaggagacccggtcaataccgccacgttagcgaaaccgccctccaaaaccgctgagggagtcaaattgcaccggtttccatagtttggggggtcaagatatccggttttgtggtttagggtcacagattagatttcaatcacttttgaggggcaccaagtgaacttattcctgcaagctgggatgagccgtgggccgcggcctgtgtctccatatgatggaccatcaaagagttggtttccaagcgttcggccagaaggctagaaagacgtgaacagagacagccaatggcctactgccgagaggcccaaaagttgctaagattggtcgtagtttttgtcggcccatgtaggatagatatgaggtcccttactttttgacgaatccaatttttatccttcaaccaaaaaaccaaatacagcggtcaaaaccggtgtaaactaactccgaaggcggtttggacggtggacggtggtttcagctgaggtggcgctttgactctatctttatctgacgtggcacatgaagcaaaatctaacaatttaacaaataaacaaaatatgtgagcacgcatgtcagtcaaataataagattgaaaaatagtagaacccacgtatcagtggacctactttctccacctcatccccacttctatgtatcttatcctctcccaagggagtagggtgagcaaagcggcgcggcgcggtggcggaaattcgctggcgacgccgatcttcacagcttcggcgctcccaactcctttcgccgtcatcatcacgccttcttcaccgagctccactactgtcttggtcggcactcctactttcccacctgttttgacgatgacgatggcaacatgttcgaggatgcacacctcatcttcttcttcccagtctcctctgtcttcgcaccaccgtccctcgccatgtcagctgccgccgcatcatacaggcccctcttctccctgctcccacagcatgccacactcccccttttagccgccggacccctctaagcgcagcctttgccacttggtccactccacctccttcctccccttcatttatttcgactccctcgaggacaatgctctccactctgtccccatccttttcagcactctccaacttgctcgtcgtcctcgagccccgtctccgccgtcttacgcgccaccccccgacctcgacggcatcctcgccatgggcagcggctcgccgcgctgtcccctcgccatgggtggagaaaataggaccaccaacatgtgggtaccattatttttctttatcttagtttgactgaccatattttgtgtcaattatttagttttcaattttgtttttttccaaataaaactgtcacgaaaaagccacgtgtaacaaagatcaagttaaattagtcacgtatgtaccgcgtaagccaaaactagagataatagtaccgaagaacttcgtttgcactggttttataagttaagggggtggttgtatctggttttcggtttagggcgtaaatcggatttggtatcaagttaagagatatcaaatgaacttattccaacttagtttcggtcagcccatatgcacaaaactcatggaatcagccgtaccttaattgaaggaaagaaaaagaagaaagaaaagatactgattttctttttagaaaatgaattaaaatccggctacatcgatgtacacagcacagaaaagatactgatcggtaagcagacagccattcgatctcttgagatgagctcaacacgcggggggtgcacgcaacaagatcacaacaaagcttgcgaatgaaattatactactccagtacttaagtatactaagcattgtctcaaatttcaatgctgggtgagcagagcaccaaatgattccggcaaagcacactccagtagtagcaaatcaatcaatcattacaagggagaggggatccaagtttttgaccagctttgacgaatcctcactctcctctctggcacacattcccccaaccaacaaccttactagaacaggataaactaatacttataagcccagatctagcaataaaacccaccaccaattaactaatcaaccggatccatgagctaaaccagtgtcagtgaggcagtgacacaccaatgtagtagaactagtaggaggtattaatcatacggtaaaaaaacaaaaaaaaaagaagaaagaaaaaaaggcatgcatcttaggggcacttggggccgccttccttggtcttccagttgttgtagcaggggcaggcgcccttgttgccgtaggtgccgggcggcacgcacaagcacttggcgcagcacttgttgcagaacgtcaggcacgccttcttgtactgcgtgttggagcacctccccgcgcacttgggcgagcactcccacggcctcaggttcccgccggcggccacccctccgccgccgccgccgccgcgcccgcgccctcctgccatcacctcctgcacgcgagaaacaagaacgaacaagaacgtcaagattaacccaagattcaagatatatagtaatcaggttgaaggagaggttagagagattgtgaggttaccgatgggaaggcgatggaaaggaggaggaggacggcgaggaggaggaaggggatcttggtggaggacgccattggtgggtgcggtggtgtttgggtgggttagggacttagggtggtgtttatatagaggaggaggaggaggggaggacggcgagattggtgtggagccgtggaggagtaaagatttgtgcgtgcaggtgcggtgtttggtgatggggttggggttggggcatgtgacgcgccacagtggacgcgtgaaccggtcgatgggcgcaggcgcgcagctgggccgtagcactggcatagtgggcattggaaacgcaccgctctcgctctgtccattattgcgtcgtgctggtgttggtggtggcgggaacagatgaaaaacatcaaaaaaccactctgcattaatagttccagtacaggtagtagtagaggttttcaccggccgtggtggaccagtacgatactccttttgggtagctttgggcgggcaattcgagtttcgaggtaacgactaagagcaagttcaatagtatagctaactgctagctccaattcatctatagctaatctaatagttcatttatacaatagttacatactacactattaatacctggtcccacctgtcatacacacaccgtgtcttggagtccgtgctacagctagctataaatctgtagctcgctgtccttctctctcctcatttatctccttaaaatatgtttgcagctggcttatagcctgctattgtacctactctaagagccagtttaatagcatagcccattgctagctccaattcatttatagtcaattcatataatagttgtttactatactattaatatctgatcccacctaccataacacagtcttggagtccgtgctacagctggctacaaatctgtagcccgctgctcttctctctcttcctttatctttttaaaatatgtttacagctggcttatagcctgctattgtacctgctctaataccgggaatcaaacgaacccgaggagatgtaagagcaagtttaatattatagcctactactaactacaatttatctatagtcaatttaatagataaatcatacaatagttgtttattattttattaatatatgatcccatctgtcatatacacattgcgttttagagtccgtgctacagctgattacaggtctgtagcccactactcttctctcatattttatctcattaaaatatgtttatagctggctaatagtctgctattgtaactgttcttaacaaaaaaataacacgacgaggtggtgagatgctactccaagtctagattaaatcggtgagtgggtcatatactataagtaatagtactccgtagtttacgtccactagatcggcggcacatgctgatgccctttttccagtgcacctccactagctactagttctggtactccattctactcctggagagggcaccgcacatgcgcggttcgtatccacagcttgcgggcaccgcacatggatgatggatcgttccaggtttgtattcaccacagctcttgcggcacatggactcccccatctctttaccctacagattgtcgtgcactcgtgcagcagttcaattcgccatgtagtagtagtagtaaaaagtaaaaacttgtatatatactcaggtacttgtactatagtagtaaaaaggcgtccctcgtcgtcgcagagctgttcaaaatttcggttgcacggggcacgagggcagccggcaaaatctccctgttttgctgggggcttttcgcacgccaaaagtccaaacgctctctcgacagggtttcatttaccggggtaaaccgcgcggttaccgcggttaccgcgcttaccgcgggggtacggtaaggggtaaaccgcggtaaccgcgtcaaattcaaataaatttgaaaaataatttgaatttttgataaattttgtacggtttgtcgcggttaccgcggttaccgtgcggtaaccgtgcttaccgccggggcgcggtaaccgcggccccggcggtaaatgaaaccctgctctcgatctttccgtttgcaatgcatgccacgcgagcgcgagcctagatccgcggcgcgaccggcggtgtgtgtgctgctgctacgccgccgtcaccggctttccggcatccacgtggtggggggctgcgtacgacggtacgacgacgaacatgcagtgtttcggggcccagacggcggtggtcggcaggcaatggctttgcttttggctggcctgcgactgcgggagggagaggagggtaacatggggagcggcaggtgggcttggggaaagtatttacagctcggcgtatgggacgacgattactggtggccggtggctgctgctgtttactgctactacaactgcaacccttcgttgccttgtcgatttgtcatccgcgcgagagcgctccgggacaaatcgatggtgtcctcactgccgactctctctcaagaagtcttgggccgtgtttggtagggctataaacttcaactcctagctctaaattgctatttcagttggagctagctcctattagagttggagacccatccaaaagtgtttgacaagcttttagctcccgatctaaaaaatattgaaaaaaaggaatccctgctgccggccgtgcgccgcccaagcatcgtctccacgcacgccggcctcgcgctacttcccctgcaccacccatccgcccttgtcagcgtgccgcccgtcacaggctgtgcgccgctcacacgtcgtcctcgcttgcgccgaccgcccccgccggagcaccgttgcccgcgcaccccacccgtgcgccgtcgctgctcgcatcgcccgccgtcaccgcaggagcgtcaccatcggcccgctgcctttgcccacatgtgggagttaagttttggggggggggggggggaaggggagaaggtgagcttgggataattcagtgacatttttatgtgaatgtgttaaaaattaaagggtagtggatcttttgggttggagtggagctgtggagcagaaaaaacccagctctacacctgtagtttattttttaggagtagctctactaacttcactccaaaaacagaaaatatggatcgtttggtacagctccgactctagataagttggagttgaaagttagagccgtgccaacggaccctcgtactccagctgagttcgcaatgttgcaatgcacgggcgacgatcgtcgtccgtggagtgtagattcctatcattttggtgaccttgcaagagggcgttgttgatcgatgatgcgcatttcggccattgcagatcaggtgaatcacgattagcgccctattgtttaggttcccggtcaatatggtcttactactgtatatgcgtctgattaatttcgaattatgtttatttatttcttctccagcatgtgtagtgctccctccgtcctataatatagcaatctagtataagacgagatacttcatagtatagcgaatctggacatgcttcatgtcatgtctaaattcgttgtactataaagtgacccatccggttctaggttgctatattatgggatggacgaagtagtagagtatgggtgtgttcggcactgctggttcctaatcttttccatctcgttttccgcgcgcacgcttttcaaactaataaacggtgttttttttaaaaaagtttctatatgaaagttgcttaaaaaatcatattgatccttttttaaaaaaaattagctaacactttattaatcacacgctaatggaccgctccgtttttcgcacgcactgttcccggctgggaacctccagtagcgaatacacccatatgtgtggtagagatctggatcctctgccttaggaaaaaagcagaggtgcacgataaaatgagtctactactatggtagaaaacagtgatttgcagttttcactgtagcaacagtacaaaacagtgaaaaatactgtgcgcaattactatagtgatcgatctcgtccatttcgtgtgaaccagacaactgaaaataccccaaagtcacggtactgttttacctctgactttaaccccgggaccttaatccgtgtggtagtagataatatgctatgcacatctcccgtgaggcaaagcgtaaccttgtggattgtcctccccgtgcgtaaaaaaaaactaaaatgtattcgatagaaaattaagtttaaaatcttgtatttttcttacctaatgatttgctttgagttccgtgctctgatgacccaagctcttattctacagttgaccccttctcctttagttctggtgaccccctacaaacagtaatggagctagtgtttagggtcctcgattatggctaggggtaaggccgtaagggtgggggagggggaagagagggaagatcgctggatttagaaggatggtcatgggaggcggcggctcggtgttgggtcgtggacatgagcaggcggtgaggcgctcatggcgacgtcgaagccatgagaatagaggaggatgatgagccatcgttaatgacgggagcaaagcaaacttgtggtgaggggcggatcaactgtgttaggtgtggtgtcacctgacaccaatagattcttgtttaatctaagagcaggtttaatagtatagccccactattggctccaattcatttatagacaatctaatagccaattcatacaatagttgctaactatacttgttggcggatggcatgaggcccttcgaccaaatttgccgaaacccgtggcgaaggctatgaaccaaagatgaggcgaggcgaagggtcgcgtgagtacctgacgaagaaggatgacttcgccatagccagttcgccctggcatccagcgaagaaggacggcttcgccatgtccagttcgcccccgcaagggccgaagaagccttttgggcactgcagctgaggttctacgcc

SEQ ID NO: 14458 - DNA, 581 bp, Oryza sativa
catggattgttgatcgacattcgagctcggtaccctgcactcaaacacaagagacaggaatactccgttgaggggttgatagcgtctcttgatgttgaggagaaagctcgggaaaaagatgcggcgtctaagggcgatggtgggcagtccattgccaatgttgtgcaccaggcccagaacaagagcaaggggaaatacaaagctcagcagaccaccaacttcaagaagaagaagaacaacagcaatcctaatcaggatgagaggacttgctttgtgtgtggtcaacctggccatctggccaggaagtgtccacaacgcaaggggatgaaggcacctggagggcagacctctaagtttgctaatgtgaccattggcaacactggagatggaagcgggtatggtaatttacctactgttttttcagttaaccagtctactaattggtgggttgatacaggggccaatgtacatgtttgtgctgacatctcattattgtcttcttatcaggtcgcacggggttctaccgtcctaatggggaatgggtcacatgcttctgttcatgatgttggcacggtagatct

SEQ ID NO: 14459 - DNA, 4659 bp, Oryza sativa
tagatatataccctacccagaatgttaggaggaacaacgaacggtgctattttcaattggattgctgctagcactttagctttgtaattttcgagcgccagccacatcatgtgctgttatgccttgagaattgtcgtccaattgtccatgctgccagtgccaggcaccacaacgtcaacggtgaagggatgacttagcactatcggtagctttctcgaccaatgctacaaatacataaagcgggagggaaggggacttctaatttgttttatcttctccgtttacgatttctcttcaaacttctgtatgtaatgtactcgatctgattaattacttttcttgatatgactctacatacggactgtatctataaatcttttttctactttctataaataagattatattatgtattaatctccaccatcaaaatagagatcttctacaatctaacgattaatatctttttctttttcttcgattaatatgggaatttctaacgctcacagcgaacgtggtgtcttctttcaaagctgttttaataatataatagatagatgttgtattgaatgatgggtaggtgaggggtattgaagtaataaaatttctcgttttgcagattggtggaacttcgtaggcaagaagtttgaagttggagttggtttattttaagacaaatttgaactttagaagttgatttattttgggattttaggatttaaattttatcccaaaagcatgttattttagagtaatttttatcacatcaatcacctcgaattcaaagttttctttattctactctcaactatcatctcactcccaaccccatatcatttatcataatcatttttgttaaaatttagattttactatcttcgtcccaaaataagtacagctgtgggtatccatgtcaaacgtttgaccgtccgtcttattttaaaaattaaaaaattaattgcacataaagtactattcacattttatcatctaataacaataaaaatactaatcataaaaaatttcaaataagtaggatggtaaatcgtttgatatgaacagtataaaactaactaaacaacctcaaatgataattattgtaggacggaggtggtacatattgaaacggagggagtaaattttatactcctgcgtagtaatagtactagtagttgtaatcttttactcactttgtccaaaaaaaacttaagctaggtgaagatgggatccatcattctatccaaatttcttgtaatataatagattgcatttccacctagattggtttattttatggaggagaagtgtacactatgactgtttgtttatgataagatgcataatttaccttaattattgttagcacgattttcaaactattaaataatgtgtcttgcaccaaaactttttgtaaatgatgctctaaaatataaataaattcatttttaagtttgtaataattagtatttaatttattattcacccatagcttatctcgtattatgtgcatcaaaaaatcttttatcttaacctataacaaacgaggccgtcattccatctagaccccatttgttataggtggagtgacagccttgctttattcggcaatagtttaatctcgtattgtgtgagttaaagaaaatatttatcttgacctacaacaacgaggttgtgtttaggctgtgtttagttccacgctaaaattaaaagtttgaagaaattggaacaatggtacggaaaagttgaaagtttgtgtggaggaaagttcgatgtgacagaaaagttggaaatttgaagaaaaaagttggaatctaaacagggtcttagaactgctggttcacatctcctatttctcgttttttgtgcacacgatttttaaactgttaaacagtgtgtttttttgccaaaattttctatacgaaagttattttaaaaaaatctgtgcatgctaggtaggcatggtttagttcctaactttttcttcaaacttccaacttttccatcacattaaaactttcctatacaccaaacttttagcttttccatcatatcattcaattttaatcaaactttcaattttaacgtgaactatataacacaccctcctattgttgcgaacacagccagttggagtggcgggctcgctctactcctagatccaccagattcgcatcaaaatactctgatgcctagtataccagtagatactcccaggtatacttacactgtttctcggtactcccatttactggggtagtactcgtagcacgaagtaccagtacactctactcctattcgtacctcttactcgtaaagctgtagcctgtaggagtatttatttttctccgtccacgcaacgcattgcattgcaggctacagtacgagaagcaaaaaaaaaaaaaagctttcagagccaaagtcgtgacaacataatctcaaaaggaaaaaaaaacaaaagaaacaacggggaaaggaaatgaatcgccatcaatgcaacgcaacgcaacacaacgcaatgcacccccccccccccgcccttttcccgggccagtttcgccgtgcccaaatcatgacctcgcgcacgcacacgaacccgcaaacacaaacacacgcgcgcacgcatcgtttcgcactcgcaagcgcaacgcgcaagcggtgatccatccatcatcccaatacatccagcgcgtcgtcaccgcgggaagccagcgtgcggcaacggcaagcggatcggagctcccccgtccatccatggcaaccacctgccgcggccgggctgctgcgcgcctgcgcctgcgcctgcgtgcagcgatgctcctgtcgtcctggggctctgctgctatcgtcatttccgcagtaattgcggggctgtccagtgtccatcgcttcccgcgaaaagtgggaagcaaatgcggtggcagctctgccatctctgggcgctagctgctgctctgccttgcctgcctagcttccgtttctcctcgcacgcatcagcagcagcagcagcagcagcagcaggtcgcatgcgccacacatttcccgtaacttgatacagccactaggggtacgctggtcgcagtcgcagagcaactagctggcccgcgcgggcagcagagtgcagaagaagaggtgggggtggaggggttcacggcttgatagcgaaaagaaaacaatgcccactttcctctttcaaactccacgcactctctcggtttctcgtgacacaaactatggatgatcggataacgtaactttcccttgccttggtggccgacatatcggcccgatagtggtgaggcttacagtacatatttcacggtgaatagtcacgtcagacgatccttttccgataatagagcatcaacggagttgtttgaaatgcttgatccagagattaatttttagtctttatcacatcggatgtttggacactaatttaaagtattaaatatagactaataatagaactaattgtataaatgatagctaattcgtgagacaaattttttaagcctaattaatctataattagcacatatttactgtagcatcacataggctaattagagattaattaggctcaatagattcgtctcacgaattagtccagggttatggaatgggttttatcattagtacgtttaatacttctaattagtatcaagcatccgattggacattgactaaaaattggttataaagaaaaaaaatcagtcatgtccgtttggcgcacacactctctctaaattcaatgcatggttattttatctccaactacctgggtggcccgcgcgattgcacggttagcacataaaaaaatcatatattttttagtatgattttacttaaaatttattaaatagctaactcgttgtcttcaaactttgaaataccaaatgttatcatccccgtgtttctaattatatagtttttaaaagtcacagtcgctaccccttacttctgacatctcctttatttatttgctcgatctaccactatttatattcattcttcttggaacctttaaaaattggatcttatagtttttagagtttattgccttgttgggtttctttttataatttctagaagtcccatcaaatgttgctattatactcctttatggcccgttgacggagctcgtggcccctcaccgggagaccgcacaggcccccctttgccggttcggccgggggctcagggtgagatctcaagctctcgctgtagatgacggaaagatcgccacctctcaagagaacatgaaacacaagcgatgtatacaggttcgggccgctgagaagcgtaataccctactcctgtgttttggtggatctgtgtatggaggagctacaaagtgtgagccgacctctccctcgttctaggctctgaatctggaaagaatcaaccaacccctttctctatgggcaaggtcctccttttatacttcaaggggataccacatgcacccctccctttccaaactggacttttcttcttttataaatggacggagatttgcacggtcgtcctccgaacatcctcctgacgggacggcacatacctacctccacttttgcctgaggcgggcacgtcctgggaaggtggctgtgtgcttacaacatgagcagtgttagaccggtcacaaatcggtattttttg

SEQ ID NO: 14460 - DNA, 5165 bp, Oryza sativa
  unsure (1)..(5165): unsure at all n locations
ttcagttggtgctcttttgcatctaggtctggagtagtgtgtgtgaatgtttgcatgtacttgtgcttcaagggaaaaacagcctgtgtttgagctgtgtttttcaatttttgttctttttttataagactctgtttgtttgttgggctttctttcaaagccggttcaatataattgatctgttaaaaaaaagcttgttgctgttattgtgactttgaagggaccaccattccgcatccatttgaaagttactgtggagatgccatggatttcgagaagatggctttggggagacgtactattgacaatgagcgaatcatcagtcatgggaagctaatagcttgtcgacggggtacatttggagaggactacatatatttttgatcctgctagggactctaagattatccatgcttttaacaagactgctttggcagcgaagcttaactggggggatgaaattagagaatcaaaggttccaaaatgaaaaggaaaaggaaattagaagaatcagacgaagtgaagagtaagaacatacggcaaatggaagcagagtaagaacatacggcaaatggaagcatattgatgccttggtaagcatgtacttaaagtgttacttgcttgtatatgtttcgtgtactgggttttgaggtgtgacctggctgaatttaaatgttggtgcaaatctgaccctagaaccctttggaactagaaatttcatacgaatcacatagaaattgcttgttactgtttttacttcctatatgtgatatctagaacatagctggcaacagaatgatattgcttctattgttaacgaaattaagtcatgatacttctccttatgttggtgcaagtttatactactccttgtccaatcgagagcgactggcatccactcactatctaacccatcatatatctctatacataactaatcatctcactctaattagaaataaatacattgctacctttaagtggatgaaacaatcctaaaaattcattaatatatcctaaattatgtgaagacatctatagtatacaagacaatttgttatttaaagttttaaaactcacaaataagatatgctaaatattccaaaaaaataacatatggtatctagagataggaaccaactctattattactacactattttctcataaattcaacactacacggtttcaaacatttttagtttaaaatttatatgttccaagggtagttagcaaaaagatcataaccaatgcccaaacaaattactaacgaaacatgtttaaaatgaagtaaaaaatatttagaaaaatatcaccaacttataaacatttgtaatagaaaatttaagcaatattaaatatacccacgcatgtatgtgggctaccttagtttaatttaattgatatttgtgaggattacatatgggatcatctaagtcaatagaagtgtgccaagatgttaaataatctaaacacactttgtgaagatgttattttctgctactttttaaattccttttttttaattatatgtacgatttgcccatcaaagtataggtttcgcacggccttaaagtgaaggctactcggcctcacggtcatagaatgagaaaggaagaaacatgccgcgcatgtaaccaacatcaaagaaggagacgtaaacatgtaattctttcaccccaaaatgaatgcacacaaaaggaaaaaaaaaaccacatctatcgattgcgtaagcacaacagatgggcaatacaacacacataaaaggaactttccgttgccaagcacctctagcaagtaatgggccaattggagccaagaacgcaagatctcaactggtcttccatgaggaccgccctgatagaaatgtctagttttaatgaccccattcacataatcagggattcgcaaggcgataaatgaaatgttggttgacaaggcaccaggcccagatggcttcactgggaaatacttcaagtcatgttgggacatcatcaaggacaacatcgtggcggccttcaacgccttgcatgacgctaggagcacgcacgtaaacctgctaaactcagcaaacgtgatcctcattctaaaaaaggatggggctgagggaatctaggactataaaccaataagcctggttcatggctttgccaaaatcttctccagagttctggccatcaggctacggccgctcatgcactagctgatctcaacaaaccaaagctcttacatccccgatcgaagcatttacgacaacttaatgtacgtcaggaatatggtgaggaaacaccacatgagtagaagaccaatcctgctctttaaactagacatctccaaagctttcgacttgatgagatggggctatatacctcctcaccttcaaaatagagggttccaaaaaaataagaggcagaactagataacgggcctcctatccacctccacctcaaagatcatcccaaatgggatcccgggagaagcgatcagccatggcaagaggctacgttagggcgacccactatccactggtgattagcaagatgcgaggtagagccgtccgcttctgcacatccatgtacaccgacgagacggtcgtcttcataaatccagacaaagaggacgtaagggtcttctctgagctactccgctgtttcggtcaagtaacgggcttatgcacaaacctgctaaagtcgcaggtagcaccgatcagatgcaatgacctggtccttgacggcatccgagattggaaataggcctgtaataaaacttctccttttgacattgtacgcggattagttcttactacgctaacactacaacacgttacaggcccaagagcccaatctaaaatattctcctactactactgcttcatcaccaaagcaactgattttacaatgccgatcgcagttaacgctctctcaggattcagcaatcaaaaaacaggttcacctccatccatcgtcagaactcagaactcaggcaaatgatattgatcctctttagtcagtctagtccctcggccgcgccagccacagcgagctcagcgcccggagccgcgagaagtagtcgctgatgacgagcagcgcccgcgccgcttgcctcgtggtcaggatccggtgcatctgctgcagcgtctgatgcctcagcagatcagcctacacacaatcaatcatcgcatcacgctgtggtaatgagcaattcagttcgcctcgccgtcgatgtttttccgaagcttcaattacctgacggaggaagttctccagcgtggtgagcttggccatggcgatggccatctgtcccatgtagttggtgacgttgtcggcgccaccgctnccgcttaccacggtgnnngnccgccgacaccaacgtgtcccccagcgtctgctgcagcgcctccatcccctgcgacagcgcgtcctcggcctgctgcgacgactgctgcaggttgcagatgcccatcagctgctgatccgtcagcggctcaagatggctggcaagaacctgcacaaacaacatcatcaacaatggcggtcaatggtagcttcaaattctttgcttgttgctgaattgggtgggtgatcactcgatcgtgtcaaaaccttgaggagctccgacgagcggaagccgccgagccacatgaagaagcgctcggcggggctcatccacatgccggagaggacgtggaacacgtcggacttggtggcgaagctcttgaggcggaacacctggtcgtagtgcatcatcacggcgtcgacgagctcgcacagctcgtcgtcgctcatctgcgcgttcagcgccacccgcaggtcgttgatgtgccgctggtgctcgtccagccaccgcgcgtactcaaggtcgaacgccaacgtacctgcagaagcaaacacaacacaacacagaatcagaattgcgatgtttgcgcagatgccatgacagatcagagaaatcaagcaagtggaaaacaccaccatttcctccgatcgagtgcccgtgatcgccggagcctccagttgcaatgaagattccctgtaaaggatagtcgtcaattgcatttgcgtatttgttactgagctgttcagacttcaaacattagattctgcaaggcgatttgataagtatgctgaacaatgcagggctcacctgctgtcttgccctttggagctcctgctcaaggtgcatcagcttggacctgctgctctccaactgctgaatgtatgcctacgacaaacagcaattcgcaatgtctttagtcatcatcaataaccacaaaacaaagatgcaagtaacagcagagcatctactcccagaacattgcagcaacggcagcagcagtcaacattgattccgaagcaattaatgctctagtatatttaacagatattgtaattgtcccattaatcgaatgaatgatcgataatgtataggttcagacgatcaccttcttcctcatccggctcttccgcgccgcctcgcgattctgcgcaagcctccgctgcatctgcacacaaattcggggacaaatcatattcagaatgaacacaaccaaattgatcactcatgagatcagattccgtttcccctctgacacaaaatgactgcaccttctgatcccctcttctttccttggacacggcggaggaatccgcgcctcgctgctcgccggcgtcgtcgccgccatcgccgccgccctgggagtagcacgagaaaccgcattacacgagtggagccagccaagaaagacggcggcgagaggaggtagctggtggcagtggcaccactagagcgtggaggtggtgcttgtcggcgctgtcgtcgaggtcggtggaggtgtcgtcggtgaacgggctgctgacgatgacgccggagtcgccccagttctccacctgcgaggcggccgccgccgccgccgccatcctcggcaggcagaaccggtccgccgccgtcgccgccgccatcccctggtgcgccgccatgcccaccaccgctacgccatgctgctgctggtcgcattgcatcagccgaagaatcaatcaatcagcaagaagaaagaaccaaactcaccncggcggcggcggcggcggcgacggcgagcggcggaaggtgtcctccggcggtgaggttgctcgacgacttggagctcggattcggaccttttcaaaaaa

SEQ ID NO: 14461 - DNA, 3073 bp, Oryza sativa
  unsure (1)..(3073): unsure at all n locations
agagattgatgagaagggaagatggcgccatctccgatgtggtatccagctgtgccgatgccacccagctgctgctcctccgccctgcagctgaacagtagcaccgccacgggcgtgacgccgccgcgcaagccaacaaaaaaggggttagcgcgatgccaagctagagcttacagccaagcatggcgtcgtggtccaacacaaagctcgtcgcaagacgacacgcactgctacaacactacagtacctagtagtaaagacgtgtgacggatggtggtgcatcggcggcgacggcggcggcagcagcgactgcaagcggcgaggacgacgacgacgacgacgacgacgaagatgaagaacaatggcgacagcgacagcagcgtacgcttgcagccgcgctttatagcaaggatatgaatattgtggattcatcagacgatgcaagaagagagggaaaagatatcatgatccggacgtgtcgatcggtgcatgtcagagatcgatcgatcagtgcagtcgcagaggcgtcaatcagggtcaaatgtcaatcaaccgatggtggtggtgtagtattcgagtgtgcttgcgtactcctacagagctacgcaagcgacgacgacgagagaggccgtgacaggggaaaaagcctggaggaaccttgaactgagcgttgtggattgtggagtaggggaccctgcagcctgtgcaggttttttgatggttcatcttcatcatccctctagtgatgtggtagccatattgttgtttggtccagggtcggaggttggtgttgcaacttcagttgctctttgactagagggtctatacagtaaagctgcgttcgtgtgtgtgatatagggtgagaaagcacctcgttttccgtgcgcacgctttccaaactactaaacgttttttataaaaattttctatagtaaagttactttaaaaagtcatattaatctatttttaaaatttaaaatatttaatactcaattaatcatacgctaatgactcacctcgttttacgtatattcccaatctccccaatccactcctcctcaaacatacctacacctaggtagtactacgtagaggcgtgaccgcgaacaggacaaaagtgcggggggggggggacacttcagatactctaccctcattaattatagagtaggagtagccggttgctcacgggtgctgtgtatggagagcagtgaaaggctcgtttaaaacgcgatgaaaaaaaatacttgagaaatagaaacacatgaagtagtaagattttggcataatagtgagcgtaaaaccaacagttgtaaatcacaggaaaaatatgtaaatggtcatttaattagtcagtagaaattaaatgtgggaaataaacttaaagataattatagctaacttttctttaaaatctctatattattgcctattttatagggattttatagaaaaaaatatgatttaatcctatagttgaaatattcttttaggaaatttttctagacaattaaaatcctccgacagccggcattagcaaccatcgttgccgacagcttaggtatggatatagtacgatctggagtaggaaataatgcccccccccccccccacacacacacaatttgtaagaaacatatagaaaacttggggcatttcaattctataagaagaaaaatactaggatggcttttgaaataaatgattgaattatatctttttattttgtaattcttattgaatggacaatatagatattttagagaaaagttagtacgagattcaacctcttgcaaaattttattgagtctatctcgctcaaccgatttcaacatttttctcccgtggtatattcaaacaatcattcttacgttttcttatatttataatcttctactacctccatctctaaatacaagaatgtagacacgggtattaagaaaataggtagaattaaataagaaaaagttataattatatagtttgaaattgaagataggtggaaaaattgaatgatggaaggttatgattctttgggaagagaagttatattttgagtcaaattctagaaggtaaaaagtttttatattttaggacggatggagtacttacgttgcacttatattcttattaaaatcttacattttatcatctaatagcaataaagtactattcatattttaacatctaataacaaaaaaatactaattataaaaaaatcaaataagatgaacggtcaaacgttgaatatgaatagtacaaaattgtacttattttgagacagaaagagtatcacttaatataattgtctaaaatcaataaaaaaaactaatatgtttcccaagcgagactttgatgaaaacctattgtcctatttgtcagggttatggataccacatacctaatagtagttgactaaatctcggtaggacccaccacataccatgtcttatacgaaaacaaccttcggatataggaggagttccgcataaggaaggatgaatagagttctacgtagaaacgaaaaggactactcggattgtatccatattggtttctctaattctacttggacaaggggatacctatgggtataaatacaaggccccctaggaggagaagggacacggaacaacagaagccacaacatacaagcgaacatacgccaagacaagacgccggatatcgactttagagataggcatggctactcccctacggtgcctatggctactgtcaggagagatatagtgttgtctctgatctcgccggatgcggattcgaggaggaaggctatcctgttgtcaactatgagtcagaccttcagaccgccatgtcgacaacagttagataggctaccccaaatattgtactggtgttattatgatgaataagagcaacgacaggnttgggccaacaggactgccgacgttcatggggatctctagagggnctcgagaggctgtcaaatatcaaccgcggggngnnnnnnngaggatgttgactacgaaaatacnnanntagaaaaagaaagtaaatnnaagacaacgcttctatacatacaagtaatttc

SEQ ID NO: 14462 - DNA, 4270 bp, Oryza sativa
  unsure (1)..(4270): unsure at all n locations
aggtttggctgacaancnagctggnacccttaaattattgcattatcgctttatttaaattcccgcgttatcactgttttatttagccatgcctatttacctttgttatgaccatattattattgttattgttattattataccttgttcaccctagattaaacaaaacctcaactagtggacactctactcgtggtatccctagtttaaatttaggtagatgcttcgcaatttaattaggtaacattaggtggttttataactttagacttgggaaatattcatatcacctggacactgtggaattgttggattattgtggaattggcttcacaccgccccctctattcaaaatcccctaaaatggttttaggctgggctcggggtgcatggttttgatggtagcacctcggccatataaggaccggtcttcgggcctctgttgcaaagcactaccgtacttccacatgtctaatgggtaaggcttagtttgtggctcagtctagtcataaacaaaagtacacggattggagatggatgaagtcgggtgtcgatggacattctccagggcaaatgaaggctacacgagctgcggcccggtagtcgagatgtcatatggcagagggttggtgccctgctgctaggggctcagttctgcctgcctgtcccgggtatcccggccgtaggtgggattgggtcggtactcttgtctaaggctaggatgggttggaaactatgtcacgtcttccgtctgtataccgtggtggtatgtggcacgtggttacacgtgaggaagatgtgtcttgtgggtaaagatgtacacctctgatcagagtataatctattcgaatagccgagccctcggttatgggcaagccgagcaatgtacccaagttagtgttttaattcttaaaacctgcttaacaactaaaatatggaatggttggcctgggttggcttaggacgagctgggacccagggtcgggttgccagttcggtctgaatcatcgtaggccttgggttaaggcaggttcgtgtgggttcacggccttgattaataatattgtttagttctaggatcgtgtttacaaaatagcttgagcaactaaatgtctttaaatgctgtttactgcaaccctaacccctctatggtataattcccttgtactcccttgcatttattctgcatttgtgggtgtgtcttgttgagtacggtggttgtactcagtcttgctcaatttttcccaagcccagaagaggagctccttgaagatgaaggctttggtgtctagctcgtgcctgccgtcaagcgcctgtggtcgtcgccctagtcttccgctgtttctcgtttgtctctgtgtgtgctgggccttcgtcgcccatgtaataaattaactatttacgcttccgcttgttaaactctgaattgtatcaacttttggtgtaccttgcctcctgggacaaggattaatgcacgcacgtaaggaatgcccgttgggttatttccggtcgtgacaggaatcctgcgcctcgatcatcacagtggtggcgatgagggcagccccccgctcctcctccacctttcgtgcgatctccgccagtgccgtcttgcgggcctcaagatctgagacgtgccggcggtgtgccttgcggcccgcttctaccatggcctccaccgagcgcgggccctcctcgacacgcgcccatgcggcgtcgagctccgcacgctccgcctgcagggcctccacttgggcgctgaacccatctagcaccgcggtgtttgcggcggccaaggcctgcagaaggggctcggcgctcagcggggcgacagaagacgaggggaagagctgccttgaagaagacgccgcgcggctcggcccgccaatggacgcgccggcctcatcgcgggccacccccggacctgtttggtcctgggcgtcgcctgaaggggtgggcccaagcgaggcgtccgcggcctcgtcgtgaactgcctcggaagccgccatcgcctcagcccggcgaacccgggcggcctcctcccgagcggcttcttcggcctggcgaacccgggcggcctcctcccgagcggcttcctcggcttggcgggcccgggcggcctcctcccgagcggtatcctctgcatggcgagcccgagcggcttcccgggcggcctcttcagcttcccgtaggcggtctgcggcctctcgccggtcagattcccgcctccgtgcctctgcggccgccggatcttcggcctcggactggccggacttgggatggtgggaggaacgcgatgggatatcactgaagcagaaagaaaaaccagaaggcaaacaagatgggtaagagaaaacttgcttttgggatagaagaaaagacggtcgcaatgagcgtgggacgaacctgcgagggggtcggttaaatgaccaccttggaggggaaattaggtttccccgggatggttctgtctcccccatcttgcgcagccgcttcttcttgcgctccccctcgggctgcgatgttggcgcggccccctccgggcgcctgctgctggcacgcaccgccccgccccctcggggaggagatgggggaggtgttcctccgattttccttttcccccgggcgtcggtaggacggttgcttcccgagcccccgacgcggggcccataagcacgaccccctcccggggtagattgatccccccggcgggtcccacctgcgccgtcatggcccttaggagcctgctcctctgaggccccgaccgccgtcataatggtcagaatgtaggcgcggtcgggatcgctgcaaagggggaggataccgtgggggatgagggacgcctccacggagttgagatttagcacccgttggaccagtatcttgaagtcctcgggggcccaatcccatctgactccctggtgggtccgcatgtagtcttcggacccggtgtactcccaggcggcccgagcgcgccgctggagcggcgcaatccgacgacggaggtagtcgccgtacaccatggccccggtgagcccctgggatcgcaggcccgcgaggcggtcgaggacggcgtcatagccatcccccagatctaccggcgcccgccagctggaggcctgcgccgggggctggctcggaagtcggagatgcgcttcgtcggcgaggggggtgtagaaccagtcgctcttccagtcatcccactttttacggaggacgcaggggatgtagcggttcaacaccggcccccgcggcaggaaatagcagccgccgaccaccgacggtggcgataccgactgcacggtaaagaaccaccggaacagccggagagatgggcgcaccccaatgaacatctcgcacaggtgtgcgaagatgcccaatgtcatcactgcgttgggggtaaggtgcgccatctggagatcgtagaactccaggacatccatgaagaaagaagaaaatggcggaaccagccctgccattgcgaaggggagaaagaagacggaccgccccgggtagtctggcgccgggcgtccctcacccagcattactatctcacggccggtggcagattccggcatgaagcggcgcggcaacccggcctgcttctcgctcacaatgcgagaaggcggcagcacgctaccatcaagcagtgcggagccccgtgccatggcgccggacgaagagaagatgaagagcgagcgcgtgtggcgaaagaagggcgcagggaagaaggagttaggacgcaagcggcgaaggcaagggaaatgatggcgaaaggaaggagacaaatctcatcctcagtgcctttatacccttgccaacgctgtgcctggctcctcgtttctcgcgcccattatttcgccccctcgtttctcgcgcccacgcttccactaatcccattcgcccgcttgcggcgcgtgagatggatatgcggttgcggcagtcgagatagatcgtatcgtgcgcgcgttaattacgctcgccgaccgaaacgacattaccgtattttcaggcgaggcaaatcggctcgcccagattcgtgcgccgttcaggtgatgtggcagtcttgaagagaccgcccattatttacagccaaattaccattaccggtgtgcatggtttgagacggctgggtttttgcccaacattgagaccggtcccacctgggaacaaggtttaggagtggggttacgcccggccggtttccataagagggcgaacggcctggcataacgcgcggggctatggtggtgacatgggactgggaagttta

SEQ ID NO: 14463 - DNA, 1416 bp, Oryza sativa
  unsure (1)..(1416): unsure at all n locations
catgcgttgttgatcactaattcattccngccgcccgcaggttttcttttgaggatcccctcggctgaaacaagctcataagaaatggcataagaaatttgacaaaacattgacatctgcaagctttgcagtcaatgaggcagataaatgtgtgtattatcgccatggtgggggtgagggagttattctgtgcttgtatgttgatgacatactgatatttgggacaaaccttgaggtgataaatgaggttaaatcattcttgtctcaaaattttgatatgaaggatttgggagtagctgatgttatcttaaacattaagctaattagaggtgagaatgagattacactcttgcagtcccattatgtggagaagatcttgaatcgctttggctacattgatagtaagccttctccaacaccttatgattctagcttgttgcttcgcaagaataagagaattgctaggaattaactggaatactctcaaatcattggctcgctgatgtacctggctagtgcaactaggcctgatatctcctttgctgtgagcaagttgagccggtttacctctaatccaggagatgatcactggcgtgcgcttcagcgagtaatgcgctatctgaaatgtactatggaattggggctttactattctgggtatcctgcagtattggagggatatagtgattctaattggatctctgatgtggataagatcaaagccactagtggatatgtcttcacactaggtggtggtgctgtttcgtggaggtcttgcaaatagactattttgacgaggtcaaccatggaagcagaactgacggcactggatactgctactgttgaggcagaatggctgcgtgatctattaatggatatgcctattgttgaaaactggtgccggctatccttatgaacagtgacaatcaaacggtaattgtcaaagtgaatagttctaagaataatatgaaatcgtctagacatgtgaaaagacaattgaagtctgttaggaaattgagaaactccggagttataacgttggattacatccaaacagctagaaacctggcagatcctttcacgaagggactatcacgaaatgtgatagataatgcatcgaaggagatgggtttgagacccatgtgagttatactatggtggtaacccagtctatgtgatcggagatcctgtgaattagaacctgggaagaacaaaccattagtaaactagaggagagtaccaatctataccctctctaagtgaagatgcatgtactctcgtgagctacaaggcaggttggctatgccttaatgagttctgttggctttatattagccgaaaggaattgggccctttggtttcccccttttggggccccccaaaaaaagaaagcattcttgaaagaactcacctttg

SEQ ID NO: 14464 - DNA, 3107 bp, Oryza sativa
ttgcctagctcatatgcaaacttcagggatactattctttatagccgtgatactctaactttgaaagaagtttatgatgctttgtatgccaaaaaaaagatgaagaagatggtaccctctgaaggttcaaattcacaagcagaaggcttggttgttcggggcaggcaacaggagaagaacacaaagaaccaatcaagagataaaagctcaagtagctaccgtgtgagatcaaagtccagaggcaggtataagtcatgcaaatactgcaagagagatggacatgatatctctgagtattggaagctacaggacaaagacaagagaaccggaaagtatataccaaaaggtaagaaagaagaggaaggtaaagccgcagttgttactgatgagaagtctgatgcagaattgcttgttgcttatgctagttgtgcacaaactaagtgaccagtggattcttgatactgcatgcacctatcacatgtgcccgaatagggattggtttgccacctatgaagctgtccaaggtggtactgttttgatgggtgatgatacaccatgatgggtgatgatacaccatgcgaggttgcaggtattggatataaacacaggggatatattgggctatcacaccctcccagtgcggcttacaagggatatatataggagaaatctaggagtcctaataggaaactaatcctataaagtagagtcctattagataactaatccgaatatactgtcagcctaaaattcggatcacatatttaacggttcatactaaaatttcagatgcatgagtatatagcataatgctaattggaaaatagagtatcctgacaaatgttgttcccttaaaaataaccaaatatgttgaaactatgccatgcaaaaggtcaaacagaagaatttcactgtcacactgcactttcaaactttacgtgagtgttgaattgatataggtggaagaaattattttccttcacggcttcacccaccctatgctgcttagtggatactggattcgattattgtcagttctgaggtaaagaaagagtcgattagagtatagcctatgcaactcaaaaggtatttatttctatttcttttaattgttggaagaaattcaatagtacagtataaatgatgagtacctattttccaccgaagtggaatcggctaaaatgtagttgattggtgcatcctaagatgtgtgtgagtatttagtatttttgatgcaaaaattcacttgaggctacaaaggcatgcatccatagcctcttgccacacctacgatcaccttggattaatctcagtggattggtacttctgtgtcgaaactaactttgtgttagaatatttttttcatggtgatcgagggtaattagggtctccacgcttcatggttactggttctgtaagcttccttatttctttttcagggtagcatgttcgttttgttgattgagttcggtattgccatgggctccttgtagcttaatcatcgccctgatttctgagcatgcctgcctgaaaaaaaaattgaaatcaatttgtgcgatatttagagatgtccccgcgaggtgaagtccccattattattttaaattaattcatgtttgacatatatgtgtttctcaccctattttcagtatttggcacatgttatatctatacatagtgaattatgacataatatctgttaactataaatggagtagggtggcataccgaaatgatatatttattaggtatgtttgatccatgaattgtggtttagtttcaggaagagttatgtccaaagtttggagatctatatattgagtttatcatatttgtaaattatatattcttatgcatatgtttaaaacaatttggtgcagccatctaggtgatgattactcccaatatgtatattaattgttcagagggatcacaaatattattcccatgaccacaaataatattcccataacaacaaaaaaagttcctactgtttttagcgaagtgtattaatttgtgttgctgccaattttaatacaattctcctttgcacacagtttaaatcacgttaagaatctgcagtcagatgcttatggaactttttttaatgcagggtatttttggaactaaacattcccagtaatgctttttttttctctttcaagctttgatgcgttaaaagatctccataaagatgctaagctaagtatgttttctttacgaaattgcatatcgttgcttctttactatgcccttaattcagatagcccttaattctttactatgcccaaaattcagattagcctctttttactatgagggagttttaaattgagaaagcccttaattatttactatgcccaaatttaatacagataatgtattttgctccatactcttttgccttttcaatgattaaaaggtttatttttcacaccctttccgattcagaaattgctgagtgatcttcagggtatatcttccaataagtggaagccaaataaaggtgaaattaggggggacctaataactagaggtaatttctactctgatcttgaaacaagaacaagacatgagcatgtgctatggttggaggaagggcactgtatatatcagattgcttcataacatcacaagaagaaattgtccatgtttaacttttgaaccatatgtacttatttcttggtgcatggaggaccaaaccacctcatagtaaaaagagactgatctattattgagttgtatattcaaacaaaaagaataaagttagatgaaaatcagcattaccttggtttttatattgtgatgcttagctaatgtttggtaaaagtgctcctgttttcagtgattcattctatttgtaaatggactccgagttttttatgtacaacattttatattacgcaaacaatgaaaagcatattttcagtgacgtggatatacaacatttgtattaccaaatgccaccgtagcattaccacgagtatgttactagatagattagtttagttttaggttcagataatagagaggtgaaaacacgtcatcaaagtttgagctcaaatattggttcaggcttgtcatttgttatgtgtagtactacaaaa

SEQ ID NO: 14465 - DNA, 525 bp, Oryza sativa
aaacaagaaggaattccatgaggaaacatgtcggaaggtaattaaggagaatattttcatgattaatcttcttctgcccaaggcagctaaatgtattcttgaagcattttcagtagtatactattgcacttttagtttaactacttaactagtatttggttggtgtttatgcacattacagtagctggtctacttacaagaattatttttcttgacctttagataaaagcccttcatttatatgattgcttgagagcgaacaaatcaacttctgcatggggtgttgaggcccgtgttccgttccttgacaaaaacttcatcaatgtagctatggacattgatcctgaatggaaaatggtatgtacaccggacatcaacttttattgcagttatttttcttatattgtaaccagtactgtcactttctaacacttattatcctgtaaattttagataaaacgtgatcttggccgtattgagaaatgggttctccggaatgcatttgatgatgaggagaagccctat

SEQ ID NO: 14466 - DNA, 657 bp, Oryza sativa
ctttaaatgaatatttgcgaatttcttcatttaattttaatttaaaatggatttattgcgtcagccgaggggagagggcgcgcggaccgggtccacgggagtggggcccacgcggcagcctcacggtccacggtggaccgggtgcacccggctcacaccggccggcgccgtgggtcccatgcgtcagccgcacccgagggcgcgggcggctgacggccgggccccacatggcagccgcgggacgcgcccgaaggcggccacgccggcacagccgacgggaggcggcgcactcgcgccccgatggtcgccgccggcgaccaccggcacggcggagcggcgcccgaaagaggggagggaagggggaagcgaatcggcggtccacggctcaccccgggtcgacggcgacgacgggaacggcgaccggagcggaggaaggcggcggcgcggctcgggtagacggggacggcggcgttccggcgatcggcgaccgaaacggagaggtggacgaggtcggcgaggttgcggcgaacccgaaggaggcggcgccgaggcgggagagggtccggggcgacgacggcggcggaccggagctcggcggcgacggcggagagagagagcgatggcgcgagctcgattccgacggggagagagagcgac

SEQ ID NO: 14467 - DNA, 1663 bp, Oryza sativa
tatagattatttatgggtaatccctataagtaatcgattcacggtagaaatttggatttaactactagggattttaccagtgtattatatttaatcatttagtcatagactaaattaaatcgtataatatttctaggattccgtccgatatttagctcgcgatagaaatttctaacctattatatggatataatgctcgggtagattaaattaaaaacttatgacaacaaaatatttatacccgcaaaatagtttgaatcgaaattgggtttgccttagttcgcgaataataaagttaatataaagaaatcgactttcgcattcgactttcatttggattcatttggatttttatttgaattctaaccgaattcaaatcaattttcgcacgtaactatagagcccgagggagttgcggatccaagcgaaggtcaagacccgcaagacattgagcaatgcaagtcatcactattccttgaacatgttgatcccaattgcgaaattgttttgtttacaaataaaattgcatgcaatgatgaacatcccagttgtgattatgccatgccttgattattgtttacccttaaatctttgtaaccatgtttacgtatgagtccctagtcaactatgacaattgcttagaaatgctattctagaatcatgcatactcatatttatcaaatgctatatgcttgggcaattacctttgggaaggtaattgagatgcggcatgtggagacatgagcgccacattgccatgatgttgatgacatgatttgtgaaagaagaaataaaattaaacaactgttttcgactggggcggacggaggatttgggtggtatctggaaaaggctagtactgtcgccggtcaattaaggaccgagccatgaagttaagcatgaaacgacccccgtacaaccgtacttctcgaatgggtatagacctagcggattagatagccgagcggaggcagtatccctgcatagatggttcacccctgagtgaggcaggtgcgctacggtgggacagccgttgaggtagggccgagaggcgtgccctacatcggtgtcgccattggtaggactgctgtcacaccctaaaaatcctaaatatataaactgttgtttaattggaattattagaatttattttaaaaagcctagaagagaagatctaattttaattaataaattccaatataaaatggggccagataaaatttcattaaatactttgcttaattctataattcctagatttttctgggatttatttgagctaaggaagtatttttaataaatggaattgcatttcatgaataatttaaattgaaaaaatgtttttaaaagtctcttttggctttgggccgaaagtcggcccaaaaccttctctctctccctcggcccagtcggcccagtcggcccagtccgcagccgccgcgcgcgtgcgtccggtcactgacaggtgggtcccacctgtcggacccgtcgtcttcctccggccgcccgtcgcccgaaccctagcgccgcgccgccgccgtctccttccaaattcggccgcgcctttccttctccggtgaaatcgattgaggggaaatgtttcccgagatctcctctaccttttctcttttggaatcgtcggctaaaatcgtttggaaatccg

SEQ ID NO: 14468 - DNA, 2424 bp, Oryza sativa
cttgctttcgggttgagctgcatcggtttcgatcttcaacaagaggtaaaacttgttatgacggcttgtgttctcgggattagtgcttccatctttatgacactctaatcttgtctatataattcgtcaagttatcatatattttacataatctttggcaatatcatcatctaacctacaatcggctaacatccgttaatagaaggcagctgattaggttaaatagtgaagttgtcctagattatatgagatatctaccactttatgaaacacccagtggcttgattgtctagatattattcttcttttcatacttaatgctgcatcagttgagtttgatctattaagtcatgcttagaatatcaatctctaacctgtcctctggttgcctattatggtagtatcggagtttcagccgatcttatctgatttaaccatattcgatctatatgcttcaatgacatgttaaatccgccttttgtgtcaagatatcgtcgcaatctaaatatattaagcttttgtttaatacattatacctgttttaatatcttgatatatagtagtatcggagtattagccgatacaagctagatctatctgatcggctatgctataaacatatataatcctgttattgatatatatttcgatctaagtgatttatactatctcggcatggtgaccgatctatcccaatcacgtgatttaagtatatattaatataagaattatatatcgttaatatctacagccgatcgaatagatttagttccttactatctatttataaccgccgatcgattcatatatgacatcggcttaaagataaatgatatgtcatcggcacctagccgatcggctatcatttatagatttaaccacgaattctttgtctctatttcttgttgataacaggatcaaatcaactagcacgctcatacattcgaaggcgagctttggacctgcactggagttaagcagatctaccctggtctacgtgttttctcatcaagcagtatacacagataatttctatatatagtgcgacaacgttggtgcatactcaatggcacaacagaaacggaacaccacggcctctgtttctcaagcgtggaccatctgcaaaggcttttgactctgtatcctgggaatatttgttggaaatgctacaatggagaggattcggtacgcggtggagagactggattgccttgttattatcgaccaccacatccaagataatgttgaatgaaacaacaggagaggcaatcacacataagagaggattgcggcaaggggacccgctttcaccctacctcttcatattagcaatcgaccctttgcaaaagatactgaatgtggccacagaccaagggatcttgtcaccaataacaaacagggtggctaagttccgaacatcgctatatgcggatgatgcggcaatctttcttaacccaagtcgagctgatgtggacaacctgatcaccctgctagaaaagtttggacatgccacagatctacaggtgaacttaagtaagagctcggtggtgcctatgagatgtgagaacatagagcttcaggaagtgctgaacaatttcaatggaaagcggactaatttccccatcacatatctaggactacctctgttaacggggagaatcaagagagtgcatctccaaccagtcatggacaagctccactctcgtcttgcaggatggaaaggaaagctgttgcaacaggcgggaaggaagacccttgtctcttcggtactaacctcaataccaacatatttcctcacagcgctgaaacccccaaaaaatttcctgcatgatatggataaaattagaaagagattcctttgggctggcgacaaagagattagtgggggcaaatgcaaagtaaattggccagagaaatttgctcgagccttgagagtgcgatggctatagttcagctgggagagcccaaataagccttgggcagggacacctcccccttgtgatgaaatggacagaaggttgtttgcctctgctacaagggtgacgataggtgatggtcgaaaagcgagtttctgggaatcaaattggattggcgaacaaccacggaaggagttagccccagccttatacaatcatgccaaaaaaaaaggtaggacggtctacgaaggattagcaaatgaccaatggatactagacatcaggcacaacctcacagtcgagctagtcaaggaattctttgaggttttctaccacgtgtggaatagcgacattgcactcacagaaggtgttgaggacactataacttggcgatggatggcaaatggaaagtacaacgcaaagtcagcctacatagcacagtttaatggcaggataagctcagcagctgcaaaattgatttggaagcattgggcaccttccaaatgca

SEQ ID NO: 14469 - DNA, 2200 bp, Oryza sativa
acgggaatcagtttgaatcgtaatctgggaaactatgaggtagaggatttggaacttgaacataaccatatacttcaaacaccagaaacccgttacttgatgccatcacaaagaagcatttcagaggtgcaagcatttgaaattgaaatggcagatgcttctggaattcaatcaagagtcgcccatgaatttgctggtcgacatgctggaggatcctctaatcttggttatacttgtcgtgaccacaagaattatctatgaaccaaacgcctaaaggaactaaagtatggcgaagctgaagtgaagaatgatgtgcatcattctcatttgtgctaccatcctcaatcagaacggtgcaatcctcagtctataatcaatctgttttcttgtaagtacgtcactcttgccagtgggttaatggtaacgaagatggagggattattttggcaccaacagaggagtaaacagaaatcatctcccgccctcaccgccagtaattacgaggctatttaactaataatctgttgattaattttatttgctatagactaatttcagccgttgctttagaacggagggagcggatagaaggaatgtcagaggatacgattcctcactatctgtgtgaatttgaacttgggaaaattataggatatgacacggatgagttgtattcgtctgtaagtatttgtattatcgaacatacaataaattctattatgaccctacttacaaacatgataagattggtagtaaatcaccatttataaagctacaaataatattaacatttttacacttcaattgcattcgtaggcttaatatcttagcattgaagatacaaatagatatatgtttcctattccagggttaataaaaaagaatggcataacataagtgatagaatattccagattatatgtatctagctagctccaactcataagagagataagggacaggatatagctttttagcaaaggtcgggatattatattctattatcttaaaaaaagacaggatatggaaaaacggttgtccgacctaattacaccccctatataggtagttttgaacttttcatcttgaaactattgtcttacatgtttgtacaaaggcaaaacctggttttcttgggctgcttttcagcttagctctattgggcttaatgggcttacacccaaatctaggaataagttcacatcgtgacccttaactgtgattgaaatctaatccatgaccctaaaccataaaactggatatctcgacccccaaactcctaaaactggtgcaatttaactccctcagcggttttggagggcagttttgctgacgtggcgcctacgtagcgatattgaccgagtcttcgttccacgtggcattgacgtggcacttaggtggcattagaattaaaaaatgtgtgggacccattagtcattcacacaaaaaaaaatgtgggcccactaacatgtggggcccacatgtcagtcctcttccttcttcctcctccctctctcccttctctctctttctttccccttcttccccttcggccggcagcggacggcgagaacgagtggcgacgacaggacgggcgagggcaggagcggcgagccgtgcagccgctgccgctgccgtactcctcctttcgaggcctcgcagctgccgccaccctgacacctctccccgccagcgctcgcggctcccatccaccgacgacgcggcttgcagcgatgcggttgcacagcctcctgcacacgcttgcggccgggggagtgcttgttgtggggctcggagtggctggtgggagcacggtggcgcggaggccgcctcctctgctgttcggcgatgggcggcgatggccattgtcccggttctactgctccaagggcgggcggcgtccggctaggaattgcgattgtgacgacggccgccatcttcgctccctgccacggccgcgtctccgcggctcgccgttgttgccgctccagcgacggccgagctgtcctggccggaggagcgaatgggcgaagcaactttcccggtgggcgactgggcgagcggatgcgctgcttcttgtagtccagccagtcgatgcctacatggttgaacacaatataatatatatatatataatgcaagaaagaacgaaagaagttaggaatcgaacgaatagagatagagattattagcgaagaac

SEQ ID NO: 14470 - DNA, 2540 bp, Oryza sativa
aaagcactaccatacaagattagacgagacgatccaggagaagttgacgggcagctaacgtagaagagaattcctactaaggtgatgtggtatttccctataataccacggctaaggcgtttgttcaggaacaaggggaatgctagaatgatgcgatggcacgctgaagagcgttaacaggatgggatgctgagacacttcgctgatggttcgtagtggcgaaacatcgacagaaaatttaaagactttggaaagaacgaacgaaacatacggtttggtttaagtacagatggcatgaatccttttggagagatgagcaacggccatagcacttggcccgttacgatgtgtatatacaacctccccccttggctatgcatgaagaggaagtacataatgatgccgattattattcaaggtcccaagcaacctggtaacgacatcgatgtgtacttaagaccactggtcgaaaatcttaaactgttgtggaaaaaggaaggtgtccccatgtgggacgaggacaaacaggaggagtttaacctacgagcgctgctgttcgtaaccatcaacgattggcttgcacttagcaacctttccggtcagtccaataaggggtacaaggcttgcactcactgtatggatgaaatagaaagtacgtatcttaagcactgtaggaaggttgtgtatatgggtcatcgtcgattccttactgcaaaccacccggtacggaagaaaggcaagcactttgaacataaggcgaaccaccgtacgaagcctaaacatcgcagcgggaaaacagtgtttgctatggttaaagatcttaaagtagtgttcagaaaggggtctggaagccagcctatagagagcgaagatggtcacgcggcgatgtggaaaaagaactctatattttgggagttaccctattgggaattcttggacgtccgccacgcaatcgacgtgatgcacctcactaagaacctttgcgtaaaccttcttggcttcctaggtgtatatggaaagtcgaaagatacactggaagcacgtaatgatctgaagcatatggaacaacgcggcgaccttcacccggaaccaaaggagaaaggaagccattacttgagtccagccagctacactcttagcaaggcagagaaggaaagtatatttgaatgcttaaagagcataaaggtaccgtctggatactccacgaatataaagcgaataataagcacgaaggagaagaagttcacaaacctaaagtctcatgactgtcacgtgttgatgacacaactgctaccagttgtaataaggggtatccttccagacaatctccgggcaataataacaaagctatgtgctttcatgaacgcaatttcgcagaagatcatcgatccagatagattagaagcccttcagaatgatgtggtgcaatgtcttgtcagttttaagttgatatttccaccgtcatttttcaatataatgacgcatctgctttgtcaccttgtcaaagagatcggtattctcgggcctgtgtacctacacaacatgtttcctttcgagagttacatgggcgttctgaagaagtatgttcgtaaccgtgctcgtccagaggcaagcatcgccaaggggtatggaacagaggaggtcatcgaattttgcatagaatttattgaagaccttcgcccaatcggggtacctgaatcacgctatgaaggtaaactacggtgaaagggatctctcggaaggaaagcaatatatgacggtagacaacaatttattccgtaaagcccatttcacggttctgcaacaatcttcattggtagctccttacatcgaggagcacttggctttagttcgcgccagaaacatcggtaagtccgatgcatggattacacggcatcacattgatactttccccgcgtggctacgacaacatctcatgggtaacaagacgatcaaccaacaactggccttcctggtgaggggaccatctggctcgatcgcgacattccagggatatgagatcaatgggtacacattctacacgagagcccaagacatgaagagcacgaaccaaaatagcgctgttcgtaccgatgccatgggacacgatggaacaactggcacgtattacggtgccatcgaggacatatgggaacttgactatggtcctctcaaggtccctctgttctggtgccaatgggttaggttgactggtggaggcgtaacgattgatgacagtgggatgacaacagttgatcttaacaaggttggatgctcggaccaaccttttgtccttgccaatgatgtaacgcaagtcttttacgtgaaggacatgtctagcaaagcaaagaagggcaaagggcctgacgagtcgaagcgtcacgtggttttcccaggcaaaagaaaaattgtcggagttgaggacaagactgacgaggattacgatcagttggatgggcaaccccctttcatggtgacgattgaccctagcatcctcgtatcaaatgaagacaccccttactcacgtagcgatcacaagg

SEQ ID NO: 14471 - DNA, 728 bp, Oryza sativa
cttcctcacgtgtaaccacgtgccacataccaccacggtatacagacggaagacgtgacatagtttctaacccatcctagccatagacaagagtaccgacccaatcccacctacggccggaacccccgggacaggcaggcaggactgagcccctagcagcaggacaccggccctgtgccatgacatctcgactaccgggccgcagctcgtgtagccttcatttgtcctagagatgtccatcgacccccgacttcttccatctccatccgtgtacttttgtttataaccagactgagccacaaactaagccttacccactagacatgtggaagtacggtagtgctttgcaacagaggcccgaagaacggtccttatatggccgaggtgctactatcaaaaccatgcaccccgagcccagcctaaaaccattttggggattttgaatagaaggagcggtgtgaagccaatttcacaataaccaaaccattccatagagtccaggtgatatgaatattcccaaagtctagagttgaaaaaaaccacctaatgttacctaattaaaatagcgaagcatctacctaaaatcatgctagtggtaccatgagtagagtgcccactagttggggttttgtttaatctagggtgaacaaggtaataataacaataacaataataataaggtcataacaaaggtaaataggcatggctagataaaacagtgataacgc

SEQ ID NO: 14472 - DNA, 3248 bp, Oryza sativa
acaagaatttattaatgacaccgggctaactacagatcaattgctacgaggcgcaccaatcgaaaaggcggaagtgaaatacatgtacgaactcggtaaaccgcttgtcaagcctgagcagttgcagtccctatccacacaaatgtacaaattccatcaactgtacatggagatgagtgccaccggtagagagatgatcggagcgaggatcagggacacggacttcttgcgaggagaagatattctctggatcaattttaagggtatctacgaactataccagctggacgccctcgacgtctctattatgagttgctgggttttgtaagtatcgttcatttagatttcttattacatttcctttagttaattaggtccttgtatataagtagactatatataatatatacttccttttatcgttgtagaatggagattcaaagggcccgacggcggggggttttcgatactggattcatcgaccctcggaaagtaaacgtcgcaatgctcgaccagtatccgcaagccacagaggacaatctcgtccatctcctaaaggcgcagcattacaagacgttcatactattgccgtacaacaccgagttagtttttactgtcttcctataccaaatttcattctcgtatgaacatgctaagtgtttcatatgtaatgcatccgatgcacattgcaaattccactgggtccttttactcttcgacttggaggcctgcaccgtcaacgtatatgactcaatggataaaaaagagtctacgtttgacaaggtttttgaacttatagataggtactgtcataagttcctatgttaattaagaatcttgttataattaattgctactacggatcatagctttaaactccatgtagggcttggtatcggttccgtcatttggtccgcggcaattggagagaaagacttaggcggaagtttaattttcctgtgagtacacatgctctaaatttatattgaatctccaattcaaatacatacaagtgtatattaattagatctctcaccatttgtcatttatatatagtgcgcaaagcaagcccagggaactaacttgtgcggctactacgtgtgcgagtattgccactgccttgcagaccaaatcatcaccacaagagagctcgatgtacgtacaaataaattcaaaatttcattgcgtacgtatcgatttgttgtttactaattaatttcatacattcatatagtttattcgtataagggataatctcacacacaaggaatttatcgcggtggttcaagaacaacttatgggattcatcaacgaacaaatccttgatcccaacggtgaattctactacgacggaaatacaattcatatgttcttagcttctgagataatgactactactacgtcgaaatcgtagctagctaggacatcataatggattgtaattaatacatatctatttttttatatgcatgtacacatttctttaatgtaaatatatattttggtcatatatatatgcacataaaatgttaagtgctttcacacacacacacatatatatacatacatacatacatacatacatacatacatacatacatacatatgcatttgcataacatatatatgtataaatacatatatatcatgcatgtatatgtattgaaacatatatatatatatatatatatatatatatatatatatatactatatatatatatatatatatatataaaccatgcagcaacagggccatgcaaatataaaaaaaaggtcagctcgatctttagtcccggttatttcacccgggactaaagatagcgatctttagtcccggattggtagtcccggtttgaaaaccgggactaaagggggttacgaaccgggactacaaacgctttctccaccagtgcccattgaactgatcagggggaaaatctaatcaagccgggctttagtcccaagccctatgtcccttgtctcattattctcaagttggagcagtgattcacatactgtatttctagaaataaattaacttaacaacatacttcttgagtccattgttaagcttttggagactatttatgaactaaccactactagagaactgatctttactcggatgacaaaaatcacatttgtcccggttcgaaaaggaaccgggactaaataagaaatctttagctccagtttaaaagcctaacggtactttatgatctttagtcccggctggtaacactaatcgggactaaagattatttttaaacagaaagttaaggaggaattcaattccataactttattcgaacaaatacctcagcaaaaactgattaccaataaagtttgtattttgcaatcctgaatacatacaataatttatccccctttcaaaatttaaagttgggagaaagtgaaagaacttctattcaactcaacaaacatatgaggtcatcactgaatcaattagttgtatatattgattgattgatttacatgtatatctcctggcctcgaactgtacccgtgcaggacaaccaatggacatatatgcatacagcacagctacaggctactactgtcaaccaaccccctgaatctgaagggaggaaaaaaactttcaaaactttcagcaattgagcgcaggggtactgtatacctctcaacaaatagtacaattcactttttagtattatcattattattatagtaataattattattaaaagtccttggatccttagcaaccatcaatggtgaactgatggaaaaagaagacgcatgtgtgaccgtaaaagaaaccagctaaaactaatgcagtttcgacgagttgttttgttcttgtgtgatttcatggcgagcgcgcggccggcagatcaaacttccgccatgcagcgctacgcgacgcacgccgtggcgacggcggcggtggcggcggcggcggcgcgcttgacgaagcggcccttcatccgcggccgcttctcggcgttgagcttgcgcacctcgtaccggatcttcttggagaagagccgcgtccgccgcttctccctgtacctcgacacccgcgcctccctgccgccgtccatccccagcctcggcgtcagcgcctgctcctcgccgccgtgcccgaacacccctgccgccgccatccacaccccctgcaccgccgcacgtcgccggagcaagtcatcagtaccagctaaattgtggagtatacggtgagacgaggcgtacggtgtgcatgg

SEQ ID NO: 14473 - DNA, 1762 bp, Oryza sativa
ggcttctccttgtttccactgcctagggcatcctcgcaccgacgccgccgtcgtatctcgccgtcgtctcggacatctacagaaaatgttacatccgcctccctctctctctcgacgacctcgatctctctctctccccaaaccgccaccggccgcctcgttgccgacgccgccgccgacgtcgacgcggtcgaacacgactccgcctcccgccgatgccgaccccgacctcgatgcggccgccatcgccgacgacgtcgcgccggcagtgccaatgatgccgccgcaacgcctccggaccgcgtcacgcccgccgtgccatgacgccgggccgcgccacaccgccgcggcacgccaccgccgtgccacgccgacgccgtgccgccacgccgccgccgcgccaagccgcagccgcgccgccacgccgccgctccgctgccaccacactgccactccgctgccgccacatgaacgaacgaaacgtgacttaggcgagaacttaacgacaacgtgaacggtaacaaacgatcgtgaatgaacgaacgtacgtgaagttgaacgaacgtgaacttaacgtgaacgtgaacgaacgaacgtacgtgaacatgaacgcggacgtgaacaaacgtgaacttaacgtgaacgtgaacgaaacgtgaacttaacgtacgttaacgtgaacgaacgaacgtacgtgaacgatacgtgaacttaacgtacgttaacgtgaacggacgtaaacgaacgaacgtacgtgaacgaaacatgaacttaacgagaacacgaacatgaacttaacgtacgttaacgtgaacgaacgaacgtaggtgaacgaaacatgaacttaatgagaacgcgaacgtgaacgatcgtgaacggaacatgaacttaacgagaacgcgaatgtgaaattatgttactttgcgtttagcctaatacatttttttgtatgttgcagaaaagacgtcgtcgtcgtcgtccctcaagccggagtggtagctagccctcgaaggaattcgcgcaggcaagtgatgtaaatatatgattatctagggttctaatatacgacacttaggcttagcatatatgactgttagagttttaatataagattattagagttttaatacaagattatttgagttttaatataagattattagatttgtaattagacttagcatatatgattgtttagggttctaatatacgacacttaggcttagcatatatgactgttagagttttaatataagattattagaggtttaatacaagattattttagttttaatataagattattagatttgtaattagacttagcatatatgattgtctagggttctaatatacgacacttaggcttagcatatatgactgttagagttttaatataagattattagagttttaatataagattatttgagttttaatataagattattagatttgtaattagacttagcatatatgattgtctaggtttctaatatacgacagttagacttagcatatatgactattagatttttaatataagattattagagttttaatacacgattatttgagttttattataagattattagatttgtaattagacttagcatatatgattgtctagggttctaatatacaacagttagacttagcatatatgactattagatttttaatataagattatttgagttttaatacaagattatttgagtcttaatataagattattagatttgtaattagacttagc

SEQ ID NO: 14474 - DNA, 2461 bp, Oryza sativa
aacgatatatatttttatatattaacatatacttaaatcaagtgattgggatagatcggtcaccatgccgagatagtataaatcacttatatcgacatatatattaataacaggattatatatgtttatagcatagccgatcagatagatctagcgtctatcggctaatactccgatactactctaaatcaagatattaaaacaggtataatgtattaaacaaaagcttaatatatttagattgcgacgatatcttgacacaaagggcggatttaacatgtcattgaagcatatagatcgaatatggttaaatcagataagatcggctgaaactccgatactaccctaatcggcaaccaaaggacaggctagagattgatattctaagcatgacttaatagatcaaactcaactgatgtagcattaagtatgaaaagaagaacaatatctagacaatcaagccgctgggtgtttcataaagtggtagatatctcatataatctaggacaacgtcactatttaacctaatcggctgccttctattaacggatgttagccgattgtaggttagatgacgatattgccaaagattatgtaaaatatatgataacttgacgaattatatagacaagattagagtgtcataaagatggaagcactaatcccgagaacacaatccgtcataacaagttttacttcttgttgaagatcgaaaccgatgcagctcaacccgaaagcaagagctcaatccgtcataatgtgtgttaaaaattacatagggctcggggtctatttatacccgagaattacaagatatgtccataccggacacgaccactatctctaacaaactctaagataccataagtctttgcggcagacttttgcccaaacatatctctaaggaagttacacaaaacatcctaattaatagatacaattgccttctcaggactatccatgtgcggcaatcatcttgaagcacctcaattcaatccaatgtcatacaccaaattatactgtcagaatcggctgcatcggctcacctagtccgactcagacccagccgatcctaatcgtagccgatctggacttcagccgattcttgctctgttctcggatcaatctccgccttcgactccaccttgacctaatctccttttccgatgctaatatttccaaatttggtcgttaacatatacatcgccttttgatgaaagcactttgggcatttgagaccaggtcgtccaacagtgttgctaacctcatcgcgagaacctttgatatgagctttgccatcaagtgaattaagcttattggtctgaaatcgtgcaccagttgtggcgaatctttttttgtcagcggacaacttagcacatgacgacatttaggttttacttacctattagatgctgcaattggcacattacccggccgttgaggaagtgaagaatgatgtgcatcattctcatttgtactaccatcctccatcagaacgatgcaaccctcagtctataatcaatctgtttttttgtaagtatggcactcttgccagtgggttaatggtaacgaagatggagggattattttggtgccaacagaggagtaaacagaaattatctcccgccctcaccaccagtaattacggggctatttaactaataatctgttgattaattcacagccgttgctttcgaacggaaagagtggaaggaaggaatgtcacagcgtgacattaccctgtaatctaatgtcagaggatacgattccagtgatattaccctgtagtgagtgatgagtgttcattttgctctattgtatccatcccataagcctcggatcagtaaatcggttgggaaatgggtgcatgcgtagatttgctctgaagttggttggctttgtaattttatcccatagttcagtgccagcaaccttctcttttgccaccctaacatatgaaataccaaatttacccttgtctttctcctaaatcatcttcttccctgattcatctccaagctccgtccataccgagctccgactgtcatgcatcaactccggctgctattcctgtgcatgagctccactgccggcccctgtgcctgagctccagtgccctcacggttgagactggtcatggaagaattcagtggcggtggggaacgggtagtggatcttggttaggggtctaggtgagctcattcgggaggcagagctcaagctggcagatatagtcgatgcagctgcacgggtggagaccgaggtgcatgcatgcatgtgcaattggtttgccgcgtgcgcgcgagataagcatctgtcgcgtctgcgcgaattagcatttgcggtcgatgcatgccaacagttggagctcgttggtggacggagctcaggtaatgaacgagggaagaataaaagaagggaggaagatgagggcaagttttttgattaccttctgtaatct

SEQ ID NO: 14475 - DNA, 762 bp, Oryza sativa
caagcttttgcaatttgacaaaagcaacagacctgcatattatgggacttggaggaagaaaaggttagtatttaatttgaataccatgttcttaatactttccaacctcctgttttgaatgccatgtttcttaatgctttccattctgtaatcctttccagtgctgttgttggcccaagatgtccacttaagatggatcctgatcttgactatgaggttgatagtgatgatgaatgggaagaggtaattggtgattttgctcctttattctctttctttctggcaagaggtactcatgttgtttggcgcacaggaggatcctggtgagagcctttccgactgcgagaaggacaatgatgaagttatggaggaggattccaagatcacagatgaagagagcgaagatagcttttttgtccccgatggttacctctcggataatgaggcaagtcattaataagtgaattctttaccagtttacgatataaatagaacttttaagtttgtctttttgtgtaaatgtacatctctaagatgcttccatttagttactgtaactaacaatccgttctgttgtgagagtggtgtgctatttgtttctctgtacctgctgaaaggatgatagaaatgatacttgtgcatacttaaatcttcgttgaatttataagaaaataaaattgtggaacaagacaaatccttgtatgaatatgtatgctgatatgagctacgtcttctactttttccgtatatgaatatgtatga

SEQ ID NO: 14476 - DNA, 2343 bp, Oryza sativa
cggataatgaggcatggcattgataagtgaatggtttaccagtttacgatataaatagaacttttaagtttgtctttttgtgtaaatgtgcagtctctaagatgcttccatttagttactgtaactaacaatccgttctgttgtgagagtggtgtgctattggtgtctctgtacctgctgaaaggatgatagaaatgatacttgtgcatacttaaatcttcgttgaatttataagaaaataaaattgtggaacaagacaaatccttgtatgaatatgtatgctgatatgagctacgtcttctactttttccgtatatgaatatgtatgagttctaggttgtgatacactttcagttctgttctacatacatgcgagatcaatagttgtttcattgactaaggccctatttggaaaggatgggataaaatcctaaggactaggttcaaatcaattcaacatttggagttcctttattgcaggggattcagattgaaagcctcttggacgacaaggatgaagccagtagctcaccaccagaccagtgtgcagaagtagaggaatttagggctctactacgccagcaaaaagtactaaacactttgactgagcaggctctccgcaagagccaacctctagtgatatcaaacttaactcatgaaaaagctgaattattgactgccggagacctcaagggaacttctaagattgagcagctctgcctacaagttctttcaatgcgcatctgtcctggaggtgctactattgatttaccggttattgatagttcatctgcaaatgctgaggagaccaatcagttgaatgtgaagagtagtcctgctgctgcttcagctataccagatacagacctggcagaaattgtaagtaatcacttagtattcaatggtaatgtgttgattggatatgccattttcttatacatattgttcaattccaatgcaggttaaggtgataggatcatgccgtgatggtatcaataagctggttgagtcactgcatcagaaattcccgaatgtgtcaaagtcacaactgaaaaataaagtgagggagatttctgaatttgttgataatcgttggcaggtaagatactttcacattcaagaacgccataccaacaatgtttgcttttgtgctagtgttatttacagcagcgcattatgagagatgaaatatacttggaatgctctattaagttattttttcttatctctgcaggtcaagaaagaggttcttagcaagctaggcttaagttcatctcctggtactgtacctcatattcatttgtcagtaggaatcttgcccccattgtcatcttctgaaacccttctaacaataagtcttgtttttttcagcgagttccaaaaagcccaagagcatagcgacatacttctccaagcggtgtctacctccggaggaggccatcctggcttcacctgagctgcgcctgaagtcgaaaaccactcaaaacgtcaatggtgacactgatattcctcgaatcaatctgctcccctcgtcccagtaggatcctggaagcatcttcagtacacccagattagcagatacctgagcaacaatggtctgcagcagcaaggttactgcattgcaactccattttgcaacatttccctgacgaaagagctagaaatgtgttctataacttgtgatggatgctctttttgttgcgttcgccctctgccgtttgacatgtatttatctggcagtgatggtgattaaatgtctgtcaaactactgaatcatctgggttttttttgttactacaacttacaaatggattccaagcaagaatgtgaatggttgaggagcagcagcatagcatcatagcaaacgctttaaagcaatatatatttgctttgcatcttagtacaaaagaattcgagtacacatgaaaatatcactagtacaaaagaatcatgagagtaattctactaataatctaaacaacacacgaagaatggactcttcggtcgcaccaatggcggagtggagtggaggaggtgatgagggcttcagagtttcagacatggtaggaggcggcggcccagttcttgttgtcgtagtcgccggcgccgtcgtcgtcgtcgaggcggaaggagaaggcgagggcgagcgcggcccactcgaggacaaagatggcggtgccgaggccgccgaccatcttgaggatgacggcggcgtcgtcttcgcggacgtaggactggagctcggcgaggaagtcggaggtgcgggtgaaggcgagcagcgcgacggcgccctggaagatggcggtgagggccgcgcccgcggtgtgggcgttgtgccactgc

SEQ ID NO: 14477 - DNA, 1047 bp, Oryza sativa
catgggaactcttgaagcagttagggaccagctacatgaggccaaggagctcgccaaaaagacagagaaggaattaagggaccgttttgctcagctccaggattcaaacttcgagctgagtggttcatcaaaaggtaatctctagatctgtcccattaatttacgctgtcgtaactgtatcctcaaccatttggatttcaaacagcgcaagccgccaggatggctcaaatggagaaacaaattgaagccctggaaagagacaaggtagaactggctgcgcaaagggactcggccttgaaggaggttgaaggtactgccagctgacaatctgaacttctctctttttaatgcagtagatttttatcataaatgtgttttgtagaccgcaaaatcaaatctcaagctcaatttgacgtcctagttagtaagatcaagaggcttgaaggagcaagagatgaagtcgctaatgtcgctataccactcgtccaagctatgttcctcaataacagtggtccgagtgtactcgacgcaaccgaaatcttagacaagctgagagttgctccggatgtatatttcaagaatatcaagaaagctggaagtatgggagctagcacggcattggcgatgaccaaatccttgtacccgaggattgaaattgacgccattgatggctttgcagacaggacaagcgtagaggctgctcttgatcttatcagcaatgctcaaaatgcggctgacaagattgcaagtgacgtcgtagatcaattccgcaacaccgatcttcagccgagtagtaataactctgatgatgaaaggactgattctgactgagcataaatgtagcaaatggaggcataacttgtacaatactggtgtatttatgctgtgcttgataattctagccaagtctttgatttcttaaaagcttttatcaagctttgttgagcctaaaacccaaagaagctattaaaaactttcagtcctcgcagactaagtagaaaaaatcaaacaaggcaatgataaaccaaggaagcaaattgaattgat

SEQ ID NO: 14478 - DNA, 792 bp, Oryza sativa
tcaacttgtacatcaaggaaataccttgagacttagtcggttacgactgtattttatctgtatctgcatattccgttagggatatagattatcttttgtaacacggactctttcccatatataaggggggtccgggtgcctctaggggcatgtgttgattatccccaaatcatacaatcaataagatactcggcggattcatccccggacaggagtagggtattacttcttgaataagaaggcctgaacctgtataaatcctttgtctccaaacccattcacttctccagcttgatagccacccccttttattattgccgaaatctagtttcgacagttggcgcgccaggtaggggtccgtcaagcttttcgccgatcagtgcaatgggttctgtctccggcatcgacgacctcgtcttcccacccgggcagacgtttcggttcggcagcctcgacttcgtcaccaacaacttcggcaagatctctctccttgactcggagtcagaccagtcgggagagaaccggatttcagtcccgtttggactcccaaacgcggctgaaagttacttcaagaccgtctcaatcgagttggcttcaaaccactcgggcgggatcgcatcttctccaatgtcaccagatcaagatgatgaggcttacccaccgatcctgatgaagctccccgacgatttggcggccgtctccatcacgacagcgtctccatcccgtaggcctagacggaagtcggcttcaacaccgatttcgcctagcttcagggaagtcggcgttatcctc

SEQ ID NO: 14479 - DNA, 3075 bp, Oryza sativa
aagatatgggtaggttttgcttgtcttttgctctttgttcgttccaggatactgcagtaagtttcatttcttcatcagtaagtttcattttttttgtcaacctttgtgcggccatagaagatgaatggagaacttggattgcagcgggcttgattgtagcttcgtaagcggcggaggcggccgtgtgctgtagccttttttcttttctgtcttctcgcccttagttttcgggggcgtgtttgtaataatgcacattcttgcactctttcttaatatactctggccggcatccttttgctggcccggcaaaaaataatacattttcatgattaggcagttgaaattagatttggagttaggattctatactttcaatagctttttctaccaagcaattgcaacttttaagtgattgtgccgtttgttgccaccatagtgactgtgagtgaaaatgcattccaatgaggcctgcctggagggaggagcgatggggcgtgaggctctcacctaccacccggcggaccaccactccggtgcccgccggccaccatccaagccgcagttcggctcgtggcgcgacgtcgtgaagaaagataggggccttgccgccgctgaggaggcagcttggacggaggtccggcggaaggggagcacggagcattcactgcgggcaggtgacccaacctccaacaaacaggacagagcattcaagccgaggaaggagttcagcaaccatgacagggcattcaattcggagaaggagatccctcgctggcttctggggcgctgcttcaagtgcctaggattgggtcatcgcaagcttgactgcaagggagagacaaggtgtttccattgctggtacccgggtcacctagcgtgggcgtgtccggagaggaaggcggtctctgggggcaatccggggcggcagtgcgtctgggcgcagagaggtggccgtctgggagaagagaacaacaggggaaggtgaagcaggtggtggtaagggaggtgccgccggcgaagtcgaagatcgtcaagccggccccacaggcgacagaaaagggcgcggtgatagccatggcgggtgctaacctgggcgggtaccagatctgtgcggccacgccgccgcagttcgtggaaaagtaccgcatcggcgagcccgactcgtggctagaaagggggcgggtggtgctgtcctggacctccgggatggagcgccatgagaggtacctccaggaactctccctgatggcgtcggtgctcaagggacggccgcccgtctcgccggcagagcttgcggagacaatcgagctgcacacaggcgtgcagcagcgttacttcagggtggaggtcacgcgcccggaggatttcctgatctcgtttcggaaccagagggagaaggaggcggtcctgcggtgttcgaaggcgctgttctgtaatgaggtgcctgtttcgttcaagccgtggaacagatgctgctgggcggaggcctcggctttccagttcttcaccaagatctccctcgacggccttcccccgcacgcctgggaggaggaagccatgcacaagctggtcaacagcttggacggtcagcttgccgagctgatcccggcggcggacgcgcgctgcctcggtctcttcgcttggttcaagaatccgtccgaccttccccaccatctggacgtggaaatcccggaacgcccggccgcagggcgatggcgggaggggacgagcgcgacaccaccttccccgccgcgggagaagccggccctcacctatccggtcatcatccacgtagaagaagtcattgaccctacgccgttgcatactccgccgacctccttcgacgacaactccgatgatgaagacgtcacccggcggaacactttctcctgctgggcaggtcgctacgatggcgctggtccctggccgacggaggtgggaggcggtcatgtctacggcggtgcgaccggttcggcgggaggtctaggcgcgcgctcctttgcccccatcccaggggaggtctcggccccgccaaggcggttgcttcaacgcctggcgaccatgccggcggcggggcagtcggtgacagaggagagccaggatgatgctgtcttgacagctgcggtggtgggggtcattgacatggcagcggcggaccgggttctagaccgggctgacattgttgttcaagacatgaaggcgggggaggtgttggcgtcacagccgcattcaccgacgttggttttgcaagcgccgggtgtgtggttctctccgcaagcggtgcaagcagtggagcaaccaggggccgacgtgggaatccctaccccgctggcggcgcctgtggttgcaacggcaaaggcgcttatcgttctggacgacgactgcagctgggcgctcgtggccggtggtgtgtcgcctctttcatcgccgctccaactctccctggacgagttaaccggcggtgaactgtcggcgctcggcacggagaatgatggcgaccgtgctgagctcagtgatgaggtccgggaggccactgtggaccacgttcacgttcacggggacgacctggcttcagggcaggaagtcgcattaactccgaatgggggatatgcattaacgcgtgttgcgtcggcctcgccgcgtattagagcgagccagtcgtcttttggcacgttggccaagaagctctcttttgaggatacgatggctgaggtgtcgctcgtggagcatgggtgcgagcggccagcattgaaggcgactggcgacgcgctgagctcaacgcaggagagcaggagtgatcgtgggtttgaatcggcggcaaaggcgggagagttccgtgtctatgtgcggaagcaggcccagaagaaaccgagccatgagcaacctgggccggaggggatcggcctcatgggcttggcaggccaggatctggggcaggctgacctgggacgggctgtggctggcgtgggacaggaaatgtcggtgggccaagttgtatgtggcgaggacgagccacctcaggcccaccaagaagaagtggcccacagcgacgacgagcggccggtccaggaaact

SEQ ID NO: 14480 - DNA, 1680 bp, Oryza sativa
tcatagtactattcaagagcacattttctcatatatcaaagataactagataaggtattctattctaagtaggaattgcgtcagaaaaaaagggaaattacagggcacaaggtggctgtccacatcatctgcatccatgctgactggaaggatgatcactcattctgtttcaccttctcctgttcttgataccaacctttatccttatccaaccttcttgtgtttttcaccccaactgctgggattctgggagcatattagtagaatattacctaaccaatttgcacacactagctgccaaagatgccatccctaggaagccatgttggaacagaccacttgaagcatcggtgctcacacgacaaaaccataaaactccagcagctgtttcttttcttgttgtcattgccagacatgggagagacggcagaaggtgttgaagcaggcgagaaatatgtgagcataccacagttggctggagttggaactcttctctccaatggaggaaaggtgagactgatcatagtatttgatagccctgatcttcagcttagcttgtgttctgttgttctgataaatattctctaattttcttgtggatatactatttggcatccaagcatgatttaaatatagcaaataaacatcaatacatagaagtactccagggattggctgttctgtttcatgatcaaatctgagatctctgcataagtataaactgcgtaacatggcatagtttttccaaatgagtatcagtattaaaccttcacactatgcagtactgaaaaaatatgtttgcttttggtttcagaaagagaagaattagttgtctcctaaatttgtcattgtgtatcaaaaacagaaatgcatctgtcgtccattgaagggaagagaatgtgcctcttcttctcggctcactggtgcaggccatgcaggaactttaccccaaagttgctccagatatacaggaaactcaggaatacttgcaagaatatggagataatcttcatatcacttgaccgcgacgagatcagcttcttggactacttcaaaggcatgccatggcttgccttgccttttgacactggcctaaggcaaaaattatgtgtgcaatttgacattgagcatatcccagcattgattcctctgtcaacaacgctatctcatggatttcgagtcgaagaggatgcagtgaagctggttgaggagtatggagtagatgcctacccctttggtgcaaagaggagaagtgaactggagggtatggatgatgccaggagacaaggaggtaatcttctgcaacttcttggatgcaaggaaagagaatatgtcataagtgcagatggcataaaggtgaccaaaatcataacctataaattcgtaatttgcttgtttatgcattgcgtatgtttaggtaaaatataaggctaaatgatgcagactatgatagatggtgccagtatatagatacatgctatgacagtaacctgctaacaagaaccccaacagattgcactaatacaagctaatatatgagcacagtcatcaaaatcttaatgattgtataaccattaaactgagtaaactggcaatgctagattaataatagtaatctagtcacaaacaatgaaaccaacaaaatatgaattaggtgaagctttatgaagctacatgaga

SEQ ID NO: 14481 - DNA, 1589 bp, Oryza sativa
ggtaaagtgttcaaaacagacggaaggagaataatttcaaaatatggtgcaatggcattcccttttacagaatcaagagcttatgagttggaagaagttctcaaaaaggaaagggacagcctgcctcaccgagtgagagatcaccgtcatgagcatgagcttgagttggacatggctaaggcttatgtatgcgatgagtgccaacagaaagggcaaaactgggtcttctcttgcaagcagtgcaacttcgatctccatccaacctgtgcgcaagaaagtactgatgtaaacatctgagatatttatacttcaaatatactgacaacaatgatgtatgcgtttatgtatattgtgtccaacagatctagtgctaatgggcactggaaaaaaaaaacttttaagatctagtactacgggactcaacactcaatagaaaaaacagctaacgttctgtgtccctgaatgcaagattaacagatggaatctatgggtgcacattccaagttccaacaacaaaatagttatgtaatgatttttttcaatagaagtattcatatgtgactatatataatcttggcaagggatgttccaaagatttatgtaactcatgcactcatgaactgatggaccatctcatatagctatccacgcagctatttcatcaaacaccaagcgtgcagccgtgcaggctcaacctcaagactttaagagaagaatatcatcttattttcacgaacagcaatagaaaaacatcacgaccgcaatcctcatataccaggcaacaacgaggtagtctcagaactgtagcgtgattggattctgaacggctttttcagatttgaacaacctatacagcgatccgaagcacttaccacaacttcacaagcacttcgaccaatcgaatgtggccacagctgaaaactctctgagatttctcaacggagagcctgaaaacagcgacatttcctcgatccacgtagccttcgcggatttggcaggaaaaatcaggggagaggatgataaaagagactgaacaatttaaaacgggagaattggacggcagcaaatttagcaaatatccccttgtacatattcacaaaagggactacatttgttaaatattaaactaaggtcctttgtcatttccaataaactctttgacagcctcaacccattgcagccatggtttttcacgtcaaactttaactgtctgccttatttaaaaaaaaatttaaaacataaatcacgagtaaaatactatttatattttatcatctcataataacaaaaatactaattataaaattttttaaataagacggacaattaaaattaggcgaaaaacttatggttgcacttgaaatgagacggagagagtattaagtaagggtaaagggtccgtacaattggttatttttttctaatatttactttgttgttcttatttcttattaggagtattttttttttccaaactactaaacgatatgttttatataaaaatattcatagaaaagttataaaaatcatatttacctatacaaaaattaaaattaaaacttaattaattatatcctggtgaatcattt

SEQ ID NO: 14482 - DNA, 625 bp, Oryza sativa
ttgaggacttcgatcaggtggtggcggattcctggcagcagacggttgagagcacagatccctacgtcatcctgtacgtcaagatggcgcgtcttgctatgtctctctgttcctggggacaaaagaagatcagtcgctttcgcctccagctccagattgcgaatgaattgatcttccgttttgatgtggcgcaagagaaccgactcctttcccctcttgaacgccgtttcagggcaatcctgaagggccgctgcctggcattggcgtcactcgaacgaatcagagtgcgccagcgggctcggatctcccagctccgggagggagacgccaactccaaatacttccatatgaaagtgaatgcgaggcgccgtaagctattcatcccagtctttgagtatgaagggcagacagcaacctcgtaggaagataaaattgctctggccaaggactattttcagggaattttgggtgtggcggatcccgactcggctgagctccaattcaatcaaatcttccctccggcgccgaacctgcaagagctggaagtgcctttctctgaagaggaagtttggaaggtgataaaagagatgccaaacgagaaggcgccgggaccggatggattcac

SEQ ID NO: 14483 - DNA, 1302 bp, Oryza sativa
gggcggtcagcatgcacctcatgctatcttagcaactgcagattcccaagtgaatgtagaagcatcaacacaagaaatggcatctaacgatataccaagtgacctaccaaccttggaatttccagaacgtgagaaaatgctgtcagctccagacgttgaattgtaccaggcaaatgacttgggccaggtaactgcagaaaagggaaccactgaatctgatggaagtaacaaagtaggtagtctcactagcagaaaaagacacttggaggacagtttgccagctctcgaaagtgcaactactgaaaaattgtctagcagaccacgtggtaaaagaaccattgatggtattcctgatgatgatgatttactggcgtctatattaggtatggatgaacctcctcaacaataattgtgcctggcttttgctgcattgtctaacactaactgtgtggacttgtatttagttggtagaaggacccctggactgaggcttgattcaacaccaataccacctaagacgtcatctttgaaacgtccaaggttgacgtcaaagagtaccacaccgaagagaaaagtgcaaatggatgatgccatggttatacatgctgagtatgtatacgcctcatagccttcaaacaagtttgttgaatggaactgtgtgactgttgttctttagtgttatgtccttaaatttctgccatcactgtcttctgatgggaaacaaatagtatattttttccgtatattcttgtaaattttgtgcagtatatacattgagttgattggtccatctctggaaatcagattgcggactattttgctgtccaaattattttctgctgtgatattatttactgagtttcttccattctccagtaccatacggcagcagttgatcagcactgaggatataaggcgcattcgtaaaaaggctccatgtacccgttccgaaatatggatgatcgagaaaggttccttagaagatgatatattccatgagcccatcttttcctgtaagctacttaaattggtttttattctctgcttcctctttacacatttactgtatgttcaattcaattaggaaagaactgaaacagaagtgaaattagttttgatatatgaggataattagtggttagttttatgctctgaaattctactgatgcatgtttgtgttcccaactaggcatgtgcaaggagctaaacgatttgcaatatggacctatgagattgttgctcatcccaccattcataatatggaaatacatgtacggctagacatgtcccaaactatggcag

SEQ ID NO: 14484 - DNA, 2606 bp, Oryza sativa
ccatttttgtaatcaacataaacaatgccaaacctcttggtgtatcccatagcccactcgaagttgtccaggaacgaccatgcgaagtacccacgaacatcagcaccatccctgcatcatacagttagttgcattagttgatttttagcagaaaacacttagacgcgtggtaaacagcaagcaaaatcaactaacttgattgcttgtgcaactgacgcgaggtatcctttgaagtaaccaaccctcgtcgtatcattcaagacttggtcaagcgttgccgattgatcatcttcctcatccatgcctacatgagagaaactatggtaaaggaagcaaatatcaaatgtgacaacaatttgaagtgtgctcgcaaaaacctttatcatcaggtacagtactagcgtaacaaacatcataccgggacatttcacatacaggattgacaaatttaattcactccagatttccaataatgttttacttttactactttgcatattctgaccgctccagaaattaaaacaaggaatggccaaagactgtatcaagaaatttgcttccagaccatatttatagggttctccagctttggtttttcatgtctcatgtgctatctctataatctatatagacctagtaatgcatcagttgtgagctgtagctctcattcctgaagtgaagagtgaaataatgtaaaccctcagaatgtaaatcggttcactgctcaatagtcacaggcaaacatacaagttaattatgtagaacaaaggggcataaagatatatatgttagaaaattctatgttgcatcacattcattttaggaggtatggaaaccttaccattctcagttacatatatcacaggatttccatatctctttgctgcataattaagtaatttccggaggccccaaggaactatgaaaagccactcagatgcggcctgcaaaaatgttgacatgatatgttaggacataatccacagaatttacacgagagagagagagagagagagagagatcagttctgaccctttcaccaattttttcaccagtgttccatttttctgcaaaaagtaaacaaatgttacaaatagtttgatcataaggttttgcaaaaatggaagatatcatttcattttgaataacataaaggagatcgcagtaacacaagccaaactgcaataatgctagtattgccacacggaccaacaaatttgcagtgttttactccaagaaaacagtctggaaaaatgaaacagaggagttatgtggatttcaagttcgttagtaaagcgcttggcaatggagatggagttaacagaaaggttactacacaggtacaaactgacaaactgttcttttaactaggcaatggtcgctcttgcacataaatttaaagtttgactcttgctaatgaagcctcttacatctattataagcggttcaacagttttcaatgcctatgcattatattcttttgtttgaagtataattgttgtttgaggtcttatgctgcaacaattgtgtaagagaaagattctgctgtagctgaagaattgtacctattctctccacttgttgtactcggtaaaaataaatatcttctggatcctgatgatgagcaatgaatcttgaagtataatgatttattccaacaaagtcaattttgttcctgataaattctttatctttctccgagaaggttggaagatcatcgcccagtcgctgacgcatactttctgggtaatcaccgaaatatattgggtccaggtacctttaaggaaaagtagcacctatgtaagactatgacacgcaatatcctaagcctccctgagccaaaagatgtgggagcattgtaccatgaaaaaaaaacatgttacaatttctctcggtgtatacacaaagcatttatgccttgtgggagaaaattcagcattttccccatgtttcaggaaaaaaaaaagatgcaggacaatactgtgcaaagcataacattataccatgaaaaaacattttttgccttgaagaaaaaaatggtagaagctttcccttgtttcagaaacaatattgcagcataacactgtgccaaaggtagctaatgtgggaaactgtgacgcaagtaatatgagcagaaattataccatcctagctgaaagtcaagccttcgttctgcagcaacctgatcttctgttttctctgaaaatggctctgcccattcacaatcgacaaccaagcctacttcaccaccttgcacagcctatttttgtataatgtaaaactgtcaggaaaataaaatgttcttcaactacaaggaactgatggaataatgatcagggtgcccaaattttctgctaccatatctaccaatggaaacacgtatcatcagcaccaatgtcctgacataggattaatagaacacaaccaatgtcctgatatattagtatatcactgagacagaccttaaatttcctttgtaaacatcaacagcagcagcatgagccaagatttggtagtgggcggccacgtagcatctagcagtttccccttcacatcctccaggtgcaaaatgtccaattccgtaaccattaactgcagtttgaaga

SEQ ID NO: 14485 - DNA, 1273 bp, Oryza sativa
agcattattattcaaggtcgatcagcagttcatcctaccgatatggaagttgatgataaccaaaataaagatgaaagcgctgaaggatacaacatggaggatggaccttccagtcacaacaaactaaatccgttaagtgcagatggtctagtaggaaacagtcttcctaattggcatacatacaatgtgcaaacacctgatctgaatgatatgctattgaacaatgatgggaatgcaggaccatcagcttcatactatcaacctagtcccttcccttgtgatgagcctgcatcaccagagtttgtaagtgcccaggccccggctacacctggcctaatggaagagactgttccttccagagtgcatgaaagtcctgttctgagtccacagcgaaaagcttcaccatcaagcaatgatgaaactgcaaagacagctgaaaatgctaatgatcttgtgggtgctgagacgactgaacttgcattgacaaagcctgtgcaaattgaatcttctggtgctgtacaggagattgattccttgagtcaacaatgtgcaactgaggaattgccaccccaagctgaaacctcaaacttggaagctaccatggacaagtcaatgataaatactgatggtgtagctgcatcaggtgaagctacagctgctaaagaaaccactgaagtgtcattggttgaaaattctttagagctatgcgctgatggtcctactgaacctgtgattgagaaccaaacacagtttaatgatggatcagttgatgtgcaaggtaaattgactattcgttgattttgtttttaaagtcattgtatttgataaaaaaaaggtgaaatcatctgctttttgattatttgttttgcagggggcggtcagcatgcacctcatgctatcttagcaactgcagattcccaagtgaatgtagaagcatcaacacaagaaatggcatctaacgatataccaagtgacctaccaaccttggaatttccagaacgtgagaaaatgctgtcagctccagacgttgaattgtaccaggcaaatgacttgggccaggtaactgcagaaaagggaaccactgaatctgatggaagtaacaaagtaggtagtctcactagcagaaaaagacacttggaggacagtttgccagctctcgaaagtgcaactactgaaaaattgtctagcagaccacgtggtaaaagaaccattgatggtattcctgatgatgatgatttactggcgtctatattaggtatggatgaacctcctc

SEQ ID NO: 14486 - DNA, 5635 bp, Oryza sativa
cgaaacactgcaattttattatcaagcagtcagttaggatagcaaatgtattggtgcaactagacaacggaaccatctaaaatccaatatccagaaaaactgatagagctagacaagcatatgaaatttgtgctggttgtagcaatagatagtgtttgtgacaactactatactaccactactgggatgtggcaacccacctaagtggctctactgaacaaaacaatcaagatggatggcacgaactactgcaaaatgcaaccgcgaaaagaagagatgctagcaacatcaaatgggaagcacgacgaccgaaatgccaaaatacattatcgtttaagcaagaaatctacatgacaccatagatccctaccggatcgaaatggatcccgagaaccgagcatcatatccatcgccacaaacgcaaataacctcgcagccgcactaccaatcacccaccgagctaatcaaggacacccatgaaccaaaccgcgacgcagcgaatcaagaacgaaacagcacagcacgcagcgaccgattctagcagggctgcaaggaggttgagaggatggagtgtgaggatcttaccatgtcgctcgcctgctgtggctgctccgctgcggcggcggcggcgcgtggaggagcgaggagaggggagaggtgggagaaggaatagttagggtttatagcggcggctgccctcgagcccttttatccatccactcgaagaagaaacccgagtcgcgcgagcgcatcgggcggacggatgcggtgcgggagatggatcggacggctcagatcgtcttgaggggttgctctccgcggcttgatgggcctcagtctgtgggcctgggaaaggagataattcctcgttggaataagtccgttttgcgtcccttttctgttacgcttgcgtgaataatatccctcaaccggaaaactgggtataacgcctccttctctgaaaaccagagtaaatcacctccctcgcggtttcggagacggttttgtcctacgtggcagctttgattctgctgactagctgagtcagcttatgggtcccactcgtcagcaactctcctcttcccctattatcttttacatctcccgtggcgccagcgagacaagcgctgaatggaggactggcggaagtcacggcggcggtgttccggctccgtccgcgttggaccagcgacgcgcgcgcttggggaggtgaggcggcgacactaccgatctcgcttaagatgggggatgccgaagctcggggaggtcgcggtggcggcgttccaactccatcaacgttgaaccagcgacgcacggtcaacaacccctgtgccgcatcctcccgtgccaactctgtgtctgccggcgtccatctccgtcgggatgccagggacgtcggggacatgtgccgccgaccacgccccaccatagtagaaaaagtcggaccgaggactgacccgatgagcttgtcggttcactggttagaccccggttcatcggtcggaccgtggttctatgtattaagtaaattagtgttcattccgttcagtaacataatcacatcatcttatatattcttatgggtattcaatttgctgctgctccgtgctcctccaagtagctctgtttagccccttgacgctatattcttatccagcctgacattactgttctagtcaaaatgtgttctttcagaactgtgtaatcatccgtccttatgtctggtcactcactcactcgatgtttgtatcttcaggtcttttgttaatgtgaccaagaagaacgcgcgagagacaatcagtgtgctctctagtctctaccccttctgtgtcagatgttgatttgataaaactaatttagtattataaatattaatatatttgtttataaacttagtcaaatttgaaatagtttgattttgaccaaagtcaaaacgtcatataacctaaaacggagagagtacttagtagttagatccacgctggaagttattctgctctcttaccatgtacttcctccgtcccaaaatgaagctatttttaaggttggcacgggtattaagaaattaggtgagaatgattggaggaagtgtgtgattggttgaaaagagaaaataggtgaagaagaatgttgtgattggttgagaggaggaggtaggtgaagaaataggtttattttgggataagacactgtattagaaataggtatattttgagacggagggagtatgtgaattgtgggtagtacacatgacggcaccatatgtacgttgcaatacagcagaaatgatcacgagatgcgacattgcttcacattttgcatgagtatgctgacgagatttcagtatgcttcgttgttatattagaggattagtacttttaaggtgttgcaggtagtgttagcattctcatgaactcatgcttggcaagttggcataatccgatcatatagatctacatgaaattttgatatgcctgcattgttcataaactgattcctgcaagccgctgctcccgtgactcccttctagttgcggtaccgcttatttttattatcttagtttggatgtcaatccattaacccattaactttgactaaaaatctaaaatctgcttcggaaatgttgctgcgaagtggctgtcgtttagattagttcatgaagagctaccaagtaccaagtgagattcgctcgctttggcttacttagttgtaacaaaccaatttaaaagacgaattggtgaaaattggagcattcgaggcagtaatatgtgaaatttgagattgatttggaggcggtgtgtgcattgttagcattacaaaaccagttgtaaagacaaacaggagaatctaagacaggaatgtgtgaatttttttttagattttatagtctttttcaatcctcatgctggacaatcaacaagaatgtgtgaaaatattttattcaaagagttctaactcatgctggacggtaaactttagttagaaaatagtgatggactcgtatttcctgccaaaatcactatatagaaaccatatgtcaaaatctgtcaaaactaggaactacatgcttcacattgttatcaacataatgaatgagcaagcaagatgtcaatctcaaactgaatgaatgacacaagcaagcgatcaaacttcatctagcgagtaaagagcccaaggcagctccagttcagaataaatgcaggcaagaccagcagatttgactgcccattgctaaaaaggaataacataaaacaaagacaagtgaagaggcaggcagaacacaattatatcaatatccaaacggcagcttctcacataaataagataactgatagctcaaggttgagaatcaaaaaccgaaagaaataggttctttgagcagagtgcagaacataaacaaaaatgcctgttgcaaattgcaagactacaggtaaacttaaatgccatatggagtttgtttggcagcataagatgaaactactgtgataaggctactctctcactcgtcatcctcttcctcgtcatcatcatcagcaccagcggaggagttgagagcattcaatctttcgacgagactggccttcctctgctcgtaggtcagcttcttgaggttgtatctgcagcaaagagatggcaagttagttacatcatacatggacatcacaaataatctttacgaaaatcatcagccagcttaatatacctcttgtgggtagccggttccttcttggtcgatttggccatggtaggatcggcgcggatggcagcatggaccttcttgtacagtgattccatgccatcagcgtcaattcccttcttgaggtactcactaaagtgggcttggaatttctcaggttcctcctcagccatagactgcaacaagtacataagaagaaaatttatcctgatgacaatcaaaataaagcagactgagctaaacagtaacaaataatccaaactttatataatgctttagtcaacgttataaacatcaaggcagctacataattcctaatacaacccacagcacgaacaattgatctaatagtgccagctcaccctcatgtagtcagccacgtgcccaccgtagatgtacttgcggtgaatatcagaatcaagctgcttctcgtccttcttgaacccagcaaacctcttgtcactgtgaggaatgtcaagaccaccatccaaagctccctgcagaagaagagaagtatatccacatgagctactaatacagatcaacaatccaaaggttatattgacggttgtgtttctaaaagagctgatgaatttgatgttcaagtgacaaatcaactattattacagcagccaacagttgagatcaaagcacaacacaccttgagggcaccaaagacacggtttccagtggttgtcctaatgaggccaacatccaagagagcacggaaaggcctcctttcatcagctggttcaacatagtagtcctccccagtggcctgaccaaaggaatcatacatatcaagatcaagaccagcatgagcatatagagtaaaaaaattataaggattatatttgtacctcaacattgccctcgtactcctggtccaaaccacggagcgtgagcacacgacgagccagaagcaagccagtgcagtaagctacacaatgcatcaaaacagaggaattaaattgtatgcatacagcaacacaaaccagcattctgcgtattcattcaactgaggaaactacctgccgcatagttggtgagaccaacttcaagaccatagcgaggcagctcatgggagtaggcagcagccatcacgatatcaccagcaatggtagcatagacaatttgagctgtgatatctttgtttgtctaatgtactattaaggcatacagtatgataataacaaatatatagtataataaccagaatttacgaggaaatgcataaatatcatgatacaaagaacaaaaaggatacaaatctcacaacgaagcggtacttcggtgtgttgtacttgttcttatcttggttggtgagcctaatcctggccctgtagtcagtcttgccctctgcaaacaatgacaaatgagattaagtacgtcaaaaccttgacttgacttggaaacgcctcggtctcttgaacttgacttacgcctccgtctcttgaacttgacttggaaacgcttgtggtaggcattggtcttctgggtcttgacaaaccctccctggagagacattatcatattaatacaaacagcataaaaactgaaggcaagcaaacatgtgaaatagacttaaatttgagaacttcctaaacgcatatcgaaacactgcaattttattatcaagcagtcagttaggatagcaaatgtattggtgcaactagacaacggaaccatctaaaatccaatatccagaaaaactgatagagctagacaagcatatgaaatttgtgctggttgtagcaatagatagtgtttgtgacaactactatactaccactactgggatgtggcaacccacctaagtggctctactgaacaaaacaatcaagatggatggcacgaactactgcaaaatgcaaccgcgaaaagaagagatgctagcaacatcaaatgggaagcacgacgaccgaaatgccaaaatac

SEQ ID NO: 14487 - DNA, 568 bp, Oryza sativa
caggatctattatgtcgttctaccctacaattttgctagatacaaaacaataaaataaataatatatatacaaaaattcagatgttgatgaaattccatttttttgtggtacttttagtagattttactctgtgttggctcaatccgaaggaaattatgcggaagctttgcaaaattattatgaagctacgcgactagaaattgatccctatgatcgaagttatatactctataacataggccttatacacacaaacaatggagagcacacaaaggctttggaatattatttccgggcactagaacgaaaccccttcttaccacaagcttttaataatatggccgtgatctgtcattacgtgcgactatctccactatagaaagaaaaataagaaaggatcaaattttctaatatttactagaaaagggtgctttctacatagggatcgtcaaaacaacgattttaccctatcagctgtaggaagaaaggacacttcacgagaatcaaaataggaagaaagaaagtatggcctatactactctatggatagagttctcaaacggactt

SEQ ID NO: 14488 - DNA, 811 bp, Oryza sativa
catgcatgccataacaacagtgatgaaaaagaatcaggtctctcctcgaattgaggagagtggaagagattgttctagcctctgtacacgccggagggatcagcgttttgaactatccaagggtgctcgaggagcttgtggaggggcagacgatgcgccgaattcttcacgagcatctgcagatcaaaatgctttcttgaggttcacactctggtggatgttctacttgtgtccaagtgacgatttacttgtcacagttttacagttatgtaaatcatcaggacaggagcatgcttcttacctgtgaaattaggtctttcgcagccggggacacgaatggtttcagtgggaacttcaagtcaactttcacaatcctgcatgtccacaagacatttcagagaacagtgcttgcaagaagtttcatggaacttattggtaattacaggtgagaacaaatggaattaattgtactctgtcgagcatggaggatagattgaacataatcacgagtgtttattaaagtagcagaaaaagataaacaattagcagagtatagctcagatatcagaaacgatagtgcagaatacaacctctaatgggcaagagacaatgagattcacaagggcatttgagatatgtctcaggctagttagtaaaaagtcactgcattctcactctgaaactcatcattacctgcgatatgtttcggagtgttcttttgcttcgaaaggtgggactccataaaggaactcatagcacaggatccccaagctccaaatgtcaacatggtagtcatgttcagtcttctcca

SEQ ID NO: 14489 - DNA, 815 bp, Oryza sativa
caaagtcttcacaaaagtctttaaacaactccgccagtgaattgtctgccattatcagtgatgatccgattgggcactccaaatctatgcacaatgttgatgaagaagtctcgagcgttatctgctgtgattgtgacaaccggtttagcttcaatccacttggagaatttgtcaatggccacaaagaggtgcgtgtaaccgccgactgcctttttaaacgggccaaccatgtcgagcccccaaaccgcaaacggccaagacagtgggatggtctgcaactcttgagctggtagatgaatttgtctggcaaaaaactggcaaccttcgcacgtgcgcacaattttgtcggcgtcggacactgcagtaggccaaaaaaaaccctgccggtaagctttgccgacaatggtgcgtgcggcagcatggtttccgcatatcccagaatgtatgtctttcagcaattgtctcccttcctctaaagatacgcagcgttgcagaatccctgaaaggcttttcttgtacagctcagcttcatgcataatataaagtttgcttcgtcttgaaatccgctcggcttcatctttgtcttgggggagttcttgagaagtcaagaatcgtatgaggggctctcgccagtcgacttcaaccatagctacgtcatgagtgcccgcaacttgagtagtatctttgtgaggtactgtcggcgtataaaggtgttcgacgaaaacatcggagggcgccacctcgcgcttggatccaaagttggcaagtctgtcggcggcttcattattgtgtcgaagaacgtgactgagctcgag

SEQ ID NO: 14490 - DNA, 552 bp, Oryza sativa
taagtattactctgagcagttatttcaaagcttgccttgtcttttctttttctttttcttaagaatggatgtatacattgtcacagacaaaatacggggatagagtgattggccttatgctagtttcgccgttatgcaaagccccttattggagcgagtggttgtacaataaggtactaacatacatttaaatctgtcggtactgcagtataggtaatgtgttctgtgaatcaacctcaaactcatatgtaccaggtattattaaacttgctttactattatgggagtcgtgggctagtcaaggaatgcttgcttcagcggtattttagcacggtatacttggtcttctgttagctgctttttatttgcatccttttatgtatatcagcttcgctcaacagttttctgatgctatgtgcaggaagttcgtgggaatggacaagaccctgaatcagagattgtgcaagcctgtagaagtgtaagtagttcatctcctcgtcagctttctgatatgattttgacaagattggtagctgtctacttatagaaagt

SEQ ID NO: 14491 - DNA, 669 bp, Oryza sativa
agtccatcacatcttgcacccttgtttaataactgtgctccatcttgcgaggtgaccattcttttccatgcggactccagcgatgatatcctccaagccgcgacatcagtttggacgctaaggtatccggggatcagatggcagtggggtacctggaactaatccctgcatatgtgcatcaacatgaagataaaggatcacatgtgacaggactaacactacatctcgcaccttttgttaacatagtagcctcttctaaagtattgcaagctgttattctgttaggcttgctattgctagtagtactgattaatgttggtgagcagatggatgctcaatttgctcatagggctttgtttgcccatagcaactgtgcgcaaatgtgccaagataactaacttttggttgttttctgtgcttgtacatcctacttaatgttggaattatatactcctacattagaatatgtacttttaccttggataccaggatattgtttgtgacctcagcccatctgcaggatagcataacatttccttggcaacagtgaacaatatcatcttcatctttttacccatctgcacatgcatacatatgatatgatcctctcatgcagtgatgcctaatctggtagcaataattaatttaactatggctgtatcaggatta

SEQ ID NO: 14492 - DNA, 944 bp, Oryza sativa
atttaccataacgaaaacaggcatataacataccgaggaaatgactatggtaaaaacaagttatcccaagttaacccagacagcttttgtagcctaaaaaagcttacaaaaacagcataacacctttctgtcgggcaccttttaatttgcattgtaataattccaaagaattatatgaccgcgtaaaaaggattttatcagcattgggcaacactattgtgcgcataaattgccaaagcaaaaaatgcctaagtccctaaagagcacaatgggccacgctgttaaaagtactgggctgaggtactgttcaggcctaaacccattcgtacctccgatacccttaacaagaaatcccgagatccaagcgacacttcatcttccccgccggaactctcgccattttccccactccctgctacagtacagagctgcgccggcaaactacggttcaccattccactcgaatccaccttcgaaaagttcatcaaaatccttcccgtgatccaccgcctcaatccttcacctctccctagccatccctcgaatcagatcagcgcattcgaaaaaaaaatcaatggcggaagagaaagaaagctttgaatgccaatgggcgccatccgacgtgacggaggagaacctgaaggagatggtggcgcacggcgttctccctgccaagaaatcatcgggtggcggccagcgtgcggtgaggcttttccgacccccgatacacacgagactgtggtcttctcccatttcttctatggcggattcgctcttccgacctcaaaatttttccgcgggatattaagcttctatggaatcagcttgcatcacctaaacccaaattccatagttcacatcgacaatttcatccatgtttgtgaagccttcttgggaattaagccccacttcgctctgtttcgccgaatcttctttctcaagcc

SEQ ID NO: 14493 - DNA, 869 bp, Oryza sativa
cgcctccgcaggtacgtatctgaaatcttcaacccatgaccaaaacataatcttgtcttcatgttgagttaactaaccgcggaggcatctcactcaggaatatgtattgatgaagtctgaccccccaatcactcagcgccggtctcctcgccagcacaccgttcagggaggtggagggccgacaatcagatcagatccgcaacctcaaacctccaatccgactgggcagacaggttctcgcaagagaaagctggtgcttaatgacgacgaaggcgacgacggcaacaaatctggggacaaaggctcgcccaataaactcccaaagcataccactcccaggaaaaaactggctagtcgtccaaggccaaagatcagaacatcttccaggtataaaactctcggtaccatttcacttcgacatgcttctctcatggaaataatactgaatattgaaagaacactttgcaggaaaccatccgacatagatccaactggaaaagatcctgatccgactgtgacagaaccaagttcatccaaggattctgagccgactgccgaaagccagccgactggcgcccatacttcaggtgataaggccaatccgagtgaccagcctccgactgaaaaccagtcggcagcaactgaaactacaacaacccaagagcccccgactggaaaccagtcggatgtaggtccagatcaagaaactcccgaagttgaagcgcagacgacaacttctcaaggaccagaggctggtaacgactcgttgattgggtctccagataaagaacaaggatcaccccacggtcagctaggaacatcctcaagtaactcatcttctcaagtgatgccgatttcaataacttcag

SEQ ID NO: 14494 - DNA, 531 bp, Oryza sativa
ccttataaagttcaccttttaaggcatactccaagatcaagtacacacgggtctgcagaatccatgtagcagaagatatgatgataaaactagaggagataaacaattacatcatatcagaactgtggtttttttttttctggacctgatcatagaaatacccatacagccgtagaatgttgggatgacgaagatgactctgaatctcaacttcccgacgtagctgatgctccacctggtactgctttagttggctcttgaaaagtactttcaaagccacaatatggttactctgtttcacagaaagaaaatagattaagttcactgaaagtggaataattagaatcaaaacaaacaggaacaagcattctgaagcatacagtacagttttaggttacaaacatttacaattgcaggagatatttaaaaaaagctttaaagatcaacatattaagcatgacccagaattccagttagaaccatatgaaagtgcactacttttttaagaaaaaatatactacctccgttttt

SEQ ID NO: 14495 - DNA, 2668 bp, Oryza sativa
taatttttctggttgccagaaatatcaactgagctctcctgtgcataaatcgtaaatttcctacctgtttttggttactggacacacttatgagtgagtgccctcatgaacaaaatgccattatcaatatgaaacctcgcaccttttgatatggtttgtttaaaataaagggctctaatatcacattccaattaatcgactaccgtaagacgtcatgacaaatggtttgctgcgaaccatttgtcgtaaaattaccagagacggttcgctatcatggatgtctctatttgatagttcactatcacagccgtctatatttcactgctgcatcaaaatccatcaataattagtactataagagagttttgcggatgtgacgttgttgatacttcacagacataggtggtgctcacggtaataattgtctatgatggctgaaaagtctataacaatatttatcatccctagtttaaatttctcacaaatgaattctatagccctcttttctctcctttttcttccattgccctcctcttctctcatgtggctggaggcgtcgtgtatcaaggaattttgtttaaacaatagaatttgctctagtatgattccctgaattatgccagtttcgaaggaacccaaagcatcatgaaatttgcgacttatgaaaattagttgcatccaacatatagcaaaaatacatatcaaacacattttttccttggttgcaactattaaagatggctatttcctttctgataatagttcatagactgatagacatatctaccaatccgtctctgttagttaggcaacataggctgcgttctttccacaagtttcccaacccctttccctcgttttccgcatgcacgcttttcaaactgctaaatggtgtgtttttttgcaaaaagtttctatacgaaagttgctttaaaaaaacaaattaatccatttttgaaaaaaaattaactaatacttaattaatcacacgctaatggaccgctccgttttccgtgcggtggagttgggttcccaaccccaagtatcaaacacagcctatatagtagtgtttgcactccttttttaataaaattttaacatttaatctgaaaagaaaaggtcaagaggtactaagctaagaataaaagcagtttatgagattagtaccaacaaaatcccagtggaaagcaactgggaactttaattttgggattgggtcagcaggaatctctgtgattatgatctagtaatacaagcaactactactcattatgagcaatcttgagctaagtactagttctgtatgaccagtagaattggcatctcaaatactgtcacgccccgaactagtcccgaccgaaactagcccgtgacgctccaaattaacctgttaatcgataccagtcccaggaaatagtgctggtatcacaagaagacagaatatcacagcaacagaggtctctttattatagagtaggagtacagtcatattgggctacggacagattccgagctcacaactgcattacaaaaggggaacggaagccaagacttggaccaaacatcacaggcgagacttgggaactaggccgaaaccctaaaactcatcgtagccggcttgctcctggaagaactcctcgtcagcgggatccgcttcatcttcttcagcaattggggggattatttatatagagcaagggtgagtacgggagtactcagcaagccatgggaaataagtgtttaatgcaggcttcaaagaaaggctgttgtttttgcaattgattttatttaaactcttttctgaaacaactaagtgagtgcttctcaaacgacacgaatgagacagtgcgtctcgtccggtcggagtatgtgcaatgtatcagtcttttgaatcgatcaaggttggcacccggccaacaactttcaaatggccacccgggcctggctgatcccatcagccgcagattttccaaacatcagtcccaaaccacatccgcaaatttcacaaagcagtagtcaaacaaaactacgctaggaatcacctcacatccgcccatgaccgtgggcacggctgttcgaacagtttaataacctctgtagaggaggtacactttacccacacgacattactaacccggatcatccagcccgtgcagaacggccacaactagagaccttaaggctttcatgacaaggcatttcgaaagccgacacaggttcaccatatgccaacgagaggggtcccagaccaacaacagattagatcccagaccatactgtgccaggaagcccagggatcctccccgacaccaccccggcgaatccacatgtctcttagcatcatggctcccccgataagctagttactcagccaggggtgtcccattccacccatgtggtcgtacttgtcttatgttcggatgaaattccaaggaaacggtccttaagtgcaagagcgggaaaccgtacacccggtacgttccccggtccgcgattttggaaattcatttaggttcgcaagcaccgacccaggtgtcgggttttccaagtcttttataaaacccaagttttacccaagatgtttctcagattttaagtttgaaggcgaccgtcgatactcgtacagagtgcacgattaccgaggcgcaactaggtggttacaagggaa

SEQ ID NO: 14496 - DNA, 2027 bp, Oryza sativa
gggggggaaagcttgggtttatatgggcgacaatgtcggtttgggagaggggaaccgactttggacggtcaagccagcgagttggcgctccggctagcagccaaatcggcgacagggaggaggagaatgacgccggcggaggaagaaaaaggaaaaggaaggaagaaaggggacttgccccttgccactttgggaaaaggaggaggggatgggggcgacgcggcagagggaggaggagctctgcctccgtcccttggaggctagcgtgcggagtggcgggggccgggtcgatgacgacggcgatgacggcggggcggtgtggagcggagcggcgacacggacggcaggcgtgggcaggtgcggcagaggctgacggcggcggcgaccaggcggtcggccaccacggcacgcgcgcgcgggaagcaacgggcggcgcggcgatttgggcggcatcggcgggaacggcaggagggctcggcgcggctcacgggcagagcggggagagagagagagagagagccggggagggagggggagatgggccgagagggattcggcccatcgaacccgagggaggcaaaatagacttttgcggagggatttgatttgggaaggatttggattcgggattgaacttgacgatagatcagggatttgagatctgagatagcacggacactagacaacaagcaaagaaacggatttcgcaaatagggtttttaagagatagttttcccgctaggcgctacgacggaacgggcgctacaaatactatttttaaaaaccagcactaatacttacgatggtaagcatgttcccaagtactaaaaaaagtcatggaaaaatcacagcttaattcagtggcaagattatcttagccatatgaaaattagcttatctgattaagatgctttgttgcatggatgccatttttctaggaaaaagaaaactgaaaagaagatctatggcatccttgcatacgttataaataaataaataaacaaaatgataaaatttgatgaattgtgccaggctgccagatcgtccaactggtgtgtttccaagcaaaaacagatatacagtgacgtacaaaatatcatcaaatttgttgtgtcacacttcaggcagcttaactgaactcatcaagtttaaggcccatttgggacctgcttcatacggaaatcgaactgtttcctgctcagatttgggcgttctggaacggggacaaagagaagctgagatttcaaaatgaatcaaacaaattcagatcagtttttgttgtttgtgtgtgtttacatgctctgctttgaggctcatgaatcatgatctctctctatgtacagtgtgaaaaaaacagaacaaaaaaaaaaggggttttttcttttttgtgtgtgtttgatttgagatatctctatgatggttgatctatctatacagaatcaaatcaaagaagaaaaaataaattcgaccataaaaccctcgaataaaatgtcgaagaggattagtggtctgttaatcttgattagccgtcttgacagtggtgggttaagactctgtcagattagcccgagcgtctgcaccaagccgcccatctgtatcatcgccgcgtcgtgccacggcaatgcgccgccgccgcgccgccgacccacgaagtccatcaccttggcgagcacgccgccggcgtcggcggcggcggcggcgggctgcttcttgtcggcgccacggaggagggagatgtaggtggcgaggtcgtggacggaggcgaggtcgccgaccttgaagaagtcgagggggagctcgacgccgacgtgggtgtagcaggagtggcgccacgggcggagcacgccggcggtggcctcgttgaggaagacgccggggagcttggtgatcgggtcgtgtacgttggtgacgcggagcgccttgacgccgagctcgtcgcagcgcgccttgaacgccgcgttccccaccctcggcccgccgaaagagaagacggtgaccggggcggcgcggttgaagccgagctcggc

SEQ ID NO: 14497 - DNA, 3326 bp, Oryza sativa
cgccaaccaccacccgcggtcctctcgggtggggcccacttgtcagcttcagcgagctatccttcaacccgtggaaatgggccacagatgctggggcactttctgcggcccagaaggaacgagcccatgaacgattggagattacggcccggcccgtggagcgccttcttcttcccagcctggaataagtctatttatctccctcgtgtcttatctttgatcgaaacgcatccctccaccgcaaaaccgggtgacagccaacattatcctctctagatatgtgtcgaatagtaaaagtgtcaagcgatatttaactatatctagacattggtccaaataaccattcaatagttcataaaaacacttaaatagctgttaacttgctcaaccactgaaggtgaatcgccaaaagcatgaatatctctctcaacttcaaaaaaaagtgcaaatctagtctttagtgtcctccaacttcaaaaccggcgtaaacatgatccttcggtgaacaccgatttctgaatatggaagaggcgttatagccagttttgtgattgatggacacggttcgatatatgatggaggcaaaatagacttattcctcgtagcctcatgggtgctcaagttcatggctgatctgagagaaatgttcgtggacctaagaagtagctctatgatccagtgttcatcgatcctccatgtgagattcgcgtgagagttcatcgtctttgcttgctcggataatcaatcaccaatccagcgggcggccggccactggcttgtggtttggttttgggggagagattgagattttgcttactttgagtgagatctagttcttcttgagttcttcctcatcaagaagaggaagcagctcgcatgcccatctcccctctcctcgcccacctcgctccgtcctcggttgctccggcggcatttggtgcccgtccggcgcggcggcgcttcgttggtaaatccgaattcgcgtctccaagctctgctatctttttgtgctttgggttgttcatctcgtgcaaggtaggagttgttagggttaagctagagaaatggtttgctagctaatgatttttacttgtacttatgattcagcatgtttctgaacctttgggttttatgactggagcagagagtgaagagtaatctggactagttttttttaaaactgtgtgcacttgccgtgttgttcgctgcagcctacagcatagtttcagctcaaatgacttgaattatacagtacatagaaagatgaaggaattggaacatttgttaatctgtgttactcataatattgtggagcttctattgaatgcattacagtagaaaaaaaaaggtcaactatgatatttatgttgcaggaaagtgtctgatgtttttatagtttgaaactgctgctagctgaaaggaaaacaggcatgggcaatagaagttttgacttgagttgttctttgagaaaagaggaggaaaatggcacaaatttgtcgccatttgtccgcaaactttttaaagaggtttgtattgttggctcctcagtaacatgaatttaatctagcccatctttgatgatagtgctaaccggagtgaaacatggatgattgttatatagtgggatgaccgcaaggcaaggggtttgtttcaccatgacatcagttcctgcgagacaaaggtgttacattcttctccaaatagatttatgggcactttctggtgaattgattgattctttgtagctgaatcccatataattatgcggcaggtactacctggtgaacacaattttgtggcgacattaatagaaggacgtgaccagaagaagcggcctactcaatttggaatgaaccaagtcctgcagccttttgatagcgtgaaattcaatttcactaaagttagcccagaggaagtgatcttcacattcaaagaatctcagaatgactctgtaaagtacttcgacaatgttcctcatgctgttgcagcttctcctactgccattttgatcaatgttagtgagtgctacacccctctaacagttatgcctaaatcctaatccaatatggtgcacacatgatctgtttttgccattgtttgtttgataggtgagtccaattggctactgccatgtgcttctgatccctcgaatccaggattgcttaccgcaaagggttgataaagagagcttcctacttgccatgtatgttgcaagtgaagcaaaggatccattcttcagagttggttacaacagtctgggtggtttcgcaactatcaatcatctccacttccaggttggtcatgtcataactttttcccgtgtcctaactctaaatttcttatgatgtcctgctgttgacacattaattcgtaggcgtactatctgaaagtgcaatatccagtcgagaaggcactgacggagaagcttacgactctggggaatggtgtcagcattattcagctggttcagtatccagttagtggttttgtatttgaaggaggggcatgcctggaggatttgtccgatgttgtttcaaaagtctgcatcttcttgcaagagaataataaacctttcaatgccctcatctctgaatctggcaagagagtgttcctgctaccacaggtactaccctagaacacttattgcataacttctgaaaataatttcacactctatatcacagtagcaatggataacaaacattttgtctccgtctgattcgatcgatcagtgctacgccgagaagcaggccctcgggagagtgagccaagaattcctcgacatgagaataaacccagcagtctgggagctcagtggccatttggtactgaagaggaggaaggactacgatgaagcatctgaagcaaccatatgcaggtttttggtcgaagcgtctctgtctgaatcagaattccaagaactgaagagctgcatcttggagttcctgtccagtgcagctcctgaagaataaaggaggccaaacagttattcagagagataccgatttgtaaccgtaggtgcaataaaaagttggcccgagtctgttcttcagactgatgtacaattgaaacctctttgataaattttatataacagatgttggtgttagatcatcgggacaattgtcttcagccttgagttattgttgttgaaggtatctcaaggacagtaagtttaattatttatattatgactcgcttctgttcaacgtggcctattagctcagctggttagagcgtcgtgctaataacgcgaaggtcgcaggttcgagacctgcatgggccaccttttgcttttatttttatgattcgatttcatctttatt

SEQ ID NO: 14498 - DNA, 3130 bp, Oryza sativa
agcaattccgataaaattttacctataaattacttcctccgtttcacagtataacatttttttaccattgtccatattcatttagatgttaataaatctagaatatgtatgtgtttatatttattaacatctatatttatttagataatgttagaaagttttacattgtgaacggatggtgtattttttattcctaaaaaactaaaatccgggtaaccaacgaggatatctgtagttctgtactgtacccgactcaaccactgtgcgctccgtccagtccccggctccgtggaccgtgcactagtacaaagcctaggatttccgccagccacgtctccaacatcctctcctctgttcgttccccgccgcgaacggaatccgaatccccaatggccgaccgcgcgccgcctccgcctccgccgcccgccgggatcgactccaggagcggcttctgcgcggcgacgcggatcttccacagcacccgcgccccgggcgacctcccgccggagtcgctcccgatgaccgcggcggcctacgccttctccctcctgtcgtcgtcgacgctccccggccgccccgcgctcgtcgacgccgccactggcattgccatctcctacccgtccttcctcgccgccgtccgctccctcgcgggggggctctggtgctccctcggcctccgccccggggacgtcgcgctggttgtcgcgccctcgaggttggaggtccccgtgctcgacttcgcgctcatgtccatcggcgccgtcgtgtcgccggcgaacccggtgtccacgcccgaggagtacgcgcaccaggtcgcgctgtccaggccggtcgtcgcgttcgcggcgcccgaggtggccgccaagctgcccgagcatgtgaggtgcgtcgttatcgggtcggatgagtacgggaggctggcggcgtccgacggccgccgcgcggcggctccggcggcggtggcggtgaagcaatcggacacggcggcggtgctctactcgtcgggcaccacagggcgggtcaaggccgtcgcgatcacgcaccgcaacctcatcgcgctcatgtcgctgcacgccgacaaccgggagaaggtcgcgagggaggccgccgaggccggcgaggagccgccgccgccggcggtgacgctgctccccatccccctgttccacgtgttcgggttcatgatggtgctccgctccgtctccatgggggagacctccgtgctcatggagcggttcgacttcatcgccgcgctgcgcgccatcgagcgctaccgcgtgacgctgctgcccgcggcgccgcccgtgctcgtcgccatggtcaagtacgaggaggcgcgccgccgcgacctctcctccctgctggtcatcggcatcggcggcgctcccctaggccgcgaggtcgccgagcaattcgcttccgtcttccccaacgtggagcttgttcaggttaagcaaagcatccatccaacaatcccgtgcactctctctgcagcagaataatctactgaatctcatcaaacttacaataatgttccagcagaataatctactgaatctaattaaactaacaatgttctgtacgattgcagggctacggtttaaccgaatcgtctggcgcggtggctgccacagtcgggccagaggaatcgaaggcatacggatcggtcgggaagctggggtcgcatttgcaggctaagattgtagatccctccaccggtgaggccctcggaccagggcagcgcggcgagctttgggtcagaggcccaatcgtcatgaaaggcaagtagtgactatgcattttttgtttacttgtttagataataatacagccaggaaatttcaacattacatccaacaatgacgattcatggcctgaaactttccatacataatattatgttatcgtttgattctttctgaaaggtgcatacagtcaattatttgtctgaaaggtacatacagtcaattatttgtcatatataggtcttgtaagaggtccctcgtatcacgtaaatgttgtggtcaatagttgtttgggtaaagtgtaaatgattagctcgttttgcctgcttgtgctttgtggcacgacaccttcttctttaggctgtgtttagttcacgccaaaattggaagtttggttgaaattggaacgatgtgacggaaaagttggaagtttgtgtgtgtaggaaagttttgatgtgatggaaaagttgaaagttcaaagaaaaagtttggaactaaacaagggcttagttatcggtgtagtttcagaaaatgagagtttgtcagaccaaatagtgatggaccatgtggtagtaatagcatttgcaacagataattggacacttgttcagctacttgacggctagccagcatgccagtaggagtaggtatgctctcaagttgtttatttgtatggaggcatcacttactggtcctacatggattttgatatctgatatattactaaacgtcatccatgctttatcagagagactagaaagttagtgctggtctagacatcaagtttgttttcgactatccaattgaacttctggaattgtagtgttattagtttaaaaagcgcttaaggatatagaaatctgaaataattaaagccaatatttagcttgttgatggatttgaccttttggtagtaggccttcccagtgcagcatatacaaggacatctagcatatctgtgctttgccttaatacttgagccttttcttgattgtatcatttttggggatgctttttcaggttacgtgggtgatgatgaggcgaccgcagcaacggttgactcagaaggctggttgaaaacaggtgacctctgctacttcaatgaagatggttttctatacatcgttgatcgactgaaggagttgataaagtacaagggataccaggtaactgcctgccatagctgcacagctggttcaaaactacattcacgccagccacctgggtaagttgtcacaagtttctgtttgcatgatgttggcctttaaattttttctcaggtacctccagcagaactggagcatattctgcagtcccatcctggaatcgctgatgcggcagttatcccgttagtatcttaagaaaaaaaattgcagatagcttgt

SEQ ID NO: 14499 - DNA, 2578 bp, Oryza sativa
tcacttgtaaaagtgatgcaattcctttctagacactgaactggaggcatttgtttgagttttcacgtttgtgaattaggtcaacttgcaattcactaacaaatgttgtgctagtgagtgcaaaaaatggaattcttagtgtcgcctagggggtttgtagtttaaaatgtgttgcaggaaataaacatatcgtgtcatgctatttttgatactggaggtagtaattagtagctgatgttgcctatgctgtccagatgttgatgccggagactgatcttggttacaaggtcactcatttatcacttaataccgacggttcatcgctactacttgctggatcacataacataagtattctgtatgtgcatgagagggtttctgaagatggtgataaggtcatatgcaggtacataagtccactatagctttatcttatgttattagtattgtactggtatttttcccgaccatcttgcaattatttaagctgcaataggttgttgcatatatacatgcagcatattcatagccgtgaacactaagagtaggtttctctgagtactcttatcatcagggtattgaagaacgcaactccaaaattttatttcaccttgctctttagatttatgacctgaatcattatttctcttcctttttttaatatcattactcatatcttctttctttcattgtattgacttgtacatatggaccttacaacaggactgtgccagttgcttctcagatcttacctagcaacaatgatggcatcaaagtactgcaaacatcgtggcacccttttagcagtagtcattttggagtcttgacatcagatgctgttttcaggtttgataaatgagtatcgatgctagatggaggaattccactttatctatgcttccttgctatttattggatttgattggaatggaaatacgtcttttacatccacacttaaattaattgaagacaacacttgcttttaaaaataattattgcatgacccttttatagaagttttgttattatttctgcaggttatttgatctgtcatttgatttagagcaaccagagcaggagttctatttgcaaccaattctacctggcaaatgccagaatgcttcatcaattttccagtggcattctcatatgggagtgatcatctgtgggatagattttcggtatgtttcttgaatattgatcccctaaatattgtagaagtcatctggaaaaaaatatagtaaatgatctacagtgtctttattagctgaaaacaaaaccagaatgatttttcatccgatgggattgttttgtaatttagcaagcaatatcatagcatagttaatattaaaccacaaaataggatattagagtcctacccgaattagccttatagaatctactccctccgtcctacaaaaaaccaacctaggtggtgtcccatccccacctaggttgcctttttttgggacggagggagtacttgtttgcttcacacatgggattaaccttgtagtttctttatttacatctgtagcaagatttagggtgtcacaagtcatattactacataaatgaacttggcagctgattgcatggtttctacgcccaaaccctttttttctggaacatctaataatgtttgtccccactattcatgaaagagttactggaatacttttgatactttatgcatcactttctttcatgtcaccttttcaattggttgtttcgacatatgtaatatttttagtagtttcggcatacttcgtatgtttaatggctcatttatgtgcttaatttcacatgtaagcctgtccttttacaggttttcatcttattcagcgatggttcaatttttgtgctctgccccattgttccatttggaaggtaagtattgcatttatttctgccctcccccacccctcttttctctctattgggaagaaggcttacaacaatttgacagcatgatggtcctaatttgttaaaacaaaaaaaatactgtactaatttgtttatgggaaataaattatggtccctgcagtttcacactttcactttgtagtcttgtatttatgaaatgcgaccttaatgatatgatcatatggtgccctttctttatctgcatattggttttgactttattttttttccctgtgatgcagcgattacaataagaagcatattcaagaaatatatgaagatgttaattcatttggattgaaatcctcaaaccaaaatgttgtcaccaactcacgtttggcaattgcttggttggaagcaacgtttcctgacttgtcacgtcagccagctgataatagtgcattgatgtctagagctcatccatacgcatcattagatgattctctaactttacaggtctgcttctatttgacttggtgaaatattgttcgaaccaaaagctagtggactatgctaatgcaatgaccagagaaatgtgaatttggtgctcatgcagctggtcataatcaatccattgttttttagtatatgagatttattgttttgtaggagttaggagctgattggtttgcgaccagacatttccacaact

SEQ ID NO: 14500 - DNA, 778 bp, Oryza sativa
gagtttgtttggcagcataaagatggaactactgtgataaggctaaactctttcactcatcatcctcttcctcgtcatcatcatcagcaccagcagaggagttgagagcattcaatctttcgacaagactggccttcctctgttcgtaggttagcttcttgaggttgtatctgagacaaagatgcaagttagttacaatcatacatggacatcacaaataatctttccagaaatcatcagccagattcatgtacctcttgtgggtcgccggttccttcttggttgatttggccatggtaggatcagcacggatggcagcatggaccttcttgtacagtgcttccatgccatcagcatcaattcccttcttgaggtactcactgaagtgggcttggaatttctcaggttcctcctccgccatagactgcaagaagtacataagtagaaattttaaactgatgagaataaaaatcaagcagactgagctaaacagtaacaaattttccagcctgcttataatgttttagtcaatattacaagcatcaaggcagctacataactcctaatacaacacacagcaatgtcaaaatagcacgaacaattgatctaatagtgccagctcaccctcatgtagtcagccacgtgcccaccgtagatgtacttgcggtgaatatcagaatcaagctgcttctcgtccttcttgaacccagcaaacctcttgtcactgtgaggaatgtcaagaccaccatccaaagctccctgcagaagaaaagagaag

SEQ ID NO: 14501 - DNA, 625 bp, Oryza sativa
atcgatttatcgccagaaatcaagagattatctgacttgaggtccctatgaatgaacccaagagcatggacgtaggccatgccccttgcaacatccaaggcttgcttcacagcaagctttaatggaactgacctgttctgcctcttcatcagaaactgcctaactgagccaccctttgcatactctgtcacaatgcaccaaaccatcggcttcctgcatgccccaataaatttaactatgttgggatgcctcaaagttgcaagcatcataacttcttgcacaaactgtgttccattagcccggctctctccggatccgcctctggcctctccaaaagcttgatggcaacatcctccccattgtaggtgcccttgtatagcttcccaaatgcaccctgtgcaaagggcatccccatgtggagcttacccaaatcgatcgtccactcctcgtaatccttgagcgtctcagtcgggtacctcgggtccatcagtgcccgtgcaagcgcatcctcactcaacgcatgcgacacccgcccggggcggaaaatgctgtgcccaaccgagtaattggctgcgacatgccccctgaggcccgggtggttgagcatcctggtgtgggaatcact

SEQ ID NO: 14502 - DNA, 4069 bp, Oryza sativa
ggaggaaggcatcagcatcaggcatgggacgatgggagatcacatcgaccgcgttcgtggtgctttacactacacgtgcgtgcttggtttagcattgagctaagggccggtttagatcctctaaaatgattaaaattttaccgttttagaacattttttagcaaaataaatgtaaaaagtaggcaagttggcatttgtcatttgatagtaatctgaagaaaaaaaaatcaggccccgtgcataagagaggcggcagcaattaatggcaaaactttaccatgcatctaaatactaacttataaaattgcaatgctaaatctttttccatcaaaacttataccaaaaaatttaccgcagcaagttgatctaagcagacaataagccagtttttctgtgtatgatgtgtctggtaggaggtggcacaagcgcacaacacaaacgggcaaagggtgaaagggtttcacctacaaaatgcttttgattgcttcgttttttttcactgtttatcagcgtacagtaacaacaaaggttgaactgtatatttccagtttttttaaagaaaaaacctgtatatttccctttccttattctatgggccgacaaatccctcatatacggcccatcactataagcccagatttatgctacaaggcccatagcgtcacctcgccacgaaacggaataagatcactttgacttcctcaactgaccaccgaatctaaatcgtatccctcaactgcaataccaaaaatcttgacccccccccgaacttgcaaaaccggtgcaatttgactctcttagtggttttggatggcggtttcactgacgtggcgcacacgtggcagtgttgacctgttctttgttccacgtagcattgacgtggcgcttatgtggcattaaaataaaaaaaatatatgcggggcccatttatcattcacacaaaaaaaattgtgggacccactgacatgtgggttccacatgtcatcttctctctcactacccttcttcctcctctctcccttatttctctctctctccccttgacatgagccggcggcaggcgggggctcggtggtggcatcggggagcgggtgccggagtggtggctgcggtgggcggtggacctcgagcgacaagcccgggagcagctcctccttgaaatgggggtggacctcgggcgacgtgcgacggaatgcgtcgggggagatgggagcacgctcccaaccgccgctcctcgtccccactctgtgttgtgggtagtgaggagggcggcggccgcggcgtcgacaacgaggtgggtggtggccgcggtggaaagggagcaatagctcgcgcgccccaacgcacggcggcggactggccttgagcgctccagtgtcgacctggccatgatgcggagcggcgattggagctcctcctcctcctccaacacgggcccccttgtcacaccctgaaaatcaaaatatttaaattgttgtttaattggaatttttagaaataatttaaaagtcttgaaaagaaaatctaattttaattaataaattccaatataaaatggggccagattaaatttcatttaatactttgcttaattctataattcctagatttttctgggatttatttgagctaaggaagtatttttaataaatggaattgcatttaaggaataatttaaattgaaaaaggttttaaaaagtctcttttggctttgggccgaaagtcggcccaaaaccgctctctctctcctcggcccagttcggcccagtccgcagccgtcgcgtgcgcgcgttcggacgctgacaggtgggtcccacctgtcggacccatcgtctaccttcggccgccgccgcccgaaaccctagcgcgccgccgccgccgttcctttccaaatccggccgttcctttccttctccggccgaattgtttgaggggaaacaatctccgggatctcctctaccttttctcctttggaatctttggctaaatcgttttggaagttcgtggaatcgagttcgtttcggatcggtttccctctctccaagccgagctttccttcgccgttgccgccgccttgggccttcgccgccgcctctgagcccctttaaaaggacccccggtgtctcctctacccgttgccaccttcgccttcgcctctcgtcgtcggaaaagccctagcgccgtgtgccctagctttgccgtcgccgccgccgctccagccgtgcgccgccgtcgttttagccgtcgccgtcgctcgggaagaccaccgtcgtgctcgccaagtcgtcgccgtcctcgtccgccccttcgccgtcgccggagatcgtcggagcttcgtcgccatcgtcaagccgaagagcttcgccgcttcctcctcgtcgccgtcgccgtccgttgaccttccgccgtcgttttggtcgccggtgagttcgccgtgccgcccgcttcgtcttggtgccctccgtttgcgtcctcacgccgccgttcgccggcgagcgtgcgccgttcgagccgtctcctccgccgagccgccgccgctgtcggtgacgtcaccgctgacgtcatcggggtcgtccgccgtgagccgccgtggacccgatcgatctcggccgtccgttttggattggttcgatctcggccgtccgttcgtgtgaaccgccgccgtgcgcccggtccaccaaaccctagcccgctgacgcaataaaccctcttttccttttcaaaaataattcattattgcgtcataattcaattttaaccgatataagtgttttaatccgatggaatctttaaaaattcataactaattcatcttagctccgatttagttggttcaagtctctaaatttttctaaaattgagatctacacattaaaaatatccacatgtactgttcatgcttgtttatgtgctgttttggtgattttgctcttttctgcttagattccgtcgtttccggagagtccgttttcgcagaagaagagtttgaagagttccaaggccagcaaggcaagtcacacagatcccaaacaaccctttgagcatgttgatcctatttaaagctactgtttctattcaactattgcatctattttcgaatgtcattgggtggaattgacctattctttgttatggcccttttgtacttgattaccttattccttgataccttgggttattacaatttgactagttgagctttatttatattggttcaactagatattagatataattgcttagccctgcttagaaacattagcacacattcgggataactaatgactcactaatatttcatgatggtttcatgatagttcacgatggtcaatcgtgattagttaattaattaatgtgccaactaaaacctggtaatggtgggttgtgagcacatggttttgttggtcgtgctcatgacaattaaggaccggttcacgagtttcagttgtgaaacattaaccgtgccaaccacaagccagcatgggcaacggctttatcttttgtatagcatggttcattgcggggcaccagactgagaagtggcggagataagcccacgggggtcgctggggagtccatgccttgtttataagggggtgattatgatctaggaaggtgcgctgcagtggattgtgttatgcgaggggtattgtcacaactcctttccgagatactgtggtggtattgaggcacatggtgacatgatgtggggttgtgtcttgtgggtacagtggtacacctctgatcagagtaaaactattcgaatagccgtgcccgcggtatgggcgggtctaacaatgtctttcgtgattagtttcacacttctcaccatagtaaatgatgcttaaattggtaataatttgattagctcctggtttggaatggaatattcctggtgtggagatagaactgtgcagccggggtggttgttcagaatggttgggcctatacaacagggtatgttgtatagcgttggattaatattgtttaattacttaactgttttatcgaattctcaaatgtttgctaaatgctgcttttgcaaatgcaaccctactatgccatcctt

SEQ ID NO: 14503 - DNA, 2461 bp, Oryza sativa
agaagtggcgcaagctctccgtcgcgccgaaagacgcggccgccaccgccggcaatggcggcggcggcgagagcaaggcgaagaagttcctgaagaggacgctgtcgttcacgacggcggcgcgtcgccgggggggacgccgccgccgagggggcacctggcggtgtgcgtggggccgacggcgcagcggttcgtgatcccgacggactacctgaagcaccgggcgttcgcggcgctgctccgggaggcggaggaggagttcgggttccagcaggagggcgtgctccgcatcccctgcgagtgcccgccttcgaggccatcctcaaggccgtcgagaagaacaagaaggacaacgccgccgccttctgctactgcagctacgagtacgccgccgacgaggtcgccctcggcgcccccaacaacccattgtgcagatgaagaggaacgtagtagctgctggtttttagcatggctgttgttcatccatccaaaagaaatggattttttttctttttcttttcttttcttatcgatttgtgtttttaagtgttgtggatggtgagggatgatttgatagtatctcccccctaagcttagaattactgcgtaatattttttttcttattttgttgagttgagctgatgatctgaattgggtaatgcagccctcatggatgaaattaatggaaaatatttatggttgatatggaaatggagtatcttcgttttgatttgttgaagtgccagagagaatttctacctctgccggtgattttttgatctgttcaaatggagaatgccccatcagtaagaatttctacctctgcctttcagtgcttttgctgttattgttcctctatagtgatagtggtagtaccgtagtacatctcaccgccattgtttatgtcaatcttgactatatagtgctcgtgcacgtctctgtaccatccttttatttttggagagaggctgtactgtctaatggaatcaatgcttacttttggatcatttgttatagtttgttcaaacgctgaaatttcattgtatcagtttctgaaaaaaatatcagagtagtacctttgttttgccaagcactgttcaacacctaagtgcaaagaaacatacaatcagcaaacaattgtaggctactgtagtaccttcaggctatagcactgtgcttgtggccttgtgagtgtactcgatgaactccataccacaaattgcatgagatttcagctgctcccagattctgactctgactcatagccattgtcctgcactccactctgaattttaaggattttccttctgaaggaaaaggttggccgcgcaatatcttcagacttcaggttctgatgccctctggattcctcttttatgttgtggttttcattagacaatgtgagcatgcattagtgacagtttttatctagtaggaatactcatgtgatcctatttatccattacgtaatgcagctatgagagatgatctgttctctgatgtctgatttgtctcattgtctgatcgccttcttcctttcttgggagactgaacaaaaagcaaaactttttctttctgcaaggaacaaaaaggaaaaacttgagtcgcttttatgaacagaaaggagcaaccaactgattccaaattggcatcagttttggctttgttcctttgttgctcttgcccaacttggtttggtccaagaaatgtggggagagacctctttaaaagatgccaagtgatgcccatattactccaagaaaagcagatgcaatggatgcatcgatctgatcactcaccgaccttatatcttcatctttctctgaccttttctctaatccagcaatttactagcatatctcgatcaaatgttgcctcgcactccaatgaataccaagcataggttgaaactctgactaggaacacaagattgttcaacccaatgaggcattttaaacttagatgctgatcccctgaagtccaccacgattaccaaagtgacaatgtgatgaacaattcaagctgctttgtcaagaacatgacctcagctcgtgtacacgctggtctcgatcctatgcattgcttcttgatgcaatgcatggcttgtgctagtcaagatcaagattgtgacaggcagaacaaaaacccctgaccactcactcagcacatcaccacgttccacgtccagtttcggagagggttgtactcctccgttcctaaatataagcatttataggttgtttaataaagatgaggaataatggaaaatatttcctttgagttacctcattgattaaaattcaaattttgaattttgaattgtttgaattcccctcctaagcatccgattggctgaaaatggttggattctcgtgctttgaaatcggtgtcctagaaatgcttatggctatgtttagttcatttcaaaattggaacgatgtgacagaaaagttgaaagtt

SEQ ID NO: 14504 - DNA, 3323 bp, Oryza sativa
aaaaaagcaaattcaacaaacactaagagcagtgcccagtgcacatgtttaatacctggttaatgaataacaaaattgtctgggaaagtgagagagagtggctcagcttgcgaagagcttggctcatcaatctagcctggagagcaacatgtgcatcacccatctccccgtcaagctcactcttagggacaagagctgctacctatgtcacaaaataagatgcactgcttagcaaacttctcatataaatgaagttgtatttattaacgttgagtgtcgataagcatgttccaactgctaattggacattgttattaaaattttaagcagaaagtgcactattatcaatttgaaagaaggcaatgctccgaaaagaaaaataaaaatgggagggggatagatggtcaggttcttacactatcaacaacaacaacatcaacagagccgcttcgaatcagtgtgtccacaagactgagtgcctgctcgccacagtctggctgagagagaagtaaattactggtgttgaccccaattgattcagccagagctggatctaaggcatgctctgcatctacgaaggcacaataacctagaaaaatagcaaaaacaaaaactcggtgaggtatatattaggttcgtccaaattctattttagatgaacttgcagttgtcagtgctcatgatttccagaccaaatggttcatggttttttgaaatgctccattaaattgcattacaggcagattttcccgagtaggttctgtgcgtgtttgaagaccaacattatttggtgaagctagtaatctagaagtatgaaggagcaaataacaccttcatatttaaatgtttacactgaattaaactatataacctctgtgagctcaaaacatagcattccctaacccctctgagcgaacgaggacaaaagcccacgacaggtactttgcatatgtagcttatcccatggttgctgggctttgagctaatattgggctacacaatgtcagcatattccatgttctaaaacactaaaactggtttcgtcatattccattctccaaactccaaatataaagacactataatgctattggctattacacagataccaagctgcttggtaaaatacatagcgcaccgtgggggcctcccctgctgatgatgtcaacaaaatactcaatggtacaatattttgaacagacaagtttaagaactatgttcacatcataattagcaagatcactttcactgtcaagcagttgtaagccagcaaaacccttatgcatactacataaaaagcatctgactgactataccatcacaagttcacagcattaagcacatggtaataatttttatacgtattagatgttgttagcctaaatctttggattaaaggagaacacagaataatctgtaccttttctcatgtaaaatatatgctattgctaaaatatatagattaggttcgaagtgctgatattaccgccatgcttttgtgcttctgcaataacgtgaagtgcaagagttgtcttgcctgaagcttctggaccatacacctctataacacgaccctacagagaacaatagcatgacattcatacaaaacaaagtatgttttgtccatgaaagaacatttgcacacttcatatgatgagagaagactaatttttagggtagttaacactcagcagaacttagatttgcaaagaatatcatgcaatacaaattaaacattgatacaagtgagattctacttacaagatattttgtaactacataggaatccttacctttggaagtccaccagttcccaatgccaaatccaaagagaaagacccagttgacacaacaggtacttctctacgaccttcagaacgaccaagccacattattgcgcccttcccaaatgcagatgttatttgatcaatagcctggtgtagagccaagtctttctttgacagattctcttcaccagagtcagttccactggactttgtcttctttttggctaagtagatgattcaaaaagaataaatataagattcagtagatggcagcaataaaacataaatcaaaagaaaaaaaatcatgcagttcaatttcatcacaaattcacaatgtaacttatgtgtcaatacaggtaatatcaagatttaagatgatagcaactgagccatgggatgcagtatttagtatatctaaggtaaggtatgcacataataaatcataaaaggaataagtgtctactacctttagacgagaaataccggcagtggaaagtagagccacagatcccttgcttatagctctgcacaaagattgatgcattagcaaaaccatatcaaggtttttatgtgaaagattaaacagcattgtttcattctcaaccggcatcatttaaagctaattatgaatacatatcttccagccgcattaatttcattatgcatactgtgcgtatcacaaatgatttcagtatttgttttgaagtgcacactatgagtgaatctcttccattctcatcaatttcattgtgcatactgtgtgtgtcacaaatgatccagtatttgtcttaagtgcatacaaatacctacaagtctgaaggtgcaaacaaatcgtgaggtcaggataaagatgacacggagatgtgttgcaacctcaagaaaacccctggaggctacactaatctaataacctaaatcacctttggtgttgcaggttaatctattgtaagcaaaaaatatatttatggcgcattaaagggcatgtacaaatagtacagatgcttaggaaaaaaatcccttagcatctgttcaagagccttgatgtccaatagagaacacctattttacggacgctttagttatttcaggtgcttctccactccatttttcatgcaggcgctcgcaagcatcgactgtttcacttggcggcaagcacctcacgcagcaccagcgtggcaaaaatagacacagtttactcccctaagcatctgtccaagcacacagattgcacatagccttaataggcatttctccaaaatcccggattctaggtttgtagtacaaaataaggggaggggtaccctcagtgatcaaaatgggggtcattcggtggcacagagcaaatcgccgagggcatataagccgcgcggttcaccaaacgcaagcgatcaaaccccagcaaggatgccaaatcgcaatcacatatggcacaagctgccagtaggaacactccatggccaccaaggggggcaaaaaaaacacagtcaaatacggcggggagagaggaggggagtttcgacctcggggcaaggcgcg

SEQ ID NO: 14505 - DNA, 2771 bp, Oryza sativa
atcccccattttataactcgtggtgctaataaaaaattgataatccagcataatcaaataacttgaaatgaattcccctgtgcgttgatagtaataagccaacttactctgataccaagaagtgcagctacagaacctcctaaagaatgcccaacgatttcaatattgtatccatggcactcacatccagcgccgagcaaagaagataagaatccagctggcactgcatctggtttatctgcagacggtctcaagatgacagttaatcccaggtgctaacttgaaatttttcaagaataagttgctatagtattagcgaaacaagtcactcgttcagtccaaaaaactgaagggttcttgtttgtacatagagaagaatctattctatacttaccaacttgtcatgcttaagatattactgacgggtattttggtatttttatatctataaaatatgattgttaggaatgtgtgactgtcatctgatcaaaatatccatgtatttaagttccacatcaaatataaaatataaagttacattatttccatgctaaccttgatggatgggcagcccttcaagcttagcgtacagttctcgagctgattcaaccattccagcatgtccatggtgtggaaaggatgagatgacagcatccttaacttgtaggggtaactgatcagaactgcaatgcaacagatcattttatcaagaaaaaaaatgagtcctaattcacatttaattcagattgaccataaggaccataacgaagaagagtatttcccaaatttaatcatggcggaccatgagactattggcagtggggagttccagatagttcgtttcatgcacaagcagctggctaaggataagccttatttattcataaaataaccagcagcttactctagataagttttagtgtaagtaagggaaatgtagaaaaagtaaagttacttgatcagcccatccaagtcatccaccgtaagagagcattccctacacaagccatcagttataacatcttcaggagtctcagttccgcggatggcaatgactaacgttttcaaatcgtgcaggacaacaacaaaataggcagcctcacgtcttgcctacatacagaatacaaaaccttaggttcgtcacacgccataacaaaattgtaaatagaaggtgaggtagactgctgattaacctggctaacacggccttttataagaacttccgggggtacactgacatattttaggaaagcagctgcatgccctcgccaccaattatcgccttcaagaactggtcgcctgtcaaactaaagttccataagcgtgactatataccatgcagcaaagacacaacagacaaagacagacatcacataaaaactaaacataatctggagcaccaattggctctgatgcaaaatttagaaagagctgaaattcggaattaaaaaataaggaatattagaagaggagactagagtccatatagaaatccaattaggaaataacttaaattcggaattaaaaacaaggaatattagaagtagagtatagagtccatatagaaatacaattaggaaataatagaaattcggaattaaaaataaggaatattagaagtagagtatagtccatatagaaatacaattaagaaaaaaatagaaattcagaattaaaaaataatgaatattagaagtagagtatagagtctatataggaatttaaaactaactataatttggaataaacataataaaattaaaagtagagtttagaatccgtataaaaatacaatttacaaataactaaaattcgagattaagaaaaaacatgggaagaaaagtttaaagtcaatataggaatacaatttagaaatagctgaaattcgaaattaaaaaaaaaaggaatattagaagaggagactagagtccatatagaaatacacttaggaaataactgaaattcggaattaaaaataaggaatattagaagtagagtatagagtccatatagaaatacaattaggaaataactgaaattcggaattaaaaataaggaatattagaagtagagtatagagtccatatagaaatacaattaggaaataatataaatttggaacataaattagtagttttgaaaggggatttaattattcgttctttttccctttcattttaattttgaccccaagggaagctgcaatgtcatgttttaagtgactgtgcttgtagaagagaccaaatttatcaaattaaattatgcaaataatttgaagggttctgttgcaatatttatatgagctgtctctgtgccatgctaccaaataacactagtcaagttctaaaatatgtcttcttattttcgtataaagattgaacggacatcaaagtaagcaagcacaaattatccaagtgctaaagataaaagcaacactgacaaaacatgtgcagcataatctcttttttttttgtgcaactagaagagcatagccccccccccccccaaaaaaaaaaaaaaatccattagcagaaatgagcattacaaagttttcacaacataatctaattatgttttgcaaaagcatgtaacaaagcaccacatatttacctagcacgggtccatggtgtcataacaccctgccgattgagccaaacacatggaaacataaaaggattccttccaaaatcaagaagtggtccctgcaaggagaacatgtaaaaaatgtactggcaagactgaaaatgacagaccaagtaaatgagtcaggg

SEQ ID NO: 14506 - DNA, 580 bp, Oryza sativa
cacgtcttgtcggcggaggtgtagaggctgaggaacccggactccaccttgacgtcggggcgcgggtcgcacgggtcgagccgcgccgcctccagcgagctcatgaggttggccatccactcggcgggggtgaccgtgccccggaacgagacgagcacgtcgcgccgcccgagccgccgcgacatctcgtcggtggacaccgcgacgtacccgatccaccgcccgcgcccgctcgtcgacggctccatggtcggcacgctgacgtccgccgccgcgtagatgtagcgggtgacctcgtacccggcgccgcccatcccgacctcctccagcatcctctccctcccgtacttgcagttgaggtacctccgcgacgccgggtccaggtcgaacgccttgtagcacgcgcccaccagctcgccgtaccgcgccacctcccccctcagcaccgggtgcggcgccggctccagcatcccctcccaatccccgcacccctgcacctccctccacatccccgccaccgtctccgccgtcttcctcgccgcccctcgcctcgccaccggcgccaccaccgcatccctca

SEQ ID NO: 14507 - DNA, 8947 bp, Oryza sativa
aaacttgttatccccgtgttcttgtgttctaatcatgcttatggttttatagtggaaatatgttgatattgctactttccctaactgtaacgcttaaacatcaggtattaacagaaaaaaagaaggaatgagtaatatcacatagaagaagtcatttgttgcagaggccgggtgtaattttatttcttattaatgagaatctccccattatctaaaaaaagaagaagtcgtataccatataccatgttgttgtacaccattagtggtgtgcatctaaattgtacaccatgttgtcgtaaaaatgcactgtacacaaattacagtaaaacacaacaaagataatagactaagctacaagatggatagaatttgcaaactactcatggtttccctatacacccttctgcgtctcattgtcatttcgggcatgtttggattgctaccataccaatttgttgttagtgccaaattttaggcaagttttggcactaccaacattttggtaaaggtttctattgatttggcaagttttggcatcaatccaaacatcacacaagtactatttagactaccaaaaatttggtagggcaagatttggcactaaaccaaaacagcctttcatgttctgtatcatggtctgtgcaggagcaatggtcaaggttacttgtcaggctaatgaccaggcactggtgggtttcggctatacccaagacaatggcaagtacagcgtgagcatcacaggcttaccactcagcagcacatatggggccgactcatgtaaggttgagctccattcagcaccaggaggatctgactgcaacgtgccaatcgagctaaacttgtctgggcttagcgtttactcgaagtccaatgaggaagtggtgctccaagccaaccaagtaatggcattcgcgtcacagaagacatttgggttttgttcgaaacctcacattcaaccaccaatttttccatacaattcaccaccaccgtccccttaccagtatccctcacctcctttcaactacaagtccccgccgttgccaaatcagttttcaccccctccattcaacaagtttccacctccatctcaccagtatccatcacctccgcagagttcctaccattcaccaccaccctatcagtatacacctccaaacagctaccaagctccaccaacatcttacaatcacccgccacccccatatggatacaattctccgatcccaccaaccaacaagtatttaccacccccatactacttcaactccccaccgccacaataccagcattcgccacctgcaaacagctatgtatcgccaccactagctcaccaatatcccccacctccatacaagtcaccaccaatacctccttactacttcaactctccaccagcaaaccattattcaccacctccatacaactttggatcttctcccccaacctaccagtactctccaccattgcttccgaaaactccaaaatatttacctcctaaagttcctcttgagatgtctccaccggcacatgcaacatctccacagcctctggtccactatagccctccgccaccactgcagcatgctggcatatcatcgacaacaccatctgtgaactcctatcaatccccgccaccagtaaatcagctgtcataagcatcagcgatgaggctcctgaagtgtaagttttctttctgatttatatggcataatgcacgattttcaggagtgatgtgaattttcagactttaaggagaaactcaagaaatataactaaatttgctacatgaatgcgaggcaattgtatccacaaagtcagtgacatgttatctatatattactcaatctcctttcaggatcaggcgtctgcagaataaacgggagacttgaagtctacctcgagaagaagcagtgggttaattcgagttccaggcatccatctcagtatctaggattgttacgacagtaactagtattgtttcagcttatatctcattgcctagagctaatttcagcagggtaatcataagtccagtaagcattgccagtgtctctagttttcaactgaattcaatgtatgttgttggttcctagcagcccatataaagcttttcttatgagcacttattacataagaaaatcaatcatatgagaggaatatggttgcttggctgaatactgcactagtcccattttttgttccacattatatgtgcaatatataaatccaaatgcacctcttcaccacaatcaaacaaaagaaaaccctgaaatatattctgtgatcgaaaatgagcgtagaaaacaactcacgaaccaatcactagtcatcactaaatcagagcttcaggatttcagtaggatccagtgcagtgcagacacaccagcacgttcttcagcgggcataacatttttcagacgtcgcatctcttccacggatctcgcggtatctaaacagcatgatcctcccacaaacgagaaggaaaacctctacatcgccgattcctacgattttttcccaaatgcagccgccgaactagtaacttcaagcaacgggctccaaggacataccggagaagacgaagacgacaacgaagaagcaaccggtggccatggacgcggcgttctcccggaggtggcggttgaagcatcgccagaggccgcggcgacggcggcgggacctgccgtcgcgccgccgcagaagatccggatagtttttgggtgggcctgacaagcctttatctggggcttccatttgggcccgatgggccacgcgtggtgggccgcgacgtccctttcggcggttagctttcaacgtcacacgacgcaactgtagtcgtgagccaggcgatttgattaattgcttttgcattctactccctccttttttttaaactaaccaatgctacacattaggaaacggaggtggcactactatagaaaattcctttagctctgactcttttggagttggagaaaataaaatgagatttatgaggagagacgtccctccaaatattttttaagaataaattatgagcgtgttcaagattaaacacgaaaacttaggattgaaatcacatacctctagctattgcactatcaaatacatctctagatagttttagcttcatggagttgagctggttgtaatgctctcacaaaataaactagagatgaagtagattttaggttgcttcataactttatttcaaacccaactcttgaaataaaatttaagagatcgagtctgctaacatgtccttagaactagaactaattaaatttatcaggttattttttataattgatatggaggttcaggattctcacccatcattttccaaaaaagcgagcaactagacaaaaaaagtggccacaaaacgaaggaaaatggcaaaattgggggtggctttttgtatttctctgagccgatgatgtgcttgaggctggcattgcaggagggccagaaaagaaagaaaagcaccattccctgatcaactttgagatgccaacggaatatgagtgacatattcccttctcctgccattggaggcctgaggctaagccacatccaccattccattccatccataccccaactgccatacacacacatacaatctcctcatcatcctttttgttctcttctcagctcaatccatcacttgttatccatacacttcttaatcagcatcaaagcttatctcactcccccatatactgtagtataatccaatagtacaatcaccaatgttaattactgtaattaatgaaatgtggactagtactacacactgtactagtaatatgcagtgacattgctagagagtttgagtatcccagctactgtagtagtactgaaactttgtcatacacatgtatggtcaggtgtaggagtagtgcagctatccgtatttttaaagcaggaagagaactgccactatcatcatcatcatcaatcagtgtaattaagtaatgggaccagcagacactaaatgcagaatttacctcgagatccaactcgccaccaactccaatccaagtgcagcagcagctatgatattccaaaattcatcttcaatcttcatgctacaagactgaagcagtataccactactaccaatgaacattttactgtaagttggggataaaaagattagaaattggcagaagaatctgcagtataaaattgagcagcagcttggaggcaaaggcagcacagcaataaacttgggaactgctctgctactaaccctgtattattctgcaggagagaggcagattgcccaaaaagccctcacactgtcccacactcccactgctcgccaagtccaagaaagggaaacaaaaaaaaaaggggggaggagagacgaagagagagacaagaacaagaaagggcaaaggcaggggaagaaagcagcgaaaggattcaacgcagctcgcgaaggccgcgatccgccgcctcgcctatccttcttgacagccgaccttggggcggatttaccggtacgatgctgttgctgttcgtctcccctttccgtatttgatctgattgtagtcgctaatcggcatgatttttatggttttactcatattggattgtatgctcgtagaacagaggcaaagaaccgatcaagatggggtttctttatttttctctattgggggttgaacaactgttcgaggaacaggagaaaccttttttttttctcagatcagtacaactgttccgttttccctagtaataacatcctttggtgttgcttagagaatttggttggatcactccgatattcatttcatagatatggattcgtgatagtgtgcgattttgtgttaacagtaaaggattcattttgcaaagtgttcttgatccactggggccctccagaacgcattttgttcaggaattagggttactgggttaaggcaaatgattttttttttgaagtaacaagggataattttcaaagttggaggggattttttttccttattctttggtcctgttcttccaaagttggttctttcatttcgggggaatacaattcctaatcgatctgaacaacttcatgaatcatgaccacattgcccacctctttgttctctgttcccctcttgtgttgatgcaacttgcattccagaggaagattgctttttattaattattgaggaggaagatgcgcatgggttatgtactgttgtagaaaatattccctgatttgaattcatcattttgacttctgttctaatatgcgcggctccagttcatggacctaatatagttcgatggacaagatagggcactgaattgggcttactgttagaggagtactggttctgcttttgctgaaggaattatcctttgtctgatgatgtgatatataagctacttgtaagctggaaactaatctcacattttctttagttttgttgataaaaatacaatgtgtgttgtatcatcttttggttggtatggtgtcgagcacatttttagttgtcaattatgtttctctttgcagaacatatttgatcgttctttgctggagtttatcaatggcagcaggggtcacttttaactggattaaaaccccacttgacatccggagatttcatgacttttctagtttaaggtctctctctcattgtacaactgaatcatttgactggaccccttgcatttcgaaaactgactattgtagctaactattgtagttttcgatgccgaaatacttttggatcaatccaaccttcctggctgacaacagaccaggaaccatctttttccaaagttcgagtggctgcagattactcagattctgttccagattcaaagtacacaagagatcggggttaccatcctcttgaagaagttaaagaacgtccaaaaaagaaggacctgtcactgacagatgtggaaactgctagaactgtagtagaggtaccctggtgcatctatacatttgtttagttactgatgcatgtaaatcgttataattttgcataggaatgacttacaagattcctcaatcactcaaccttaggctgagtaaatatctgtaaactgtaaaagttaagcaataaaaaattattcctgttgtaaaacaattaaactggtgatcttaccttgtgtatcgaatccctatcatactctggataacttttctatcttgtctaggccaatagcaagggattacttgtgttccctgcaagagtgcataatgaacctcatgggcatgttgcttggtcagactttcagtatattgtagatgactatggaggtaatgccttaatgtgcagcatatatttttacagtagggcattcatagtcctcattttcatataacaagttctgtacttatgtacagacattttctttcaagtacccgacagtgagaacatcttggaagatgatgctgcaaacaatcctgtggtaagattactctactttagtactttcatgttggcgtatgtcttcacaagcacatatcatgttgaatgatcactagcgccatgccaaaaggatcagagttttggaaatgttgtaaactgttatgcaccagtattctagtgggaatggcatatctgcttagttcttatcggaatggcattttaattgcagacagttttgattggaatggatggccctattattggagaaactagtgtggtgactagtgattttagcgactacatggatgttgaaaattttatagacatgcctgatgagaacgacagcaaggtttgccaaataaatcatcgcctgctttcagctggttttatgacaagttttctatcagcaacaattactgtcattagttgttgatatttcctttgtgatatgtcgcagatcgatacagaaataactgacattcttatagagtgggggatgccagcaacaatgcgtgcaatacatccaatttattttgcgaagtgtttgacaaaggtaaaccgtcaaaagttattgcaagcatcagcaaccattgaaatagtggagcagatgaaaactttaactaggataactttcataaatgtattggcaatgtgaacaatgaatatactgtgagtgattagttaattccaacctacatcatattcttagaaataatgttgtgaagggtgcaaagtctttatcttctggtaacaaaagtaagagcctggacctcaacttgatacttcaaaaagggaaaaagaaggtagaaattcaaggtatggccttacctatttcaagatacactctgtcaactgtaacagaaaaaaaaatagagatctgaacttagtggtcagataaaaggaagacaaaaggcatttttgtctcttgttctgggatatgtattcaatcagttagtactggttgtatatgaaagatatcattaaaaaaatgagtaaaatggtaaacaaaagaacaggatgaacttttgaaccagcaacttgaacttactgttttgctccaaattttcctataacagttcatgaaaaggtagatgctttgggaagcatagttcgtaacctaaattataacgagcaccatattacatatcaaccacctagtccatgataaatatactgtgtattcttttgctatgcaggctgttcatgataaacacagggaaaagatggatagtccatcaaatggtgtctcaattgtaggatatttgagacctgctttcatagaagaagaatcttatctaaggagcttatttcatggtgagtgcaatggtgatggttattcgtctgattggagaggtaattctttgctttatcttggttacttctgttaatactactctttgattctggtttatttgttctaatacacaagaaatcaaatagatgaatgcaaaagagaacctgcaccagcttctggaaccaatggcctaattggtaagttgatcagttgtgatcaattcattcagtgcacacttttgtttaaattttgttgctaatgttaattcaatatttagatgatgataaatcgagatttgatttcacgaatgtgggaagtagcactgattcaacaatctacaaactggaaataatgacggttgagctgttttccatatatgggaagcaggtaaggacttccctcttctgtccaatgtattggatctatactggttcagaatgcatacatgactcgcataacggaaagttgaatccatgtctaaatgataaacaggagataattttctcaactttcttggcttggttggttgttctacgacattactttcattctgttaatatctgcagttgatgattgatccacaagattttcaagatgcagaaccagatattcttgcaaattctgcttcagaaattataaatcgcattaaagaaaacgatgatcagtgcgctatggcactcaggtccctctgtcataggaaaaaaggcctcactgtcgaggtatgttcctgttcatcaatgccttaatccatgttccttgttccttatgttttcagttggcatttggattattacttccatagagtaagctaaattttgcagtatggtatgttttacaggaggctagcttgattagcatcgacagtctcggtatcgatgtaagagctttctctggtttggaagctcggacagttagattttcgtttaatgcgcaggttagctcttactcttagactcaatttttcgcatgtcctgtcacctatttaattttcatggagcctataacaaatcatttggaacctttggtttcaggcactctctgaacgttcagcagagaagaagataaggcgaatgcttttccctcgtcgtaagaacgtgaaaccttctactgaagatgaatgttaacctatcaaaacctggttaggacacaagagagtaaagggattcagcataagatgtgcatccaatctgatgcgaattcgttagagatactgcaaatctgccgactatgaaaatgacctcatttcctgaagagttag

SEQ ID NO: 14508 - DNA, 11551 bp, Oryza sativa
  unsure (1)..(11551): unsure at all n locations
cccattttaagtgtagttcatccgtcttatttaatttttttataattagtatttttattgttattagatgataaaacataaataatattttatatgtgacttatttttttaaaaaaaaagttaaataagacggacgatcaaacattgaggacagacacccacaactgcacttaaaatgggatggagtagaaatctacatcagagagaaagtttgctatgaaaaatgtactactactaccaatctgtctgttggtgaacatactactacaacttttttaaaaattcttttccatcaatgaactgacaagtgataaggctgtgagctagtgaggttagcaggttaatgttcttgttcttgatggcatagtggcagtcaccatcctgaaacgaaactagtggcgatgcttttctgtactaagctatagctcgatcgatgcaagcacgagtgtcagtgtcatctcttttttgttttttctcgctttctgccttggattggtctggtcgtgcccgcttttttcccgcgaaatttgattcgggagagaagctgatggggagagcatttcggcgccatctttgattaccgcgtgtgtgcagaaaaaggcgcaccggtggcagagcagaaatgaaaagaggatgcattcacagatttaagagatattttacggtcgtcgagaatattttaagggtgaataacatatcgcctctggataatatttcgaggacattgaagaattatattgagttaaatgcaccgatcacttcaattacgggtaaaggtaaaagaattctactgagacgatgcatcagatgcatcaaatagttcaacctaaaagcttagtccgataaaaactctattaactcgagacttttggctcaatggaatatgtataccaatcaactgttggcagcttttttttcagttcgagcccggctcgcaacaacaaggcttttggtcatatcatatctcggcgcctcccttgacatgttataatgcatccgcattggcagcgagtggaagagttgggttcgattccctttatacgcgatgtggcgaaaaagactgattcaacgaaatatgccatgcctgcattaagatttaaaacgtgtcgtctagcactagacatcaacaccgtggggccattccggataatgagtttcgcgcagcggtttcgaagactgaagctcttcttgcaagtatcaaaaagtcagaatgccaaataagagtttcttgtgccaaaggtaaggatcatcccatacagagtaatgggcttcaccgctgcgcgccttttcccttttagcctttgacaaacctgcaggtagctcattagtgaccaaataatggaaaatatccgctgaggtacttgcatgcagaccggagaggaggaggaaaacttagaatgtcgtcttttgcgacataaccagggccctcttgcccaaattgaaacgttaaatccacgatgcgatgtccatctttttcatttcataatttcctggaaaaaaagaattaactaatgaatcaaacttatctttatggaagattcgggaatatctacacgagtactcattttgcaaacatagcagaaaatctaaatgcgcctttggtgtcttggctggtaactttctcgtattcttagtccgtcagaaggggatcgagaaaattaaatataaactaatggtttgcaaaatcaatgtcttactggatttcgtctatccttagcttactgccctaagatttatatgcttggattattcgtaatctacctcgtggttacgtttttttatcttagaaggagttgcaatctacaaggcctataacgccgtatcagatctttccattgccctatggtcacttgcttaaaaacggaaaagagactgaacttcacttaggctttctcgcaagcttattagagcattgaattgagctatactaagagtaagatggcttttattctactaaatccaaagaatgctggctagggtgacgctcgtgcttctttcgagtaaggcaaacttagtaagggggtcgtgttattaagtatatttcttagctacaagcctggcctttcacttttcttagttcccctttttccaaccttttccattccatatctcaccactcttctttcccggataggtgcagaagcacacacatggggagtggattcaattagtattgcactcgcaaaaggaataggaataagcctcgtgatctaggcatctttcatcccgaggtagttccctaccaaaccccccattggtctttaaaaggaaggaacggcattttttacgaatgggagatcctataaaatgaagagcggctcaggtgcttttttctcttgccttctggatggttctgaagtagtgaacagcttccgaccattatgaccttttattgaattttggattttctataggagctcactactgctgcatttcaaatgtgcccgcctattgccttaatttacagacctctgcgattcacatatagccccactaatgtaagacagctcaagcgagtttagcctgagatataaaatcacactagccaataaaaaaagtagccaaacaaagccaggtagttttcatccaggtgaacaagtagaaagagcttacttggtagtggggaactcttgctgcattatctgagtgtatatgccttttaaaaactagcatcgtaggaactttaagaaaaaggatattgttttagcagctcttatttctattttactgctcaactagaaggtaatgcctttttttttgtgattcgagcagttcttgtcacgagatgatgggccagagaaaagtttgataggaaaggaaggcgacagttaaataaaaaaaagaaagggaagatgatactgatataagagtactgctctttgccctaagattacgatcagtcactttttatgtttcaatcagctcctcacttcttattaaggttttcgtgaccgacaacagagaggaaaagaggaagcaaacatagctagctcacgaaagaaagcttgcaactacgcgttatatattttattttcaactgcgctaataagggcacatccgctttctctgtatgtagattaaaaaaatacataccatattttttcccttgctttgctatttgaatgcttacctcagtgcaagagcagggaagaggtttgattgctaataaaatgagtggaagaaggccgtcatggaagagtttggggtccaaagccacaccttctttctcccataggaatagaggtcaggagctgccggcagggcgctgcttttaatctgactgatggctcaagataagttggagacgtacttgagatagataatttatgtatttcgctactccacagagggactttcctgaattagtgatacgaaaaagtaaacgaataaatgctggaaaagcaagaaaacgtatgcgcaggcgcaagggaatgaatatcaaatattatcgggacccaatcgaatatgaaagaaaaaaagggttgatcgccctccgatctttcctttgaacgagcagttagcgaagcgatgaaagtgcttcgcgcgagactgcgggtgggtgtgggaactgtggcggcgttgtgcggatgggttcttttccgcctggtggaggtttcgctaaataaagaccctctaaatccctgggcgagtaccgcttcactcgtcttatcaactaatagcgctaggttaactatttaatatctctagcgtattcgctcgtgctgatgtttaatcatgcgatgccaatgatgtaagcgcgggcccgcaggtgcagacaggttcgtcgggggttatgcaagcttcagaggtggggggtacgattgtggaagatcgcgtggaggcaggggttggagatgtgatgcacggatgcggggaattgggtggaaggacagtcgttaatgtggagtcaggtttgacgggcgtgaggcaagaagtggagggaagtgggatctagattagaagagataaatacgatattcctgatctgatacttttcttttcttgagaagtagggacccaagccaagaattacgtattacaagtggactagtattcataggggccttttctttcgagaaggctttaataagaaaagaatttggtttggtagaccaaaaaaaaaccttctatcgactagagtttgatgtcgatttatccacacttccatgacttttagaggaaagctaactgcttgctggctggaagctgtatgagcgactgagaataccatagctatacttaaaagtaaaacactaggaaaagcccatatgcgacgaagattttttgttgctgttggaacaagaaaaagtccaaaccccattgacataataactggaagtgggagaagagggattacccatgcatattgatatgtatgttccataagaaaagaaattgcaatttttacttgaaaattttacttcaatttttctataaaattgaaaaaagtttccgattcaccaaactaattcttatctatttctgaaggaataaaaaaaatactagaattcttaatttttcaaaaattttctcattgaaacaatcaaaaaataagaataggttttgttggttaaagtcaaaaagttaatgaaataacttcgttacctagttattacctaaagaaggacttttattaaaatacaaaaaaaagattgaatcattttactttaatatttttttgtattaaaatgaagcagctcccttgtttcgtaactcaaattgattggaattcaaccctgctatgatccctcctgccgagaagggtggaaggacaggggagcacgcctgtggttgagctagtgcttcataccttactggacaaggaaggaaaggcaaggaggatcagtacgggagagaaagtgatttaagaatgtgaatttgatttgataagtaatcaaggcaattagcttaggttcatcccgaatccattccatgtttcttaaacaagtccttcaaaccatcgtgctaacaagccattctcctccgaaagtcctagagctttttctggtccatatgcagccttgaagaatcgagatgccatgtagaacaaagaggcgctggtctgggcctatttacaagcgaacccgctctatgacggctaagttacatgcacacccccattttgaaggcttagttacacgtataatagtctgcttgctctcatgtttagctgtgtacccattttggggctttactctttcatgatggaacgaggagcttgagttgatttgcggcagcagcggcaagcttgtgtcgactgcagacaacttgaatccgttagcaacggtagtgcgaagcagcttgaactgacttgttctagccattggccggctgcgactatgagtcttccttttctagccgaagaaaactatcataatgcttccggtcgaggaaaggttgaaaccattttagagctaggcgtggacgtatcgaactgaaataagatctaagattgacatcttgatacaatgatttaccataataataaatagagtcaatggtgacaaagccgtgggaagagccgcttcttttttgcggcgggggcttccattcaccagcggcagccccaccccctgtagagttactcgggccagcctccccttgtagctggggtagactggtagtagtttcacctataaaattttgcatttgtggaatgtaggttggaactacctgttccgggattgtagaaaggaagggctccacagttgaaactacctgttctggcatttccgaaaggaaaggcaggacagctaaaaataattcgctgtcagccgcagtatagatacttcgagttttggtaactctggaagtagcgctacagattgaagtttttctgcccccgattataagttctcgtcactgcatttccttagttggatccgctctttctctctcgtgcagttgttgcttccggctatttattcagtcgtcaatcagcattgatccgggtagttagtcagtctctctcttttttcccgtccttctctatctatgaaattcctaattaagggctcaccatttcaatgtctatatctgtggttccagaagtggaattgcccggaatcaaaccagtgaagggagtcccgagcgcacccttccatcccaagcgtccttccttttttttcccggttcaccacccactcattaaagtggctacgtccggggggcttacttatcgaccacatacccactattctttcccgacgcctcctttctcttgcttgatggaatagttcaatgcccgagctcctgctttgcttgcgttcttcaccggcactcgccagatgtatcactcatcccgaaaataaggcaaggagtctgcagtttgttataatcattacnnnnnnnnnnnnnnnnnnnnnnnnnnnnnnnnnnnnnnnnnnnnnnnnnnnnnnnnnnnnggagttgtggcatccaagacttgtttctagcaagcgagttacataagaaaccgaatctctaagttcctatgactttcgacttgttgaaccaggttcggtacgacctataagcgtaacttttgacttccttgccgtttgtgaattgagtcaatcgagttacgtttgcaaaatgaatggaattctggagtggaccgaatatccatggcagaaccccttatttgtgttgttggttggtctttctcaacgtggtctatagcacgaaaaaccattctttacaagatagggccgttcacatgaaagataagaaaaaatccattcttcatggtcgggcgcatttctccaaatcctccaggatcacaagtggaacgctaagcaagggtggggaggctgcgagctccgcgtcgaacagaaagaagcaagcagggggtgttgccgtagcgcgctggggagcaagcgtaggcaaccaaactaaataaggctaaaaaaaagtagaatccaaaaatgttgggattgtattaatgggcgatgggttgatgatacaagagggcagttttgtaaaagcaacaggaagaattgctcagatacccgtgagcgaggcttacttgggtccttatcctgcaatttggagagtagttgatatggtctttcttggctttggctttcaaagtgcagttcgaaaagagtgagttgctgtcaatggcgggaatgaaatatataaggatagggtggaaaagagtgaaatgagactactatacgcgttttccgaggagcaacatgatactttctttgccgttggttcccaactctccttccttttaatttccttcctcccttaaagctgaatctcaccattcgagaagctatggaatcgtcgacccccttaccaagtagactatgaagtcactttcgtttttttggttgtgtatgctatgtgtttgtgccccgtcatctacgaagtaaattcgacaagaaagctatccgatgtatattcgttggatatgataatgagcgaaaagggtggaagtgttgtgacccgaatacgaacccttgctatacatcctgagtgtggtcttcgcaattcttgggttggatgaattatcggaggaggatcgcggcaataatgagccaaactagtatttgcggtgaatcccccggttaagtagtcatgcattacaataggaacccctaattccctcgcaaatacagctctcttaatcatttcttcgcatgtacctgcagtcgcattcaagtaatgccccttaatttcaccggtttcggcctgtgctttataaatagcttcggcacaaaacacaaaacggtccctccaacgcataaatggttgtgagtttacgttttcatcatctttggtaaaatcaagtccaccacgtagacactcataacatgctctccaagcagaaatatcacaagtaccgccgcgaccagggccgtcgcaaggaaaactatatccaaaatcttttttatccgtggcgaaccatgctgcttgcgtagtgggagatgcccgcccgtcgggcccggcctgcttcctgcccgaaagaaggctagcaggactagtgcgaagaactgcttcaaatacagtatcgggaagcactgcttggggaacttcaatatccacaggcttattcgctaaatggcaattggcacatacaattcgtggtctgcagctcctgcctttctttacccttccgcttttcgggaaacagattacgctttcacgtagaaaatggaaggtcttcgctatatataaaagagctctttacccttggcaatagagcagcgcctacgtacagtaccttttatcctttttttattcctttactattatgtatatgtatgtgggtttacataactttttatgagcacagggttttttataatgtaaaatttggatatgaccttttcaaaggtttactacgaccaagaaagatgtcccatcagttaattcagatagtaagcaagaactaggtggattcaaacaacattgttcagttctttgaataaataataagacctttttttgtgcagaagcaattgtcgtacgacctgtaagcgtaacttttgacttccttgccgtttgtgaattgagtcaatcgagttacgtttgcaaaatgaatggaattctggagtggaccgaatatccatggcagaaccccacactggtcaaaaataaaagtcaatctctctaaaaaataagcacgcagtatttacagaaaaagttttcatttattgggaaagaatcaatgacatacaatgcattacagacgtatgatcattacccttagggaagcaagagtctcatagggaaggagatcctgcacagaccaatcaggaagagagtcttgttgtcaatgaaagcaatgagactatgtcacatatctgcctatctcgtgttgtgagctaaaaagtacccaccagggggtggaccaagaaagaggcaggcgattgggtccttcccatcctctgtgatgtcagtctctttgtcattctttcacccttgctgagtagcgaagtgagcatactcaagatccaattcatcaatcatttgagttggtacgaacataggaatccagactccgcttgattcgatcttcagttcgaaacccgtgcttaaatcctactcaaggcccactacgggtagcgagcaattaacaaatagagacaaggatgaggagaaatgacgcatatcagctgaaacaaagaagagtttggtccgctcttcattcaggcccggcccgcccatctgctgctaggtccgagaatggcgccaggcgagggtgccgctatgccccgcagctctgctgtggccggcccccagactatgcaaaagaatcgaggccgggggatgtcgtccatcagggcccccgccttacaaatgggtcgtcccccttaatgaatcgaatggtccttcgaccctcgtttgattccgacggccggcatagatgaaatcccatgagacccgcccactattactacaaaaaagccctgcccctggcaccttcgctacttcatattcatcattttctaaaaaaagggtaaggggtctcttttctgcaacggaaaaaaaatcagcggagctgatttgactcagcacaacctaacgatatatccaataccaatgatctatgcctaccgatacgatactcaaaaaataaattactatataaagagctaatgtcaataaaaaggctaatgacagagaagagtcaatctcctttactcctcccgacacctcaagatgagaaaatcccttcatctaggcgggcgctcatgcctactcagggagctacttctaccatggctgacacattatctccacaaaaaccaacgacccatcccgaagagaagttgactgacggggatgtctcgagaagaaattccagaattggtagctggaatttcacacctattttctcacttctggaccaagtcctcaatttacacataatcatgttttcttggtatctataattatagagcatctaaaaattgtgatagattgcagtcttgataatgctaacatagtattggtaatctaacaagcctttcgtttcttgtgccactcagccctgaggagggcgcctgctcgacccagtcaggtactactccgccgccggccccgagtaactctgcgggggtcggtgcagccctttcttctattccggagtgtataaacaaggatcctcaaaaagtgaaatcatttcgttaatggcatttcagaaatgagtcataggcgcctgtacaatgacagaatagagagtcctttttttccagaatgaatcattctattcaaatgtcaataggaaacctgggttccgttagcctcaattgaaacatagagttcaatcccagtgagctgtggtttcctactgtccattcggcaagaagaagaaagtacatagcgatttccgccctttttaaagtctatttcctcccctacacaggatcaccaaaacgttgtttttgtgcctatgttcacacttcgttcctgctcaactgtgctttttagttaaaacaagctaattcgtttgttctagtccggtaaaacctactatttgtgagatttcttactcctcaatccacttattcgttcccttctttcatatacctccccaccaatagatagagacaaatggagggatcttggagtcatttgtagactggacgtgttgttcagttgagtagactgtgcatatgggagtggatcctagatgataggaagcgctcaatttttcgtgctcttgctacagttaaacgatcctcctccgataattcatccaacccaagaattgcgataatgtcctgaagttctttgtaacgttgtaaagtttgcttaactctttgcgcagtttcataatgttcgttgccaacgatccgaggttgtaacatagttgaggttgaatctaaaggcgggatatcttactcaactgctagcaggatagccaagcattcctttttatctgggatccgctttcactacgctgggtatggtccatcccacaaccaagtatcatagcatcctggtccggatcgatgccgtgaagcatcttattcctgtggttctacagccgtaggagaagattggtttggatttctcacatctttttgataacttgttttgcgagtctccgaccaggaaaaaaggtattactttactgaactgaccccgggcgtgttaatatcagttgaaacacgctttggtccctcatccgtgaatcaatccctagcgggtcttgtctcgtaatcaccagatcctttttatcaagcgtgcaggaccagtgaagaaaaaagatttgcaaaaacacacatgaaacatattgaactcctaagaaacacctgaccttaggtgcttttttctcttgccttctggatggttctgaagtagtgaacagcttccgaccattatgaccttttattgaattttggattttctataggagctctctactgctgcatttcaaatgtgcccgcctattgccttaatttacagacctctgcgattcacatatagccccactaatgtaagacagctcaagcgagtctagcctgagatataaaatcacactagccaataaaaaaagtagccaaacaaagccaggtagttttcatccaggtgaacaagtagaaagagc

SEQ ID NO: 14509 - DNA, 3585 bp, Oryza sativa
gatgctgccgaggccgtgctgctgctgcatcgcctgcgagaagaagtcatgcgcggcggcggcggcgccgaggttgaggtggtggagatcctgcaggctgtgcgccgccgcgatcacggcgtggtcctgctcctgcttgcaccacccacgcagcggctgcgcgtacgggtggtaaagcccggcggcgtgcggcggcggcgccgccgccgcctggaacgcgatggtcggccaggcggcggcggccgagtggtggtggtggccgtaatgcgcggcgtaggcgccgtcgccgccgaggtgcgaggcgatgcggccgacgtcgtaggcggcggcggcctcggcgtccttgaggcgcttggcggcggtgccgacggggagggcagcgctgtcgaggatgctcttgacgtcgtagcggctcatgtcgaagttggtgacggcgttgagcccccggaacttgatcgccgcgatgtcgtacgcctccgccgcctcctcctgcgtgcctgcatgcgtgacaccaccatcatcacacacaccattagcgcatgcaagcaagattatcattttggctagctagctagcttaattggtgattagtttgtgttgcaaagaatgtgattaacactagttaaattatttactgcaaataatgcattattgtttcttaattagtgaggatcttgaccaggtgcagtggtgaatggagacaggagtagcaccagacatggaaggtttgaaaaggtagctagccacatgaggagagcatgcaagcatgcacagagtatatatattagtggtgtaatgcaacttgacatgacttgcagatcacatttttagtttaattaattagttacaggcttaagtaagctctgtgttctttgaagagtcacccctctttcttactactactattttgccctgaatgaataaattgtacttgccaagaaaatatgatattttgtatactcaatgagaaaggacatacttattaatatggatttatatggttttgcagtataaatatgaatatttgtacttactgaaggtgcccaagtagaggtccttgttccctgcaactcttcctatccttgcttgccatctcccatgctggtgatgcctatatttacaagtacacaagatcaaattaatggatctatatcacagtcttcattttttaccctaaaaaaattaaaaaaattaattgtacaatgatgcatatatatatgtacctagttactccacggtaaatggatgcacctctggagaaaccactgctcttcctgcacatataaggaacagtatttgttagtatcagtaagcatcagataattaattaacttcaatgcgatagataaattactataaatctaaaaggaaattaattagtatagtatggatatcttgattgtagagaccaaccttctcaaagaggctacgaactcctgccttgtcatgtgcttcatctcctccagctccttttcatagttatttacctgaaaaatacagaaaccattgcctttaagtacagttttagtaatcatcattacactagatcagtatcaaataaaagagtgagaaaataacaatgtgacacaatctgtatattaattataaacacaccggaaaatttgtcgtcgtcgtcgggccccagtatttgagagcagccaaatcataagctctagcagctttttcctctttgtcataaccacctatcagcattacaatttataagatcattaaacttcaagaaagcaaagatcagcaaataattcaatctaccgaatatatacatgcatcgcaaacagaacatctaggttcaaggaatctcactcacctagatagactgtagattcaaaagccaagttcgatcaaacagaggaagatcattcgatcccgaaatgatcattagaaaaagaaacaagatcagtatcaatcgccattggagcataaaaaaacaattaatcgatttaaatggcactagttagcctaccttgacgacccttgcgagtttggccctctcttctgcagctgttgtcccaaagatgagcctcatacctccctgtccatctatgcctataaccaaaccaaaagatattacaactttgttaatcacaacaatcatgtcccacataataatgacataatgataaatcctacaaatctaatgatcaatctatcacctatatagctatcctagaaaatgggatccaaatcacaaacatcaaataggaatgaattcatgcaacacagttaaatcatcaaagaatatatatgattacactgatgatgatttgtgctaagctagctagtagatgaacttttttgagcaaaatatagatagatgattaattaattgcaccctaaataccttgtcacgccgcggtagatcgatgttctctggccgaacgtgtcgacggacttcctcgccgccgccgctgacgccgtcgtgggcgacgacgggcgaggaggtggccaccatgacggagtcggcgaactggagcgaggatgagcttggaggagggtacaggtagccgacgctgctgccggagctcgcgtagcaagcggcggcgctgctcgggatcacgccgcccttgccgccgtgatgatgctgctgctccgagaaggagatgccgccgaggaagtcctccagcttcggctcggcgacgagcgccgagagctccgatcccctcatgctccaatctgcacatcaaatcaatcaatcaaacatgcatgtctcttcaaatcccaaccaacactagctatatctagctcatgaatgcatgcatcgattggtgagcttaattaccttgggggatgttgaagcagacgtcgccggtggaggagtcgccggcggtggtggtggtggcggcggcggagatgagagtggagttggtctgagacggcgggagctgatcctgcggggagagggagaaggccagccagttgttcatggtggccatggttgatgattcacactgaacaagacaagattcaatgcgaattaagctatggttatatgtatgatttgctacttggttaagctctgttagatcaagtcgccattgttgtggtgagctcaaggttaggggaagcttaagctaagctaactgagaagaagaagaagaggtcaagagaggtttggagcactaagcaacagtatcactggtagatatttatataagatagatatgcatgatgctaattgctaagttagtagtactactactaatggaagtactcccttatgtaggagaaggcagcaaggaggtctagcttttgtgcacttttgtttttttttaaaaaaaatatgaatttgtaacctgtgtgtgcatgcaatacaaaaacattgggcatggtttaactgaacagaaaccactttctgcttctgctttctggggggtgagtccaccatattttgtctcattttcctgtgaatatttaagcctgtctatatgcatgaaacctacatgatctcaatactactagtagtatactactacaatacagtgtatgcagtagctttgtatataaagcaatggccttgggctcgataatagtataaaatatcatcttcttttttcactgcccttt

SEQ ID NO: 14510 - DNA, 9974 bp, Oryza sativa
gccaatcaccaccccctcagtaattaattgcgtcgttctgaagctaaaaggccacatcgagctagcagcatcagcagcagcatatgagcacaggagaccgaccgaaaaccgtgaaatttcgaggtttcgacattggccgggagcagatttccgagtgatataaaatttgaaatagtaaatttttagaacatgaatttaaaatagtaaatccgatcgaaatttcacgaaaactgtcataccaccaggggttgagatccagcgctcaatcggaaaggtgaaccctgattatttcacaccgcggaccaaatcgattagattcagaaaacaagaaattataaacgtgttagagaaaccacacactttttactgctgcacaatcaagcgcatctcagatcgatcagattcagagctgaggtgatctgatcaaaaggacgacgtcgcacggcgacggggcccaacctagctacgcttagcgtcgacgtgcatgtcgcaacgccgacgatgacgacgacgacggcgacgacattattacggatctctctacctttttcttgctgcatatgcatatcatcagctctcatcaatctctccctccaatccgtccacacctacaccctgacaacgacccggccggagaggcaaagtcgaacgccgacctgacccacatgcatgcaggaaaccaacacgcacagattaatatcatactcacacagtcacactctctccagtggtgaaaaacgatgcccatttttaccgaccaaaccatctgaaaatgcatggttactgattgaaataaaagtatatagaaaaagtacggaaatgaaaaccgaaatggtttcgatgttctaccgaccgttctctcgatttaccatattttcctaggaattacctttttatagtattgtagtaaccactatttttaaatattgtagtacatgtggcccatttaccacgacaatcactaatatttatattttcgtaggtatatatctgcaaatagctatttattacgatatccgtttctttcttgcttgacatttagaatgctgtcgtaaatcatgatcatgtgtctttatttaaaagacacgtgatcatctatttaagaacagaggcggatagaaagacagtaataaaactaccgctgattggtagctcgatcgattcctgtgccgacctagctgacaggtccacacaaaattctccaaataagtgaattgcgacacataatttatgcacattaaaagttttgaggactatctccaaaattggggaggtcctctttctcttggcttttggagggacaattgaattgaattgaagctaacaatggctgtggacacttgcacatcaccaacctaaccctaataaaagctcaaaagtgagccaaggaagaggccacgtaatcacaatggggttgagactgtgagagggagcagctagcgtcattaagcttggggataatattgttgttgttgattgggagcatgggtcatgtacaaggagatggtggtatggcctttgtttgtgcacgtagctagctaagggaggaaccggcatttcgtcccattttgttgttgttgttcatgtcatgtcttgactttgcttgttccattgattgctgctgattaagctttgctgttgctgctggcttttctcccatcaatgcctacactgcctcggtgtagtcatcatatttttttcccttatgacaagcaagtactttacatccgctcccttaaacagataacgtgaatcatataatacgtgcagttaaattttaaaattttaatatactgatgtatatgtaaaatattaggatttactatttggggactaggttaatagatttatcatgacaaacgattttagaaagttatttttaaaaatatttttccaagtacatagtaagaaaaagtaatgattgaatatgctctttctagtaagatgtgtccaaaatgtaggtttagctagtgatttttattttattatttttgtagatatttttcaatgaaactctctactcgtatgatattcaagcatgcggtctaaataatttgatagatattgatatatgctcaaagtttgaaattttggtttgagatgtgaaaaaatggacatgtattagagcatgtgggctctatggtggaggattttttttttcaggacttggtgggctctatgcctctatacagatctatgggccttggggcctcaagtaaaggcccatgagtgaaaagcgggaagggacgaagggtcatgcacgggaaaggcccaaaatcggaaagagagttccagaaaatctccatttttaaataactgagactggacacttcattttcaaaatttgatcattctttgtttttgcaaaaaaatacaaatactaaaatatgaattattattaaagtgtattaataataaatgtaaatttactatccaaattctacgcactgtagtctaattatttattagttattgatggtcaaagttaaaatagttttgatttccaaatattgttactattattcatatttaaaatttaaaaacttgtattttctacaaaaaaaatataaatattcaaaagattttgtattatcaatgtatcattcatcctaaacataagcactaaaactacattcattgaagtttagtgctccattggaacttagaattcttaaaacacggtaacaggaaaaatgcatgattaaagtgttctaccacctttcataaggattgaaaaaaaaagggggcagaaattctgcaggaacgaccgtttgtatgaagagtggaaaaaacagtacaagaattagaataaacatggtcaaaaggggtgctcttttttttcccccaagaggttgaacctcacgttgaaattcctatgttataagtcaatatgaaggaatatcataagatttttggataactatttctttgatctagagaaagaagatttttctataggattaaatgcctaaaaaaagccattgttccaaagtaactcgtgaatatctttttatgtaaatggaataaatatccctatatttgcaacaccatttgaatgtgaggataacttcttgtccacacagctactactacctccgtcccaaaataagtgcagccatgggaatccgtgtccaacgtttgaccattcgtcttatttgaaaaatttataaaaaaattaaaatatatttagtcacacataaaatactattcatgttttatcatctaataacaataaaaatattaatcgtaaaaaaatttcaaataaaacaaacggtcaaacgtgagacataaacagtataaaactgcacttattttaagacggaggtagtaatagacaaagttgtttaattgcgggcatcagaatttaaacccttattcacatatcgatattattttacaccgtacccgcagttccaccatcgtactaatggtgcctgccttttgtgactaaagcaaatgcaaaggaggtagacaagtagtagctatagcactgcacttcactagtttgttgggaattttgccggatcaaggaggaaacgaaacgggagcatggtaaagataaaaatctcccatacattaatttgctgaaagatattatacatgtgtagtactctctcaagagtgatcaaggttacttacgttagagcatctccaaccacctctccaaatcgaactctccaaatacccatataaccaattctccatctgatttggttagtcaaactagtagttcactctaacagtctcttcatctaccatctctacattgaatgtatgacacaggaacccacatgtcagcttcttcttagttttttatccctttccttcccattttcctattttctagcatatgcttccttccccaatggcagaaaacaaacgtcggcggcaatcggtggagtgatatggcgaatggagtcgacgggagtgacgaccgtcgctggcgggcgggggacatagacgtatccgatcgttttctgtcgggctgcactgcgtgggggcccggcaaccgcgacgagcggaggcgaaggacggcaaccgcacgggggccggcggccacggcgagcggaggcggaggacagcagccgcacgggggctggcggggtgcgccgcacagaggccggcggcgagcggcgctgcgcgggggccggcggtggcggcgagtggaggatggcggtcgcggcgagcgaagggcggcggctgacgtgctcgagttcctccccatgtgtcgtcgtgctctttctgtgcttggttgccgtgtggggatggaggagatgggctccgtggggcccaccattggccaaccaaatagagtggccaaatttggctagtggagggagggttttggccagccggatgacttagccatccggttggagggactgttggagcacgttttttttgctagaatggctaaaatttggcttggaaagtgggatggagaggctgttggagatgctcttacttcacattacgaatgacacaacacacaaaggtgatcgatcgaggagtacatgacgtctaccacaatgacgcgaagaatgtggagagagatggtacatgaccttttttttaaaaaaaacatggtacatgacctccatcttgtttatatataacgccattaaatttttttagaaacgttcaactactcgttttgttcaattttttttaacaaatgtaaaaaaaatttaagtcaaactttaaagaacatttgataataaatccaatcataataaaaaaaattacaaacatttgactacttattttattcaaattgtttttaacaaatgtaaaaagaatttaagtcaaactttaaggaatatttgataataaatccaattataataaaatatttttataataaaatgaatagttatatatatatttaaaaaattaacaacgtcatatattagaaaatgaatggagtatatatatttgtgaggaaaaagaagagggtgtgacagccgtgttaggtagatcgatgcctacaattcttgtacgaaagagggcaaatggcttgtgttttctgcgtgctatgacgaggggacgacacctcgcaggtgtacgttcgatcgtgcagctacctatctcttcccaatactccggctgagtttagttccaaattttttgtttaaacttttaacttttttatcacattaaaatttttctacacatataaacttttaatttttctatcacatcgttctaatttcaactaaacttttaattttagcgtgaaccgaacacaccctccgtctcagtcacaaaatatcttgtcgttgtatgatgcgtacgtgcagtcgtcactagttgaagtgtcgtttgctttggtttaatttgtttgtcattttaccaaatctcatgttaaactagagaatgtatcgaaccatattgctacccttaccaattactccctccgtttcataatgtaagactttttagcattatccatattcatatggatgttacatatatgtttgtctagattaattaacatccatataaatgtagataatgctagaaaatcttacattgtgaaacggagaaagtatatcctaaccatcttctttctgaaaaaaaaaacaaaacaaatactgaaattccttgtcagtactagtttcttttttaagaaaatactaccaggccttaccttgtagtgtgtgattttataaccaaagaaaacataatagttttatacaaatatatacttaaaaaaggaaaaacagaaggagtactacaagcgttgtaaccaatcagcacctatcttaagggatcattcatcctatacatatgcaaaagaacctcattttgaatagcagaccaccaactatcaaagaaaggaccaatattctgaaatatctttccattttgctgtttccaaatgtgctagcaagctgtgaagaaaacttctaagaaacctttctatctgaaccaaagtcttgctaagatcacaatttgaaagaaatcaagaagagaggtattccaaaagataccaagtttctaccagcacttttcactgaaacgactgagggataagaggtgtaaaatagtttctctgtgctgagaagggcagagaaaaaaacatgttaggtcagcatctggtggagcacatttcttcctatcaagcatgtctcttgtgtttagcagatcatcaaagaggagccaaataaaaactttgattttcatcgtacacttggtcttccaacttccataaccactaaggccatgtttgtttcagtttaagattattgtaatctagattattgagccagattgctgtaagcttgattataataagccgacatagaataagttgtaacatatttagagtggattaccatattatagtaatttggcttataatttgtaataatctaccataataagttatctgtttgtttcagtttacttttaataatccatattataataattttaagctgaagcaaataggccctaagtatggccgagaagcttgtaaaactgcaaagttcagtttataaaaacacttggaggtgtaattactttgattctaaatgaaactcgaaaagtccaccttctaatctgacaaaggttaaattaaggagcttagatcctcatgaattcaatgaaggcctcctcaggcctctcgtgagtactagtattcctggtgttatctctatatttacgttagtatttcaattaatttttcatttatccatcgagttgttatttgtaatttgtagttattgaatctgcaaactctataatagttgactaagacttcttgaaagcaaatgctggaatggagtttcattgttaaaaaaaaaattacatttgaaaattgctatagaaccaacatttcggcgaaagctctactaaatcaatgaaatcatattgatataataacttataaacactaaatatcagtccactaacaagaatagatatttatcttaaaaatcaaaactatatgagtcaggttctatcttcactttctctctcccaaacttttggacacgtggcttcaccacaagatgccaagtctacgcatatatcacgcctaatccacaagcttgagcagcgtaagtatatataactattaagagggatgcaacctcgacgttgcatgcaccatcccatggcgttcactccaaccacgctcgagctgccatccaccatgccaccggccgccgccgccgccgccgccacccgccaccgccacgcgaggccggccggccacttgcgctgcgccgccgacgcggtgtccacggcgccggcggagcggacggcggcgagggtgatcgccacgagctcgcgcacggcgtcggcgtcggcggcgtcgggctctgtcgctcgcgtgtggaggaaggtccagggctccggcgactgggacggcatgctctcgccgctgcacccggtgctccgcggcgaggtggcgcggtacggcgagctcgtcggcgcgtgctacgcggcgttggaggaggacccctcgtcgccgaggtacatgaactgcaagtacggcaagctccggatgctggaggacgccggcgtcgccggggcagggtacgaggtgacgcagtacatctactcgtcgccggacgccgccgtgccgggcatggaggcgtcgacagcggccgcgccagctgggtcgggtacgtcgcggtgtccaccgacgagacgacgcggcggctcgggcggcgcgacgtgctcgtctcgttccgcggcacggtcacccccgccgagtggatggccaacctcaggagctccctcgtgccggcgagcctcgccgcgcgcggcggcggcggcggcgacgtgaaggtcgagtcggggttcctcaacgtctacacctccgccgacgagacgcggcgcttcggctgcgccgacagctgccgcgaccagctcctccgcgaggtgtcccgcctgttcgccgcctcccgctccggcggcgaggacgtgagcgtgacgctcgccgggcacagcatgggcggcgcgctcgcgctgctcctggcgtacgacctcgcggagctcggcgtcgccggcggcgccccggtcaccgtcttctcctacggcgggccgagggtggggaacgcggcgttcaaggcgcgctgcgacgagctcggcgtgaaggtcctccgcgtggcgaacgcgcgcgacccggtgacgaagctcccgggcgtcttcctcaacgaggcgacgacgaggtcggggccgctcgccgccatgcgcggcgcgtgctacgtgcacgtcggcgaggagctcgccctcgacttcgtcaacctcggcgacctcgccagcgtccacgacctcggatcctacgtcgcgtcgctcagggaaggggtggtcaccgacgccgaggcggccaccggcggcgttctcgccatggcgatggagctcgtcgggaggcaatggcagtcgaaggacgcagccagggggatgatgcagtcaactggcttgatatgagagaactctccctgttgcaaaaactcttttcctcaatccttttgggcgttcaaaaaaaaagatatctatgttgcagggaaattgttttaacagctcgagtggatgtcgacccgttgattgtatgtcatctaaattattatgaaaaaaattaaaaaaatataaacaagatggatcaatatataatacatcaattcacaaacatgcatgttaaaattcaactcctacaaattgtaacaaaaataacaaacaaaactcaaattactatatgtacatttacaattaaatttgttatttttgttataacttgtagaagttgaatttgaacttgcatgtttgtggagtgatatattaaatattgatctatcttcttaatttttttgaaaatttttcataatcatctagttaacatgtaataaacggatggacgtccactctagctattagaatccatctccctctgttgcatccattttttgcagagatttttcccattggccactgagtgttaattaattcttagaatatgtgtccaacataatagttttattgactattttagtctgtaaattaacaagcagaggttttttggttttttttttgttttgggagaaaagagggatcaatcccttctcttccattgtactctcattcttttgctgttaagaaaacagtctctctcatttgcctcaaattaatttgtattgtgctctctctgcctctctggtctatagataagttgcaactccctccagtcaaatatttgaagtttatgacaaaatccacttatacttttaaaattcatatcaccaatattttttttataaatgcttagtttataaacaaaatgaatgacatcagtaggtttgccttaaaaaagtactactccctctgtccagaaatataaggtattatgtctaaaataatataaattaaggaagagaagtagtacatatgtgtagtttgaaaaagcatctttggcataataaacaaagtagtagtactggtaagtagtacattaagtacattctttgtattttttttagtttttgacatggatagtgtggagtagtagtagtaatattagaagctctgctcgcccaaggaggtagtttgctttactcaactcccctttttgataacaaggcaaaaacctccgacccgacattcatgagttttgaatgaagaatgaagagtgccctgcctctctttttttttccctaaatcttagaattggaagttggtaaagacccaccccttgtttaagttagaatgagtccccgagacattggcttccgccaacagtgaactattaaggatcgcatcccatgcatattccacattatagccagcaactgattcagcttccgcttctgggagatcagacggagctcgattagtttctactagacaaggaataaagaacataaccaatacggggagcgagggaataccggaccatatctgcttttgtgcctgacaatctcacggagggagtacttctcacagaaatcaattgatgggtggctgacaat

SEQ ID NO: 14511 - DNA, 26705 bp, Oryza sativa
  unsure (1)..(26705): unsure at all n locations
gcacaaaatctcagtgcaagtttctgaacatctggaaatttgatttagagaacaccatgcaaatgtgggaaagggtacaagccaacatgtgcaaaaaatgatttagctaatgtaaattatgtcatgcggtgaatgattatctcccatttgctacaccgatctgatgattacaaggctgaatgtttttcctaggtaccatttcttcatatcacgatgcaaatggtagagttaattaagcgaggggtttttaagaataaaacacaacaaggtgtcaattggttcgaggacatatgcgctattcagtgcaaatgtgaggattggttttcttcttttcttgcaaaatagccaccacgcgccattttctccaaagagcaaaaggaattccatatataaaaggagaaaattgcaacctagaaggtattagtgactgggatcccttgctgtcatacgcttcataagctattaattatatactttcgttgtgattaaatgattaaaatcccaacctaaacacctggaagtgctaaaggcaaactatgaatttatcttgataaaagagctcatatctgtatttctctttgttctttcatataaaatgtccattgttcttttttttcaattagtaaatcatttcgtgaaaatgtcgatgtatatttgatcgttgaatattatttgccttctttcaactgagatggagtttgccttgccttgcctgcagccaaaagagcaatgagaacaaggctaatcaactgtccatgtacttaaatattaaaagctatttctttactaccttattgagaattggtttgaatttaataaattttcaggccaaagtgtctgaaagttcagtttgcacaccgtatcagaggacttatttgttgtttgatgggttattagattaggcaccgtatggtgtatactcctacttaatttggtttttgtttggtattgaattatggatgctgtcatcctcatccatggttaacacaagatgagttggcaatctgatgggaaaagtagaaagaattcctaaatgattgcatgatggtgactggtaagtgcatcccaagagaaacaggtcatgttaaaaagaaatagtgttttgcatgttaacttgctgcacacttatgtaaaagagaccacctaagtttgcctgtccaatttcaaagtaggtagactcttggagttgacagcgaatggatcttttttaaactgtataatttcttctactgcaattctggatagtagtcactccattttaaaatgtagttatttctactagttcttttggaggggaacccctcccctccgcacgtaaaacggagcgatatattaatatataattaattacgtattaactaaaaaaacttgaaaaattgattaatataattttttaaagcaactttcctatagaacttttgcaaaacacgcaccgtttaatagtttgaaaagcgtacacgccgaaaacacgaaaaacgagggagatgagttggtaactctgggaaagaactcagccaggaacgagggtgaaaggatcataatgtccttcattaatgcatggaggacttgtggagagtagggtggctggttggggtaaaaaaaacaactagaaatagctacatttgggatatatttgaatcctgaaaataactatattttggaacggaggaagcagttgatgtacattagcatttaaaatctgctcttagaatatctctaatgctgagatatacttgcaggttcactgttcttatgcttatttggttatataatccttgttatttgattattggttatatgataagcttctctatacaagaatacttgcaactgtgggacttagttgatggactgatcttacaacaggatatccctgaccaacacactttaaagttttcgaagtcaggaacttacacaagcaagtccgcttaccacacctatttcattgggtcgataaaatttaccacatggaagagaatatggaggacttggacgcccaagtgtaagttctttttgtggttaacggtgaataaccaatattggacatcggattgccttgagaagtttggaatatcacactcaaaagtttgccctctctatgaacaacagtaggagataatacaacacatccttgtgttttgtgtctttccccgtcaagtatggtacctaattatagaaaagataggcatggagacctcagggcctcaaccttcctcaaggcaattctctagctggtggtctcaaatggtcagaggtgtatctaaggaagataaaaaagactgaactgttatcttagtggtctggcaaatttagaaatacaagaatgacagtgtattcaacaatgccacaccaagtactgttgtcgtattggttgttgtggcaagggagagtttattagggcagtcccaactctctatctaggatggtgtctatggtattaactatattgccatgtagaacttttagtttatgtggcactatattaattaagagagagagtgaagagaggaagaaactaggtctcatgcaagacacagcatcaacacgagaacctatgcactagacactatcaaattttgcattgggagagaataatgtcttcataatagatgaagaataaatatgattggtagagaagagagattatgtatttattaatggctcactttaagaaaccgtgggttgtagagtgtagtttctattgtgatgtcttattgacatggcaccatagtcgacactgcttatgaacactatgggttgagactgcccttatggtgtaccgctagagcaagagctcttaatgaactcttggcccggttgctccccacttatgagcttagctcctcacatcgcttcagcaacttttttttatgtgttttcctttttttagagtgttgtcaagcgctctgctatacatacattatcttctctttaatgaaataaaacgcatggctcttgtattttcgagaaaaaaagttgttacgatggacacaaccataacaagaaaatgagctgtcaaacaatgatggttactttccaagatgctctactacaaaatatcattcccacattatgttataaacacaaccataacaagaaaatgggctgtcaagtaatgagggttagtttccaagacgctctactacaaaatattatgcccacactatgttttcaatgtgttgggtagactaaatagagaaggtttgttgcttcattaatccttgcaacggtggaattaaatttgaaaatatagtgttcattagtttttttctcagaaatatttcgaaggtaactttttttcaaaaatatacatctgatctcgcacaaacgtaacgtaaaattgatgtggacgtgacaacgcgggcgaccacggctcgagactgctcggtctcgtacggcggggctacgagattgagcggtcttgcgttatcagcgagcgagaccgaacaggctggatcgattaattatgattagcgattaattaattaattgttaatcaagataattaatcactaattattattaattaattattaatcaggtaattagtcaatagttaagtggcagcactcgctaattagctgagaccgaagttcgctctcgctttgtacttgtgcgagaccggtcggtctcattattttcggtccgcgagaccactcgacccgtgtcgtcacgctcacgtcatcttcatgtaacggttatgcgagatcgacggtatatttaggtaaaaaatgttacatccataatatttttaagaaaaaacaaatgatcagtatatttttaaatttaattctacaatggtgtatgagtaatcagtatgaattactgcttttgaaagtacaatctcattcacatattacacagcctatatatacagttttttttaatacgcaaaatgcgtatcactgtaatacaaagatcagggaagttgagacaaccaggtaccacaaatatatacatggtttatttatatttgggcatacaaacgcgcgaccaagtggctagtactatctgatagcattaatacagtttctgttttaaagaaatataatgcagcttgattgcacataatctatacatgtccacgacgaaatgtttgtactttcagaatcatcagtgaattgtgtagctgtcagaagaaacagagggaaaacgatgtgtaactgaagaaagaagtgctagcgccgtttctgcaccgaacaaaatcctagctggagtatctagcaaagttgctgacaacatcttcttcttcttcttcttcttcttcttcttcttttttctctgaacaatgctgaaagcatcttcagttgaggttggctataccaatacttcactgccaaatagtagtagcaatggttaatgcagaattccagggtgttaaattaggttcaggcttctgcctcatcgaactcctgctttacgagctacagcgacgcctgcatttcttccagcgtgtagctggggaaagattccacatcagagagatgacgaatgccatcatccgatagatccatcgatagatcgatccatggctgcattggttgcgtcgcattgcattccatctcgtagtaatcagtgagtgctcgtcgcactcacacaatcagctcgcgttcgatcgatcgaagctagcagctacctttcgccgagctcagaacggcacgtagcaattcagatacttctcttcgggtttaattagattcggcgtagccaagggggagaattttggtaggttttgactgccaaatataatacacattcagctccagcgactgtccggagttcagaaatgttcagagatgtagaaatgttcagagatcgtacttatcaagtctcgatcgagatgtgaccgtgtgtctactgacaatgtatagtaatacacatcgctaattaagcctgataacgtgaggacagcatcaggcagccagatgaaaaggcatgtggttgggttaccaaattaccatgaagaaggctgatggcgaactgcgtcgagtcagacgaaggagacgggcacaaaatcaagcagttttcagggctctgacgagttcaattctcaaggtatatttcagactggaaagcaacaccttttcttttttgatagatagattttcttttttgacctcataaaaaagtttatagataagagtagattctgctgtgtgcttccatgatgcagaacccggaggtgtaatcctcttccaccatcagacaaagagagaaaaaggaaaaacaaaaaagataagatggatgtgtatgtgcatgggctatctgggctggattgtgcagaagggctttggtggcccataggttgtgtggcctgtgggcttaataatttgacacactgtcaatgcaaccaatcacacagatcctgtacgcaaagtatcccctctggttttaagagtatgacacggttaacttttatacatcctccctccgtttctaaatatttgacgccattgatttttttttaaatatgtttgaccgttcgtcttattcaaaaaatttaagtaattattaattctttttctagcatttgattcattgttaaatatacctatatgtatacatacagttttacatatttcacaaaagtttttaataagacgaacggacaaacatgtgctaaaaagtcaacggtgtcaaatatttagaaacggagtgagtacgttttactatttatgttattaaaaatacgtaattattttttcatatgtttcatattataaatcgttttggctttttttttcttagtcaaactttatagaaaaatatagatatatttctaacacaaacaaacatatttaatgttacatttaataaaataattttggtgttgtagatattgctactttatctataaacttgatcaaatctaaataagtctgacgaaaaaaattaaaagagacttatgatatgaaacggtatttattataatttgttttattattaaaagtattttaagcatgacttatttttttatatacactattaatttcaataaacaagtagttatacgtatgtccaaacaatccacaacgtcgtacgttagaaaccggagtactacctagctggatagattttttttttcttcttctgattagacttttgaattgctgaccaattaatttttcgaagaaaaatagagagctcgcgacgaccaaatcgctggcgatgggttgagctccgtggcgagtgcaccaccacaagccagcatcgctagaaaacgacgatctctatcttttcagcgcccagcaacaagctactgctaattaagcacttgctaccctcgtggcttaagtactgctcagtcagtattaatattttaatatatgacgccgttgattttttaatcaaacgtttaaccgtttattttatttaattttttttataaatataaaaatatttatgtcagatctaaagaacatttgataataaattaagtcaaaataaaataaatgataattacataaatttcttttaataagacgagcggtcaaatgttgataaaaagtcaacagtatcacattaaaatacggaggaagtaattaacttaatacttgtattaataatctaatctaatacagttgagattagtagttgcagctgccacttgctagctaattacctctctctatctcccatgagaggaggatgcagatgcagatcatgctagctaattgcagcctgatcaggagagagagcctgcaacttggcgcccaaaaaatctcgtcatctcgttggattcagcgagagttgtacttgcccagtgtactttttgcagcagatctggcgatcaggcagctagcttagctagctaatagctaaagcttgatgttactttagggttcgtgtgtgatgggctttggtttcagcagcatccacatgcatgcatgcccaattgggaataattaattatatatatcaattgttgatgagtaatcaaacgcacacagcttaatataatataatctgttgctagtactgcaagcatcaccggatatcgaaaagcttttcgttagggttaggcattggttcggctgggtttaggggcaagaagaagaaggagaaattttaagtttttgtttacaccgtttgaccactcgtcttattaaaaaaatagaattattatttatttttttagacttactttattatccaaagtacattaagcacaactttttattttttatatttgcataaattttttgaataatacgagtggtcaaacaatgcaagcaaaaacttaaaatctcttatattatggaacggagggagtataaaattatcgaaagtcaaggccggttaacgcaaaaaccggttccaggttcaggcattcttgacatgcatgtactgtactatcaacacgcaacagctaatctgcatgccagtcacttaatccgtccgccaaactatcttgagaagacaagtaagagtagtaattaattaaggtttgacagtacgatctattgaaaataaatctctgtttttggcagtaggacgacgacccccctcggttctctgaagaaatcaagaaaaatattcagaagcagcacatgaagtcatcagtgatgtgagctgatgcaggcatagctgcagctaattaagctagcaatgcctattcgagagttgagaatcacacgtactccaaagtaggcccggtttattttccacgcaaaaatttttcatcatatcagatcgaatgtttggacacatgtatggagtattaaatatagataaaaaaaactaattacacagattgcgtgtaaattacgagatgaatcttttaagcctagctaattgcgtcatcatttgacaatgtggtgctacagtaaacatttgctaataacggattagttaggtttaataaattcatctcgcaatttacaggcagaatctgtataatttgttttgttattagattacgtttaatacttcaaaaaagtgtgtccatatacccgatgtgacacgctaaaacttttcaccctcgaaaattaaacagggccttaatctgacagtgatccatcagccacagcgagagaatcttagccatcgcatcgcacccgggggcgaaataggctgtctggctaggtgtccagatatccggccggtttatcgatgatcgatcgatgcagtttgctccccaatcagcttgcaattatgcatatgatcatgaatgcttacgtccggccaatgccaaccatagccaacagtgtactgctgtttgtgcagatcgatgccgtagctagccgccatggccgtcgtcgtgttgcagccatagctagccaagcagctggcagcagcgatccggtactagattgggcggggcgtgtttagtctagtctagtaattatgtagtgtgtgtgtgcctgtaaaatagtagccgctcacatggggaggacggagaagacgacggcaacctctcgtgcgtgcgcacgacgacggccatggcgtgcgtgtgtccttgggttgggtggcattgcagattggcagccaccacgaaccaaccaaccaaccaacccaacgcaaccatctgaattctgcaggctttttcgctttaatttggatcagaagattcagaactccagatgctgaattcagaggagacatactactgtattatttcctccgttccaaggttgctaaatgcgtagatagagtagatgtttacctaaagatttgcgtgacagcctcgttcagatgggatgagggtgaagaataaggtccggtcttatcggttgcgcatattctctaataaatcaaaacagcttattatgaaatataaattaatttataggtaaaacttttatatatgtattttttttacttaaaaaaccaatactaaaaagagattacgttgaaaatatcttaaaaccttcttcaaaattaagtttgaaattttaaattatggttttgattttgaattattaggccaaccaatgaggctctaaatatgggcacctaaaaaaaatcatttgctagtctatgcgatatcaaaagaaaaagagggaaacactacgggatggcatcgaaaatgagcttggattgacaatcttaacctaaacggcaacaaccacttcacggtgaatttaatcaaccaacttgtctccctgtggaacgcaacacagggcatcatccttgataaaaacgaacatgaccaaatcaccaggaagctgtcaaaccatggagaatactcgatcgcttcggcttataaagcgcaatgtatggaaccacgggcaccaacttcaacaccttaatatagaaatcttgggctccccaaaatgcaaattctacgcatggcttgtgatccagaatagagtttggacctcggatcggctggtggctagaggatggccaaacaacggggcatgccctctataccgcacaacaaacgagtcagcaagccacctccttgtccactgtagatacactagaaggatctggagtatgacggccacctgggtggcatatcacaactggatccaagccaatgggatctgtgtcagagcgtccaagactggtgggaaatgctatccaatatcaagggtgtccccaagaaaggcctgcgaacccttaccctactaattgtctgggaaatttggaagaaaagaaaccaacatgtctttgaacaaaaggagaccacagcccctagccttatggctaaaataaaagatgaggcaagaacctgaaccatggcaggtgcaaagatgctcagagaatttcttcctaaccggccgcctgtagatcttgaaaatgttgaacagtctttttttccttcacccctaggggttgtattttattccttctatattcaatgaaatagcacaatcttgtgctgattcttttcaaaaaaaatatttgagttttagttatttcaaattcgaaaaataggtttatttgatattttaaagcaatttctatatagaaagttttcgtacgaaatacactgtttagcaatttgaaaaacgtgctaacggaaaccaagctaaacatgtatcttaatcagatttgcatctcattcctgcagaatgcatatgtctaaccgaagaaacgaacattggatttagggtgtgtttagttcacgtcaaaattgaaagtttggttgaaattgaaacgatatgacggaaaagttgaaagtttgtgtgtaggaaaattttgatatgatggaaaagttagaagtttgaagaaaaaattttagaactaaactcgaccttagatgtatctaaattctgatgctttctccatccaaaaggagagtttacatagaaacaaaactatggttgactttagttttttttttttttgccatcaattagctgcaaaatatccttcctacaccctagtagtagtagccagatggtcggccgatcgatccatccacacgaggagtcaaaagaaggccggagattgccacgaaacggacgcgtgcgtgcgtacgttcgccaagaaagaaattcagttgatcacttcgttacaacttgaaactacaagacggattccgcacgcgcacaaattatatgtgtgggtcgcgtggacaattaactaccttttcaggtcggcgcgggaaaaaaagcccagcccaacttgcattttcacgtgacgtggattttttttattctcttccaacaaaattaattcgtgtgattcagagagtgccaacacaacgactgcgaaattagaatatgcatctattgttgcgtatatgtgtgtggagctttcagcctttcactgaataataataataataattggataggatttcattgccgtctgcaaaagggggggaaaaacaagataggattcggtgggcgcagctatctactccgtatatcgtgctaataattctgaaaagctacaaacaataacgtttaataatttcaagacatcgggatacgttaaaatagctctgtttagtcactttgcacctatttaaggggtttctagctgctgcaatttctttcagaatcaaagctccccctaaagctccccctaaacagttcattttttttaagattctatgatgatgtagttgtataatctagaaaatgaactaaaagtcatagactggaaaacccagctttttcattttttataacttggctactaaccagtagcttcttagaatattaaacttccaaaacaggtccaaagctatgttcttttggaggtgcagggaacctctcctcttcacgcggaaacgcatgaaaaatgcatcactatatattttttaaacaactttcttataaaaacttttgcaaataacacattatgtatgaaagcgtgcgcgttaaaaaagaaggaatatgagttttgagaacttagaagaacacaacctaagttaagagaagaaaagattgaaaagaaagttagtagtagtaagtcgtttcagttactctacactagttaagacatgatggcaggtcaaacaggccgacccaccacctgagccgacgtggctgaccaagtcacccccgggggtatccgtatcccgacgtgtgctaaccatccgagctgtcaagatccgacgtgggttgtgaaggcacatggccacacccacacatgtgcacacgcatcgtgggagtcgccccgtccacgtcacccttcccttcccaggccgacccgaacccgctaaaaagcagcggaggcaaagcagaagccgaagccgaagccgcaacctgcaaaaccaagtccacctccgcctccgcctccgcctccgcctccacccaccaccaccaccgccgccgccgcgccgccggagatgaacaggatgacggcgccgcacggggggatgccgccgccgccgatgccggcggcgggggggctggcgaggtacggctcggcgccggggtcgctgctggcgtcgatcgccgactcggtgatccggggccgcggggttggggttgtcgatcagctgcatcatcatcagcatcagcatcagcttccgccgccgccgccgccgcagcagcagcagatggtggggaggtacttctccgcggagtcgtcggggctcacctcctgcgagtccagctgccggacgacgacgacgacgtccacagcggcggcggccgatgtcgggcggcacccgctcgagcgcgcgtacggcggctccggcgagatccacgtcgacgcctcctccgccgccgtcccgctcttccgccacagcagctcccccgccggcctcctctcccgcctcatggctgacccgcacggtacgttcccctccctccccggcgacgaatccgtcgatctcgccgtcgccggcgacggcgacggcgacggcaacgggtttagctttgcctttgcgtgtgccaccatattcgctactagctttttgcgtgcacttgtcgccgtccgattggttccccgctccccgcggcgactcgcgctccgccgtccgatcgatcactcgcgtctctgatacgtgatagcttgcctttgggtggctggcaaatgtcatgaagggttgctaggactaaattattttaatcaaagaaggaaacagagagtgagagagagaaaataaattatgtatcctgattagttatccgagaacctcatctcatccatattagtatcatattctactatcataattgacccactattatattcatgcgagtcccccactggcacatactccaggggcatatgtgctgttattactgtacacaagtaagcttaattaacttcaataatggtgctcgtgacagtgcaataatgcatctctggcaagaagtagaacaaaagaaatggaaaagaatcccatcctcgcacactgtatctagtgtactactcctatataagtgcatcaggtttatagttattagttcgaccgttatatttccaattgtagagcttgagtactgcctagcaagtttagtatgacttcctccgtttttccaaatacatgtaactgttaattagtattattatagcttcaatcactaataatttttaaatattttgactataaaaagtcatattgtttatatttaggatgttgatccaaaacacaacaacgacacagatttatagtaaaaaatgtccgttactaatgtaacttagggctaaatataggtagtctccagtaattacagctgaaggaatagtactaagcagcgtgacactgtcctatacattatgtgctgcaacatacttagtacaatgtacagtattatcaagttgatatgattaggctggtgcattgtatgttgccgacatgactgcgaccgtttattggcgcacttgctggcggccatctgcttgcagcgaacctggacacatgtcagtgtccgcagaattcatttcctaacaatgaagcacgtaccactcggttcactgcacctgctactaaacctctctctatcgcaccagaaaaataattttgttgtcgatcaaaacgggccccatggatttaatttttgatttattttcgaaggtgcaagataagtcccccaaaaatgccgttttcttatatttattcggaaggttaagataagtgattcttgttggtgcaggtaggagtatgatttaagataagtgtatcggttagtttaacctgctggctctgtcagctatgctccaatcatgcataatgcaaatgtcaccaacaaaaatatattgtttgtttttctatggtcatggttaattcagaagggataaaacgttatagtaatatcaggttctcgttgagtttgaaaagtcaatccatttttgttgattaatgtcaccatgcataaggtgagtgacagcaacggcagacatatcttgtcgtatgagtcatgctggggccaatagtatattcgagcaatactgcatcactgccttttttcagcatgataaaatagtttgaatataaacaaaggagtataaaggagttttttttttctgtaaagcaaaggttaaaaaaaatattaccagggacggcattaataattgctactgcatcgatcatggtaaattcattactgttgcaacttgcaacttttcatcatgggctgatatatcggatcagatgcattcacggataagatgtaaaggcgatgacaaatatccagcttgagtaatggccaggtgctatgctagatctagcttagattaagccttggctttagcttagcttttgtttatgccttcatggggtaggcttttagataatggatgccccatactgattgtctttactctttagccgatttacacagacatttgctgtttgatggggccaaaaatagtttcttcaccatctgtgtcgtttcttgcagtactgtttggtgtccttgctttctgaaaagaaaattgttcatttctagttttgtatcaatggttagaaccaaaagttgcaacaaaaggttcttgccaaaatcagtcacaaaagttaacttaactaactctgtttagtttcagataatgatgataattaagataagatttttatttttttagaatttttactaacataatgaaagaaactttcaaataaaatttaaaattttctattaaaaattaataacatacctaaaatttaaaattttcaaataaaaatttgaaactctaaactcagatttgaaaactttcaactcaaatttgaaactttcaacttaaattggaaaactttcaacttaaattttaaaaccttcaagtcaaatatttgaaaacacgtgtgctgcagattgaaaaaaaaatcgaaaagaacacgacaaaaattaaaccgcgcggaggagagacaacgcgaaaataggagaaaaatcacaaaaaaaaaaatcagcaacgttatagttcggcacccttggtcccaaaacaaatttatttttcacctacttatacttattaataaaaaaaattagaataccttcacttatcaaatttaatgcaattatttgtctttttatctactccaaatgtatttatccactacttttataaattccgatgcaacaattattaaaaaataaagttaacttattttgggatgaaatagaggaaacaaatgaacttattctggaacggagggagtaactaatcttcgaggtactacctctatcccaaaatataagacataaccttatattttgggatggagggagtaccatactactgtagtactgtatcaccttgaaagatttttttttttggtaatataagagatttatcgtttatacagtagtttgttttaaagattggccaaaacttacaaaaactgacgtgattgttatgagttattagttatgaccactcactgacagaagaatctgttgcaaaaactgacgtgctgcctgtgatgaattgcaggcaatggcatggccgcgacgagagggatgggcggctactccggcggcggcggcgacgccggcgcgatggcgcacaggaggctgagctcgcagtggagcttctcgcggcaggacctgccgcagatatcggagatgggcggcctcatccccgacatcggggagagcatcgtcaccggcggcggcggcaacagctccagcgatggcgccggccacggcgcgcagtcctcctccttcctctcctccaggaacttctccatgagctcctgggacgacaccaactccatcatgttctcgcccccgagcagcagcaagaaggcccgcgtcgccgccgccgccgccggcgaccacggcgacgacatggtctccagcttcagcaacatcgactcccaggtaatactccacactgccatgggtacaattcagatttgtgtttttgcccttgtgctgaaactgcatttcttgggattatccagtttggcttgtcgaagcagtcgtcgctggagatggccggcatggatgacttcttgcagctccagccagactccgtcgcctgcagggcccgggcaaagcgcggctgcgcgacgcacccgcggagcatcgctgagagggttagtcataatttggcaattttcccttcacccatctttgcatatgatatgattatgatacgatcgatgttggatgctggtatggagatctcatgttttctctgtgctgttttaggagaggagaacgaggattagcaagaggctgaagaagctgcaggatctcgtgccgaacatggacaaggtaactcaatgaactgtttgggtcatttctaccaattgaacctgacaattctgaacctgattggagctgtgcttgtccctcggttataaatcgaaattagttcaaaatgtttgatgtgatatttactggattcttctcaaatatacagcaaacgaatacatcagacatgttggatattgctgtaacctacatcaaggagcttcagggccaagttgaggtatgctagctccacttcagaaatctcttcagagaaaaaaaaaaactcccaacaggtttcatttgcatgtataggtagagttattagtaactaagttacagatatattcagggaattaaaatggaactgttacagaattacatctgaaataagtctctcatatattgaaattgatttatgcagaagctaaaacatgaccaagcaaactgcacttgctcaggcaagcacgattgctgaggctggagaaccagatctccgagctaatgttgtaatgatgtgattggtgaacccaaagttttgcttcagaagattagggtgtaaaagcacttcacatgtcaagtggcctccatgcctcgccctcccctttatcggttgtgttatggacagcgtcaatgacttgaagagtaggcggtgacaaagtagattaattgttgtattttaattgatgtaaggcagtggcttgtatgtaaaatcatccatttcaacgccaatgggattgcttcttattatcattgctcttattaaaagtatcctcctctttggcaccatttttgtgaattaccgactcattactgttgtttttgctgtaaatcaccttgtatgtctccttttcgtttttccaacaaacttattagttgttgtgtcatttccatgatctaaaaatacaaatgtttttgcagaaccaggattctaagtatgcatatttttttctatacataatgtcaggtatgtattcaatttctggttggaagaagagttgcacatctgaagtttatttatcatcagccttgaaatatgaaatatggaacagtaaagccaggctagcatttcatatgtgtcacaataccactatacagtttgtgaaatcatgtagcagaggatcttgatactgtccttgagaacaatcttaggtagcgtaatcttcggttatctgtattcctctcctgcaaattttacagggggatggttcctcaaaaagaagactgaagcaaaagaacttaatagcatgagtaggccattgtcagattttgtacagtgctatactcacagccttgattgtgttcttacaagagatggctgcagcgcatcgtagtgtccgtaaccatcgtagagcacgcagattggattgtccttgccatactcctgaccgtattcggcgatgatcctggggctatcagagcccttggtatacatgtaaacagtgataggcatcctgcaatatggcatcactcaataacaattgcaattatgcagaggaagatatggataacacaagaaaggtacctacctaagaacatgggagcacatgagcagttcaggttctcctccccaaacatgaggctttcttatctgtctcacatagctctcgaaatctccttcaagaaacctatccatcataatgaagattaaccagaaaaaaaaatacattatctgactgaggcttttttaaaatttatggttgaaacatcattagactatgagttaacaatgaaatccagaaggcaaacatgtaggagtaatagctaaagccagtcgttgcatgagaatttcacatatggataaaccagcaaaagtgattagtttgtcattttaagcatatttttagttatactccttctgcttctgcaaaagtatcatcaaaggtaaaagatgcatcaaatagacaacaggaaggaaaagaaaccattcagtgtcccctcttctcctgacaaactcatctgctacctggaacagacaaaaaaaagttcttcagtggatcacacaagttcactgaattgcatagccatcaagtgatgaacattgaacaatcactttcgatcgaagctcatcggcaagctccttctggatgctatcgcttggcgactgctttcctctccttaagcaggcaccgtacgcaacagacctaaagaggcatctcccatcgcctgtaattcctgaaatgtgaagacgacatcattctagctacatcctatgttcagcaatctagagcatcaactgaagcaaaaataagaacacaatcagaactgataagttagactgttagagagtgcagtgaaaaaattattccgatgcacaacaggacatatgtaaagaagaaagtcactattttcttttcttctttcaaaagggaagagactgatctctcatctaattttgtcaaagcggacaccaaattattttaagctgcgaccttgaccttaaactagcatatagtatacacacgcaacagggaaagaatcgcacaagaaaagcacatctaggagcgacaggaaaggcatcttgctacccgattagtttatcgcttcagattacagcctttagactgcaaatcaacactgatctctcctttctcccatatctactttttttatccccgaatactaaaatcagtgatctctcttaccactaatcacaaccaaaaagaaagcccaccttttcacaaatgggtaacaactccctaatagcaaccttgcactaatagcaactaactcatttgcttcctctgcagcatccaatcactaaccaagaaaataaagaacccaacaggagaagaacaagaaagaggtaagaggaaagatcaaggcaatcaaggatccaaggggatcaatcaaaacaggagccgggcatcgcatcatttcgcgatcggcgtcacgtacggatcgatcgcagcgggcggagctcccgatccgacatccgccgcgccgcgatcctcctctttcctcctcctcctcctgtcgtcgccggagacgaagggggattggaatgaggcagagaggggaccaggctcgtgggcgcacgagaggaggagatgggggggagggaagaacaaattgggcgtggagggggggtggggagagagaggattgggatggaattggattccccacgcactccgcttctgtccctgttcggattgccgcctctttttttttttcttcctcttttcttttctttttcttttctagttctctcttgcctgccacagtggcgctgccgctgagtgggtggaggcgttgccgtctcggatgctcgatttcccgccacaaataaatggcgggagtgagggagggagagccgtgggccgtgggccgtgggacgtccacttttgaatcttgctcctgggccctccgtgtcagcggcgcatggctgatttttttttgttaaaaaggaaaagaaaaaagaaagccctccagaaagcgttccgattttttttaatctaagcacatgcgacctcataattccaaatgtgagcatatattgtcctgaattctgtttctaatcaaactagctagcaggcacaaagcaaatgatccattaacatgtttcgctagtattacaattaactttgttgatgcagcttctatgtgaaacaaatcaagatttattagcacacataatattatgattttgatgatccaagcagatggattatatttcaaccgaccgctacagttccaattttcaaaacgaaaacaacatccaagtcaaatatggattaagaaaaaaaatgacgaagaaagctcgagactaacggcatgacggtacggtgccctatctcgtaatggttgatccaaccaattgcaaatggtaataagattttcttttctgacgacaaacaatcaattagacctaaacaagttgctacgagctagtgatttgtccaatgatcagcagccattagtttgttatatttcgtttgacattaagtccgatggaagaccactgcacacacacatgtgggcttcttgattaaaaatagaactacatccattacctactcatatttggaattagaaggttgcatgtgcttagatgtaaaaatttcgggaaagcgttagaggtgtagtagagatctataatactttgaaaaaaatattttttatattttaataaaaataagagggctgctacaaaacggaatcccgttgcaacaggatagacatattaactattctcttgcacgagtataacaggtatcaggtactacgtattacaggtactgggtaacaggtatcaggtatcatgcagctggtaccacaacaggtatcaggtactgtcttgtaccgttatctaggttttctgaaaataaaataaaattatagtttgccatgtgggttgttgttcagcgaaattgtgttcccatgcacacaccttttttttaaaaaaaaaacgttcatcaaaaaaaaatcctgaaatagtgtgcgctgataacacaattgtgctaaataacatttccagtttgccgtgatgccatgtccttggaatgaaacggctatttacctgcacatgagtatgtgacatgtgtttccctagttaaagtataaacaaatgcaattgacatacctatggttcagatttgcaacatggaattttttcgtagttcatatcaaaattgtattctggatacggaattcgtgcatttcaaaaaaaggttatgtatatgtaaccgttaattttctcttgacacgtataaataatggtttatatagtcgtcatcatataatttctcttgttttttcgtcgtatgtacatgatattaaagtatgttacttatttattttcttacgtagacacgtggactaaatttatccttatagtccccactaattcttccgttccatgagtctagacaaggaggggaccatgccattccatggtcttctatggattgcttgatactcgagtggtctatttgcttttcaatactccatcctttttaatcttgtcgtctattttttgtgtataaggttatcagaattatcgttgttttttttaatcttttgacaacatccttcttagattgccaagacgtttttacctgtcaagttctccacgagccattttttttctttttggagaactcgttctaatccatccattccattgtcaaatagtgtccaattatcgaagaccttgtcatttttcgatcgtcaaaagtgatgggtggggctatcctccaacaatcacatatccatggttcatctctatcatcattgccatcaacctctcaatagcgcacacctatatcatgtgttgttaaagcttggatccaatggccaagaaaattcaccctcatatgtctgtgttaataacaagagatttgctagatttaagggcatatgaaaatttgtaatttttcagtcacctaaaattacacattgctgagcttaaaattgtagtgttatgcaatgtgcaactttatttcattttatagttttaatttattttcatctgagtttgaattctttttacatggaattttataaatgtgcgtaattgtaaatttatttcattttaggttagtgtaatttattgtttaaccttttatatatggaagaatgtatgttgttttgaataattaaaagtggaggtgatgagaaccatccaattgccattcatgggaagagaaaaagcctaagaaaaataatttcagacctgttcatatagatgtatatgcatcgcactactggaaaaatacttggtccagaattcgtgttgatgtcaaagccgacacatacttcctccgtcctaaaatacagtaatatagtatgaaatatagtaatatagtacgagtttagatatattctaatactacaagctctttatagaggcctatctagattcaaagtgctagcttatattacctccgtctcaaaatataacaatttttggctatgaatctggacacacagttgtctagatttatagctaaaaatgtttatattttgggatctcattattttttgagataaaggtggcatcatcatcatcatcatgatcatgtcttgaccctaagagacaaacacaacagaggtctctcttgcacaacactagtagcctgggcccaaggctgaaatgtcaccaacaaactttgaaggccagtccacgagttttcttcattcatgtcggccctcgaatcactgtcttgcctcctgtggcattttcttcctttttgatctcatgtcatcgtcttcactggcttggcttccatgtcctgtcaagccatagcctaaccctgcatcttatcactgttgcatcttgggacaaaactataccatgaggtactagcattcaacaatatttaatttaattaactactgtaccaagattggtagtactaccttcttgagctgtctgatgttgaatttcttgagcagttgggcctcctgaagacaagtatctgcatgagtgaacctgtatagagtatagacacgttaacatgttagttgtgattcataaaatctgatgatctgatctgaacttgtgaaatgaagtgaagagagctatgaacatatggattcaggggagacaatctgatgatctgatctgaacttgttaagtagagtgaaagatgagctatgcacatatcttggcaaagaaaaacaaagaggaaatggcctacatcaccccaccgagaagggggggaagatagttttactttacacaaggaaacaacaaagaaggcaaaaaaaaaagaaagatcaagagaaacatggaacaagaaaagatgtacatatccactgatcaaactcagctcaaaaatctgctagcattggtacagggagaagctcctgttcttccacagtgagctcagagtccttcctagcttcctcgatttagacttgcacagctgttttgagtcgcggcggcacaccatggtgccgttaccggtctctcccgcctgctgctgctgctgctgctgctgctgctgctgctgagcttgctgcggcacaggctgtgccccatctcgctgcctttgctcccggaacagcttgagcagcttctgggacttctccttccccttgcctgtgccggttgccgagatggaaaccaaggaaggcaccactccttcctgcagcaccggtgcgatgcacttgtcatcggctgagcacatcaccaaaaggcaggacaccgactgctcctgctctgttggctcgccggtgtccagcagcatcgccaaggtgctgatcagacctggggtggacatgatatcttttctgccagcttgggttgccgcaaggctgatgagcactgcaagggccttctctgtccaacccaggccctcagacgccagggactccgaaaggagagagtgaagagcttccacaatgcccgcagacaaaagcgacggtacgctggcctggtggttggagagattgtatagtgtgtatagggcatcatgcttgcaagagctgccttttgtgtcgcgggcctcatgactgaacagacggtctactaggaatgacacagcctggctcgaaccaatgatgttctttgcctcaggtaggcaggaaaggttaaggtatagtgccgtggctggagcagataggcgtggatttgatatcatctgctcaagttgatcgattactccagcagacaataaaagtcccttgttcctgaaataaacaagcaaaggttaagcaaaactacagattaagtagaaatactgaagatgaactcagctagttgtaattgataagcagcacataaatggaaattaaattcaatacctgttattgttgacagcaaggttaaaaagagccatggcaccaatttcctgtgccttctcatttccatcttgcacagcgttcctcaagaactgaactagtgcctcagcaaacccatttgagcccatctggattctagcttcctcatcatctttcagaagatatcttatctgctcaaccaacctgcactggatgtgtaagttggttttttcatgaagcattagcagtaagtttcggtacccctcattcatatcgaaatcataacaagagctgtcgtccaatgttcccgattcgttgtttgctggctcttcttttctcacgttgtccaatggaactaccttgacactcttcacgttgatagagtcaaaactttcaagagacacgcagccagtcgcttcggagtcagataaagcaagtctccaatttacatcgaaggatcctggtggaccatcaggaacaggaaaatcattctgctcacaccagctggcaattagggccttaacacagtaatttggagtcaaagacaggtgagataattgctgctgagtctttggacaggtgctgtgaccatcattaaaccatttctcaatgcaaacacgctcataagtttgccctgatgaaatgataactgggtcgtacatcagttgtagggaaatagggcaccggagctcctcaggagggatcgacatgttttcggaccttggaccactacgcctacaattgaatgacccaagcctagagttgaaagatccaaaccttgaattgaatgattgaatactcgaaagttgtctgctgaatgctcggccattaccatagggtccatacatgtcctccatgcctaatattgtcggcgagcatggagacgatccttgagaatcagtatcatcaccagcctcacttctgaaaaattttgagtatttcctcattagattgtacaggtatgacacaacatactctttccgcttatcttcatcagaacgagccttctcaattagcttcttcagggcccttctctcagtgagtgctgccctggaagacgtaattcccagctttagtgcagccatatgaaaaacctcaagctccccactatcactggaactattcattttcctgtttctctggagcaaattgatcacctcgtcaccagcttccttctctgattgatccaatgtaaataccacttcttccaactcagcaataatctctacaatctgttgtgcaccaacaggtccagatgtcaggaaataccatatggtgtactaaattgtaaaaccataacataacttgggcagagttggttttgtggttcaaagaaatcaagtactaggaggataggattttcacatgacataccttacaaccaatttcttctgttactatgccctccacgcgtctaagactctcctgaagttgggttcttgctttctcaaatttcaaaagcacagtttctgcagttatggcctgaaaatgaacaatatatttaagcatataacatttttaatgatcccaatggcacggatcttctgaagaactttatggggatgctggtaacataagcttaccaagtagagcctgctgcaatctgcacaatgttgaagaagacctttggctttatctagagctacatgtagagagcatagcgcctgtatgccagatttgcttctgggtcttgatgcttcaatgaaagggaaaatcgctacaagttttgagaccgcaggatgaaatgctctgtacattccggcatgcaactgcataaaccacgatttccttagatcatgtatcaacaaatacatccagaaaaggttgataagattccagtaaggtggctaatgacagtaggtcaagaacaaatatatactctcattgccatcaagataaaagcactgccaagatgataccttagcatcattagccagaaaaggaccttcctcggcctccattgcatccatggttaattaccaccagagctccaacatctgattacaaagattcaagagagcaaaaaaaccatcttagatgaacagatcgctcccagctattctcacactacagataattaaacagatagtagaatacaagttcccttagcactaatgcattgaacagatttggacattagagaacgggacaaagcagccttccagcctatgagcacgaaatagaagagataagaatgccaaaagaagaaaccagccgctgcaagcctacacaaatagtgctccctaacagatcgatacctatctttcggctaaaattcaagatttcgagctcctggagcccatgaatttggaccaatctcacatcttttgaactaatccaaggcactcgactgttcccagaatgctgcatttgaccccatatcatgcctcatttttttaaaaaaaaaattcagataagcagacgtcggcagcttgctttaagtcttccccaaactaagtaagaattcaacgcagcatcctccgtgattggaagggaaatacgataaggtgtgggctgcgacatcgttttcaccactcgaaatctcccccatctgaacttcttttttttttttacttttaaccgcgagacaccaaaaaaaaatcagaggaagaaaagaactcggcgacactggaaccgcggtttaacccgagatccccaagaccacccccaatgcacgaactcagagaagatcagaagagaagaggatgagagaaaacacgagacgaccctcgcggcgcggacgaacagctcttgtccgcgacctccaaaaaaatcctaatcatttgcagcgaccagaacacgagcggaagcgcgaggaggatgaggagcagcagcctacggggaaggtgggaaggcctcaccatttcnagcggcgagagaaggggaggaggaggcagctcggcggcaggggcgacgtcggccagcggg

SEQ ID NO: 14512 - DNA, 9960 bp, Oryza sativa
aaagaaatttgtataatttaacaacatgtaaattatatattatgaaaaaaaatatggtgagtctgaaatcatatataattgtacggatttacatgatggttaaagatataaatttgtgacttgaaaaaagaaagataagtaatttaaacagaatgagacagtactactcatccgtcgtgagtaggaaaagtatattactgtcggcaagaactcgaatttctagttacccatccgtcgttggtaggaaaagtcaaaccgacatcactgatgcccatcatgcagatatggtggcctaagctatttactattaatttcaccttttacgtacaaacagtacactaagggtgtgtttaaagagaaggggattaggtagatcgaaaagatacacaaaacgagccattagcacataattaattaagtattaactattttaaactttaaaaatggattaatatgattttttaaagcaacttttctatagaatttttttataaaaaacacaccgtagtttggaaagcgtccgcgcggaaaataaaatatttttctctctcaatcccctggatcgcccaggaacgaacgaagcctaaacaaactagtagcagtaattaacaatgccatcaacagctgacttaacctctcttatcaacactgaacagttgttttctgctggtctttcgatcacttgcagtatactacaacatcggccatttatttgcatctctcatttttaggataagagagagatttagcaattttctgttggtcttttaatcacttacagtacaaacatcggccatttatttgcatctctcattttctgagataagagagagattagcaagctggtttggttgggttggttggttggatcagattgatcatgtgttgatgagaagaacatgcagtacacctacgtggcaatcagacggagccacgagctgaggcggcggcggtccgaccggccggccggccgccggcggcgtgcatgcacgcacgcgcacgagtaattgggcggcgccgctccgcgtcggcggctggcccggcttgtcgtccccggccacgcggctgtcggtggcctgcactgcacccagcaaaaccagtgtttgagcatgttcggcacattttttatactccctccatattcatattcaaatgtatgacgccattgatcttttttatcaatgtttaaccattcgtcttattgaattttttttacaaatataaaaatatttatgtcatgcttaaaaaacgaatactgattaaaaagttgatcagtatccgttgatcaaaaagttaacggtgtcatacatttaaatacggagagagtattattttaaggaaaatactatacgacgatatttgtttggacgggatgatacctcaaaaatattacatgctaattggtacgtatcggttgatacctcattcggacgggatgatccctctgagtatatacctcttaggtatcattgcgtccgaatgggaataccgtcatgtagcatcctccttattttaaaacacggtacaaacgcttacgacgcacgtgcactcatccctatatttggtacagtttgaattcgaggttttaaacctacaggtatctcttctaaatccataaatcaatgaatgcatatttgtgagaccataattacatcgataacatttgataaataattttgtttctattttaaaaatatataaaaactttagaaccctagataacttacaaacactaaaattttctccaaaattcagcatgtatgagtgatctggagcattgccaacaggtacttggaacatgttaaactctaagctcctgtgtttcgatttcatactacttgatttgccactactatccgtataaaaactggccagactttcacaaactcagcattccaattgcattgacagcccttgattcaagaggagaaaaaaacaaaggtcattttccaaaaccagtacaccaacgagggcaatatcggaacaaaactgttagtactgtacttatggagccacatcatatttactaacgaaaattaatttgtaaataaaaattttatatatgttcttagcaatataaaagcaaagactaaaaaataaatttcgatgaaaaaacattaaaatcagctttaaattgaaaattcacattattggcctgtgctcccgtggacggggagacacgccacccacgggatcggacacagcagcgttcgcgtccatacgtagaagcaactgacgggtggggcccagcacgcgcgctgaccagagaggcaagcggggcccaccacgctggagccaccctgtccgcgccagctggcatggccatcaatgcgacaggtcagcacggggggctgtacacgcggcaggtcctcgtgctttggagcctgaccagtgaccaccactctgctacagctcagctgcactactggtccccatgcacgcgttgaacttgccggccaatcgggattcagaagatcggttcgagtccttggagaaaaaaaaagagataatatttttagataaaatttgagcaaaaatttcatactcctacttatttatctgtgtggtacaatctatttgaaaattgtgtacgttgatataccgatgaatgattgtttagtgtgggagtgtttgtttgagatgaacagagatacgctttctgagctttctgtgtttgtttggatgtgttatgatttgagcttttaaaaattgttttatatatgaatttcctaaaatattgttcaaagtctatttttaaagtttacaatgtataattatttcgtttgtaccttcaaataaccatcacaaattatccagttattcagagacgaaacataacacacaccctttaatttggtaagagattttttttccttacacatagtatatacacgcacgcatgcatatcactatatacacaacaccacacttacacaccgcgaatgcgctttctaatacatatactcaaagagacaaaaaccaataactcatctttgatcttattaaaatcatgttgaaagcttgaatgcatacacataaatatttatgaagatcattatttaaaactgtataaagagaattattagtagtatatatatcaattataactacctgaagcatctcgagcaaatctagccgatctcatgtaccactaattaattagcacggttctgttatgagccccttttgtctcaccaaacttaaacaccttgctaaccatctctgtgatacccacatgcccctgcgagattcttgcgatatcagaggcagaatggaattatatctggagattaatcagactgatctcaagcttaattagtaccgaccatatgcatcgatcatgggatttcaggatttcaggtttaggttagccaagcatccacatgcatcgccaccgacagcaattagtagggctcggagaaaggggaacaggcggtcgaaataaatcaataaataattaaacaaaaaactaccaattaatcctgcatgctttcacgacaatctggtgtaaccgaaatggagattaggctagatcgatcgatcatctcactgcatgtgcacgcacttagaatatcgttgcgagccaaaagaagtcacagataatcagggttaaagatcagttgattaaattcagtttcattttgggcgactttgtccgtcgatccatctcattatttttttgccaaggcgaattcattgatctcaacatataccactcatctctcatatgtgcgcgtatatataattgtagacttgtgtgttttcttaaaggtaactatttatgtttgtgtatataattacctgcataaaagttcatttgtagagaagtttgagagatcagaaagttaattgaattacgaatttaaacacatcataatgttgtgtagaggtctcataaaaccctgaaacacgccttaattaatgatgataaggagtgtgcacgcaatgcatccctaattaagtccacgtgcattcggaccaggagcagcctgcaatcctgcatgcctatgagacatagtatgatgcagctgcttaattcctagcttaattagcttcgtcgattacgcgttagagtagccagctttgccattttgatctatcgatacatgcatatcaccatatctcttggattaatacacacagctgaacactaatcactcacaacgcgttcacaaaattaagctcctcaccagctcgaaatggagattggacctaaccaattcatgaaccccatcgatccatcgatagatcactgtctttaatcaatcacttatccgtgatcattaatccaatcgaactgaaaacctaagctagctacgagagctgcaaaggatagagcgaggtagctaatgatcatcaccagctagctgggcctaaatttccggccagccaagcttgaatcctcttaacctttttaggtttggtcaatctaattaattcgttgtacctctaatatcattttgtgaggtggaatagatatgatcagttgggaaacgattaaatgaaaatgactaattataaatactacgacctgcctgcagctagcaatctaactaagtattggttgtactcgtacgtgtacagctcgatccttaattactcgctgacgtggcacaactagaacacatacatcgtactaattactaatccacaaacaaacagtgtcttaataattaatttgtttgtttatgcgtgttcttgacgggatgaaagcgattactgatgatgatgatgataaagctctagcttctcggtcaaaccgaactttatgcgtgtcaacttcaaccgtgcgagattagattaattgattaattatcatttttttggggctgattaagctgtccacgtcacacatgaaaaccggagatgctacgaaacgggtgaaaaaaattggcagctagctcacacatcacactcctagctagatagctatactgatcaaagaatggactagctagctcatgcaaccagtgtcggcttcggaattattctaagatgcattatattttttaatatgtttcccagctttatgtttcttttttcacgaacacgcaaaaggattgcacgttaatatattagaagaaaaagagttttagttacacaccgcaatcagccagactagcttatactaggggaaggaagaaaaagcaaaagaagaaaaaactgaagcttagagaaactacggcggctaaaaacagacttcaagcagcgggaaggggctaagccacgctagacttccaacaaatccccaaaagcggcgacgccagctaaagactatagatagccctccacatggatggactccagaaccactgggaccgaagagagagcgtagtcgaaaacctagagttccgctccttccacagacaccaagagaccaggagctccagggagtcgaagctgtcgcagaggtgctcaggtaagcaggccctggaggacggccaccagtcctggaaccaactgccacggggtgaagagagggcagaccagccagaaggcggcaacactcggagccagacctgccgagcaacgaggaggatgtggttcgccgtctcaagatcctgagcgcaaaaagggcaagccgagtaactatcgatgccacacttctagaggagatcagccatcccgcagcgctgcccagctttgtgtttcgtggaaaatgaataattctatataaaattttcttaaaatacttttctaaaacaaactttcaactttttaatagttgatactctcaaatagctatggttagcgatggtcaagatgaattaatcattttctcccagattttgggcaatgtgcagtagtgcgtgttcatctgatcatctcctctgaatagtcactagctagtagctaatcagtgctctgttcgtactgcttgctttgcatggcgcacactaataaacagatagagcaattcaatattttttcaatccactttcatctgaattccccggcatttctggtccttttcttcatccctggtgcctgacagtttttctctgagacgatgttgcagttaattttgaagcagccgagctttaattactggcagagaaaattgtcgatggtgattaagttcgagcagatgattgtctcgcagagagaggggccggcagggaggagtaaattgttcggcgccatgtcgtctgatgaatgaagtggtggagtactgtcaaattgtcaatgcacacctgcataatatcgcccggtatcccagctgacaggtacatctgattttaatttcatgcagatgcaatgttgcaacttactacaactctctgaattcagttcatctgatttaatttcttctccattcttgatggtactagcttagtttaattctgatccattcttgtagtctctgtcagggaactgtagaattagtggttaatttagcatgcatgttgggactaaataaatggtaaaaatcagatttttgataggaactcatacttactataaaatggagtcttctgcttgagcttaagatgaaactagcatagacctgccaaaatgtagaagaactcctatagtatacttatatattagtccaaactttagtttcatgtcatgtatcaccagaagaaaatggagcaagctgggattgtgcatgcaaaaaacacaagtttcggcagcaacctataaacaaagacagacacacacacagtgatatatttcagtcctctctctctcactcactgcacaacacactggccaaacaaagtgacctagcagtactaattaattaaaacaacaacaactactgctcctacttagtactgctaaccataactatatctacactaatgacagtgtttgtgtgcttgcttggggggcataaaactaaggggagataccaaaccatcatgtggttcttccccctttggtcaagatcaagaggccattgagaattcgcaatggttgcctcgcatgtgaggtgcatatggcgatgttccctcctccctgcatcggtctcggtctccacacagaaattttaatggcgaggtgaggtgagagggtgaggttgatgcctccaggctccaaggtgcagagcatgtgggacaaggacaagagccacacggacactgtgccatgctgaatttcctgaatgtatctgaatttttctgaatctctctgaatttcttgaatgtctgaatttctgaatgttgcatttgccctggtttggctgcaagaacaagcagaggccggggcctgggcatgtgtggttgtgcgtattaacgcctggatatgctgctgtgttgttggtttcatgcattgagatttggagagggctgcagccaggacaggcctgattactcatgctgctgcttcagatcagtcttctggttgtggttggtttgctactggcagtaacattttgttgatgacctatttttgtgggtctttgagaaaacattttgttaatagcattttttaagaaaacttttaaaatttgttgtcgatttcgagaatgtagccattgttaattttgctatcatgactactagaattcatccaggaagaactgagatatttagttgacgaacaggtgggagtagcaaggtagtatctttattttgtccaatgtcattagataatgcacatggcactcgaccggaggcaatgctattttgttactattgtttctatcttgtcaataaacaatactcacatgacattcattattgttgttgacttctttagaataaatgtgtcaaccaatggccgaaagacgagagagattatcacttggatggatcatggatggactaggtgagtcgtactacccccttaccttctcttctggtctcaaagattaagaaaaggaggccatcaagcttaccaactaacgaacgaaaagtagcattaatactgccacgtggaagaatgccattccttgaaacaaggccatttttgtttgagtaaattttataaaactacatgtattttgatcaaactatcgtaaagctacatatttaaggcgttgtatcactaaactacagatttagcaccatatttatcataaaactatacattcaaggttaagtatcacaaaactacatatttaatattgaagttatcacaaaaatatagcttctagagtttaaatctctagcaccattattatactggagctataaatattattgttttatgactaaattgtttctaaacccatagttttgtgacaatttagttactaaacatgtagttttataacacttcatcttaaatgtgtaattttgtgataaatttggagtaaaaaatgtagttttgtaatgtaccgagttaaatctgtagttttgtaatagtttgaccatagtacctacagttttgtgaaatttactctttattttccagtaagaaaataaacatagagcgttggacagtaccggctaagaaatgggccgtacaaacaagggcaatgcatcattctgacttccaaagcaggcctaaccttgtatcatgggcatattgcagctttgtgttcaccaaaagcattcagtcccaaaacaatcgcacaggaatggaaccggaataatcaaatatcagaagcatttagtaagtgtatctcaagccagaaccgacgaggaatcccagatatgcgacatatatacatggttacattctactaataaccctttcaatgtctaaatagccaccatacaagtccatacgtaagccccccggtccttccccggctctacctcacttcgctccaggcatttgacaactgaaggatgttcaaatacgaattccacacattctatatgcccggtgcagccaaaatgacatctccaagaaccaaaatatgtatggttcagtggaataactgctcagcgcatattccttcttgttgatctatcatcactgattaagcatcactgattaagcttctattacagctgccagttcctcctcggaggatgtttcagtggcgagactctcttcaggcagatcactcaggaaatcaccttcatcctcctgctttttaggtgcttgagtttccatcaatttccttaaattcgtctccagttcttttgcgatactttcattttcgttgaggtaagatttaagggcatctttaccacgatatgactcttcgttgaaagaataaaatgcaccacccaactttttgacaagcttgtgctttaatccaagttcaataagctctgaactgcggcatatccctttaccaaattccagctcaaactgtgctgtcttgaacggtggggcatgcttgtttttcacaatcttcacaagcacttgactacctatagtctgcaaacagaagtaaaaattgtcagtaacatttcaagaagcactacaatatgttgaagctaaatctgtaaggttactaggtctgtaattttgattgatgaggttataaaatcatatggctaaatacaaagcatgcatgtgccacgtgtctaacagtgttttggagatgctatccaaatagatatgacgcaggagtgaaaaactaggttccaaagaaaccttgatatgggcatagcagtgcatatatgtcaagtattgactaactgtctaaataaggtaaatgtcaaggatatgacttggttaattacctcttcgcctttctttaccaaaccaatacgcttgatgttcattctaacggaagcatagaatttaagggcatttccaccagaagtaacctccattggacctccaaatcctccaaatgtggtcactttagacctgatctataacacatacaaaggatgcaaataatataaaactgagagaaatgaagcgaatagactgcattgattagtggggtacaaagtatttaatttttttctgggacaggttgaatataagtctatagtaatgatgggacagaatgtattgaacgagtgttcaaatgatcactctgtgagaactcatgatcgacgaacaagattcaagtagaatcagttgcatcactgtaaacaa

SEQ ID NO: 14513 - DNA, 1498 bp, Oryza sativa
aaactttgctgccaaacgggctcagaagagcaaattggtgtttgttgtgcgatgatgctgaattgttcaatcaatgcggcaatctttaacattgcttcaagctgctgtgtgctgcgatgttaggccaagctgcctctgtaggttgcagccttgcagcatctggttagctcagtctttgaaggccgagtttagttctaaactttttcttcaaacttccaacttttccatcacatcaaaactttcctacacacacaaactttcaacttttccgtcacatcgttccaattttaaccaaatttctaattttggcgtgaactaaacacacccgaaatgtagtgtgacaacttgacaagtcaccatgagagtaggataccctgaattaattgacttgaatttgtttttcctaaatatcatgttaccaaaatctgaaatcgtttttaacttcaccgatattcagcaaaatggcatctattcttataggtgagagttttattagtgttattttttttactgttgctttgcagtgctgatcctgcatttttagatgcttactggtattaatgtctgaaccttgaggttactccctgttctgtttgttggcagctgcggtacaagagatggctttggtggacaaggtttggggtggtcattactgtgctgcagtttgttttagcactttgtttgttgtgtattatagtgaaggatttctctgctgggagatcttcaaaacagtgcttgtcaggtacttgcattgtgctatatacagattcagactgttttttttttcaaaaaaaaaatgggctgttaagatgttgttaggatcaaaatacatttattctcttaaacccttggaattctatgcaaagcagcatttttctgcactaaatttacttatttaaaatcaaatatatgtgggatttcgccaccctacatggattttagtatgtaacatactttatcctgtcttcatgcttaaattatctatagtatcatatggtaacacgaactgatatatagtacagcataacaaggaaggccttcatctccattcgtttgttagatgtatggattcctttgttgcaattagatcactgattcatgttacttggcttttatcaggacatgaccaagacaacagtaactggaagcacactctgttaataagttttatcgtcatcatgtgggtggcaactatagttcaatgttctactggttctgatgtattaaggtggaggtcattctatgcttcccatgatattgcgtggagggcacactatagagaggtgtttgatcatggtatccgagaagttttatgctgtctagggcgggttaagtattcgtatgtttctctctggaactatttggtatatcctacctctattgctatttgaaaagtttgagcaactttgttattcacattgctaggagtgtattagaagaagatgatatatgtgttgtggcaaaattattgggtgatcttatggcttatcgcgcatct

SEQ ID NO: 14514 - DNA, 780 bp, Oryza sativa
aaaaaggggtacaaggcttgcactcactgtatggatgaaacaaaagtacgtatcttaaacactgtaggaaggttgtatacatgggtcatcgtcgattccttgcagcaaaccacccggtacggaagaaaggcaagcacttcgaacataaggctgaccaccgtacgaagcctaaacatcgcaacgggaaaacagtgtttgctatggttaaagatcttaaagtagtgttcggaaaggggcctggaagccagcctatagagagcgaaaatggtcacgcggcgatgtggaaaaagaactctatattttgggagttaccctattgggaattcttggacgtacgccacgcaatcgacatgatgcacctcactaagaacctttgcgtaaaccttcttggcttctaggtgtatacggaaagtcgaaagatacactggaagcacgtaatgatctaaagcatatggaacaacgcgacgaccttcacccggaaccaaaggagaaaggaagccattacttgagtccagccagctacactcttagcaaggcagagaaggaaagtatgtttgaatgcttggagagcataaaggtaccgtctggatactccacgaatatcaagcgaataataagcacgaaggagaagaagttcacaaacctaagtctcatgactgtcacgtgttgatgacacaactgctaccagttgtaataagggctatccttccagacaatgtccgggcaacaataacaaagctatgtgcattcatgaacgcaattttgcagaaggtcatcgat

SEQ ID NO: 14515 - DNA, 1391 bp, Oryza sativa
ccctggaaagagagagatgtcagaacaagagcataacacaatataagaaattaccctgacagtaatcaaacaacactgacctaataatcttttcatgctgtgtatcatgagcataagcaagcatctcactggccttctcactggctgtcccaaccataagcaagcccattccaataccagctgcttcaccagccacagcactgtccgtgtaaagacattttttatgtcctcatatatctcctcatctgctgttcccaaagctgcaagcccaaggcccaaacaggctccgtgctggatcacctatataatttgcttagaagtaagcaaaatatgcatgacatgaatgacatgagattaaaaagacaggaaaggaataaaaggacacctcagcactggtattgcgaaggctttcacgaaggaattgtttgatcccttcaccatggttagcatgaatcaaacccagggcatatagggcacctccttctgagtatggactaccaccaccaacggcaccactttgaggtaggtagggggccatcaaagctcgcccttgttgaagatggcctctgtgaatgacacctagtccagcggttgcgctgaatttagcccaattggttgccctgcttaaccactcctgcaagaaccaacatgagacaagaacagacaaaggccaaaatgttgcataacagtaagacaacaaatagaaactaaatgtaccagattctctcttaggaaggtgtctacagttgttccagcatgcatgattgcattggtacatattgttgcactgtggcaaacactgttcctcatttccacagcctgctttattgttttcaaaattaaaagatccgacctgttgagacaaacaagttgcatcaaatcagcaccaggcatggaaatttgcaagactggttatcaacggttagcaagtactccctccgtttcacaatgtaagtaattctagcatttcccatattcatattgatgttaatgaatctagacatatatatctatctagattcattaccatcaatatgaatgtgggaaatgctagaatgacttacattgtgaaacggaggaagtaaatagtacgctcagttagcaagtaatagtcagctcacctattgtggctatacaaaaattgcagtgtcaactggatagatgtctcccctgacagtattccttttattttcgcaagcctatcagcacgtgctacctcatttggatctactgtgtgagaactaccatttggtgtagctgtgtcatctctcatctgaacatccccagctggttctgtgctgcccgtacccgcattagcagcttgatcatccggtaaagccgatccactatcagggttagactcaggagtttgtgaagccagacgattcctc

SEQ ID NO: 14516 - DNA, 602 bp, Oryza sativa
cagctccaatggctgctgccggtgaccccccatccctccctttcttggctagtttcgccattgtcagcttggattgatttgctcacctggtgcttctcccccttttccgtctctgcagctcacatccgctcaaattcttcacgatccgtaagtgtgtatgagttcttgcggatcagaagctaaatttataatcgattgtatcaattcgtgaattcatattcttaaattgttggaatagatgggctgtggccgcagtacagctatgggggatggccatcctgctgcaggccaaccacattcgacggcaacaaggtggctgccaaccacccatcttatcttcagaatgggatattgggatgtggtcgttttcccccccaatttgatgaagaactgctagcttcttgctgtaagattggcatgtcaatgtgggtgtgtatttatctggttttaccttgtgacagatctcgaggttgaagacgatactcgaggagtactggccgtccttgtactgcggctctttctcaacctgctttggtgggaaaaggccattttgggtgcatgaggtagacattggtatctaaatgagatatgtgatttgatga

SEQ ID NO: 14517 - DNA, 692 bp, Oryza sativa
cttcaacagagttgatgacttgcaaaagcccattgaaaacccagaaaacataaactgggaaagctatgcaagaggtgctgtttatgccctgcaaaattttggatatgatctcaaaaaggtgacttttacatttaataattcaaagtccagaatatcatatgctttaaataatattgacagatgacttcttgtagggtattataggatatatatctggtgtgaaaggacttgacagttcagggctcagttcatctgcagcagtaagctaactgatatgtcatgtatatttgagttaaaattgctggcacaatcatctgtaatatgtagaaaactggaaatatgagtttagtgccgacctagctgtgaatcgaatatgcagtatttcataatcatgacatatacttggctcacatttgacttggagttcaaagcaaatttgtgaagctactaactgctgtactagtatcttctgaaccttcagctcaccataacaaggacagaaacttccagttcttactgtaggttctctaaatgaattattaatataattgatactttggttaagttatgtgatcatcaaatgcctatttctgtatgctcctcatcaggtcgggattgcctatttgatggctttagataatgtgaatgatctggttgtatctccagtggacaacattcagttggacaagtga

SEQ ID NO: 14518 - DNA, 2133 bp, Oryza sativa
gtgacagaagcatctctatgtgaagtgaatcaggttaattagcctatgttgatttcttgtgatgaactttcattcacctgatctgaaactgccaacacttggagtggagggtgagctttgtgcaaggatgacagtggaaggttcctgtctatgtgaaaatgaatatacaaacaaacggaagagaaagagtacatctttatacttttttcctaccctcagggacctgcaatgttcagctggtactgcatctaagatctaactaagtttccaggctttgcctcctttcatgctgaacttcttgagcctcccaaagaacatcacaaaaatgagtatcagtttgccagagtcgctccatctccctacgaaaccagtccatttatctgtgcagagatggtctggattgatctgtctactgcaactgtagcccattgagaaccccacatttccatatgcactgcaaatgtgggcagatccgtcagattccacgaaagaaaacattactattttcattgtgtattattaagattcagaaatacctgacaagtgttactttgtgttttgctgtttcatcagataaattgttaatttacttggtctgcattttttttctcaggtaagaaaccatttagtctgacttgcctgacaacttcgacaacaatgctagcacactgaagttgagggggtcttctttgagctttcttctctcggtgatgcagatggcaatgacaaagatggtcaggtaggagagttgtgacaaaagtgtactctcgagcagtctgattccctggttctctgcattactatccttagtagtggaattctcttcaaatgggaaccacgtcgtgtacggaggtagatacctggaggcaagatgaagcagaatatgagacaacaaacggtacgagtttaaacagacatcagttaatttgcagcaatctttccaattaaagtttcagtgattagttgcttattttgggcattgaaaatgcatgcatgtcgatgcagctgcttaacgaaatgcgatcagaaagtcacccttgggtggattatcatcttcggatgttcaaaagcagatcattattgagaaataattcagggaaggagttgcagctctgcttgtctaaggtttgatctttcaggtgacgtgcaagaacattctggtgcttggttatattctctgtaaatgatgcgacaataagatgaaaacatggctcaactgactggaagcttggattcacaagcatatggccttgagagaacaatatgggaacaactgctggccggtgaagaaattcctttgcacgcgctacgacaatcggcaggagatatcaccctgctttagccatgcaggtcattttcagaggcacacatcccagttcctaaaccaggctgcaaaagttgacgaatgacgactactgtgctccactattttgtactccatgcatcaactggggaaagatggcgaattttatggaattgcatgtgaaaattgagccataatcatctggaagaaccaaagattggaacaaattctagcaactatgcgcctcccattttgacatgaacaaaattagaagtaatagtcatcaacctcccaggtgaccagatttgctgagaacgcggagagcatattctcaggttgacagaaggtgtggcatgtgatgcatgcaggcttttgaatggagacttggaatattaatactcctacctttcagcaaattgattgtggtgttcttgcaagttgaagtggtgtgctgcgttgtggtttctgtgaagctaggaggagagctatccttttcttctttggcaaaaataaaaaaaaatctgtcaaaaatctaggagaaagggtcaacgcacggtcaactcctacctatggtcacgaactgggaaatgggacagtgttttgacgtttgaaactactctccatcacatgcatctacctacctaaggccattctcaacccaataattaggatgatgtccatagcattaaataagttgctacttaggacaaaaaataatatgcaagtgaataaatgaggaaagagagacatggtttctacacaacatccaagacatcatgtgagataagtagcattaaattgaagtatgaaatagtggtgtttgcattgga

SEQ ID NO: 14519 - DNA, 1371 bp, Oryza sativa
attgcaaatacctgtagccagtatcctctggatgctgaaggatgtaggcatattcttctcttctgctaaccttcctcaagatccatatgcttaacctcaatagtggcgataatatagtgttgcctgctagaacctgtggggtaaccagaagttatagactggatttctttctgaatattgccatgttatcatttaccggggtgaagccgcagtttgcaaatgaggatactgctgtgaagatggaaaacgtccatattttgatatctttactcttcaggagttgtcttgtatctgagtcaatctgagcaaaaataataatgactaaggagctgcaaacaacagctgctatgaagtagcctgtcactatatgagccaacatattgcggcacttctgtttcatggttctgcttccctgtacccagttaagtgatatggttgcttctgattggaagccttgtgaactattttgattgctatcatttacagcatcaaaggattcaatattccttctcgtcgaaggtgatctttttgggaggacttcgtttgtgttggtctcagcattgttgaagtgcagcgccagcattgaaatggatacttctcctcccaatatcatcagaagtattaacacccagagttgctggttagaaaagtcttccatctctactgttgccatgcttgagactgctgctgtggacacagaagtgaacatcaaatccaggtcccttggagttggcttgtgtcgtggcttgaggatcttcagagcaaggaaaccaacaaaggatattgagatgaagtacacaagttgaactattaatggattgctttggaacatgaaaaaccagaaacagcgtctgaagaaacacactgcacatttggagagggaacgaagcctcatggagataaacacatggaggtgcttaactttctctgtaatgtccctaaccacttggaacttgggctgtgggattttcatggctaatggcagatgctgtgatgtaactaggattgaactgaatggatgcatcattggaggtttgtgggcatagtgttcagtatgctggagttggctactggaaggtgtttcttaggtttcaatgattctgtctttgccaccattgctcactgcaaccaagttctggatcttaatatgtaggatggtgtaagacagatgtgcccattttgcagaatcatgatgctgatggtgtgtacagggccccaacccaggcatgattggtgtatgcacaagcatgtgcttagaatattataatgcctaactactatatgttcttgagtgaaatgattgtcagcaattagaatccttcattcacattttttgagtcataagaatatcctcaatttagattagctgtt

SEQ ID NO: 14520 - DNA, 1178 bp, Oryza sativa
aatcggaggtgcctaaaaggtttgcaacttcatccttcaatgtttttttgtcatattacatttgcagctatgttttgcacacttttttgtctccaaaatttagttgtaagttgatgagggagaaaatttgtgtggggaagaaagaatatatagaaatttagttgatttgctaaagaaggttttataaaatagttgagaaggaaaactatagtgaaagttaatcttgaatactagaaaacaaactaaaattaaaattaaaagaagtaaaacacattaaaattagtttaaaactttagaaatagtaaataagaattatttggtgtaatattttatgatttttgtatgaataaagatatgtcattattgtatgactgttgaaacagtttataattatcttataattattgtatgactgtcattattgtaagaataattatttttgtacgattttttttcgactcatgtagatggatcggcaatggatgtacgctgaccggcggtccaaagagtttattgacggcgtgcactattttttgagagtggccaaagctaacaggcaaaggggttttatttgttgtccatgcaataagtgtaagaatcagaaggagtattctgcatccaggactattcatttccacttgtttgagtcggggttcatgccaagctataattgttggacatcccacggagagcaaggtgttgaaatggaagaagatgaagtggaagacgacaatattccggactttgctcagtacgttggatttgaaggaaatcaaacgggcgaggaggaaagggatgctgatggtaacgacgttgcggatgatcttggtcagatgttgtaggacgccaaggaggactgcgaaagtgaaaaggaagcccataaattggacaagatgttagaggaccacagaacttcgttgtacccaggttgcgagcaggggcacaaaaagttggataccactctggagttcttgcaatggaaggcaaaaaatggggttagtgacaaggcatttggcaatttattgaactcgtcaagaacattcttccggagggaaacaaattgcccgagacaacgtacgaggctaagaagatagtctgcctgctaggactggaagttcagaagattcatgcatgtccgaatgattgtatcctatatcgcggtgaggagtaagagaacc

SEQ ID NO: 14521 - DNA, 7486 bp, Oryza sativa
ttttgagttgatatttccaccttcatttttcaatataatgacgcatctgctttgtcaccttgtgaaagagatcagtattctcgggcctgtgtacctacacaacatgtttccttttgagaggtacatgggcgttctgaagaagtatgttcgcaaccgtgctcgtccagaggcaagcatcgccaagggttatggaacagaggaggtcatcgaattttgcgtagaatttatcgaagatcttcgcccaatcggggtacctgaatcacgccatgaagggagactacggggaaagggaactctcggaaggaaagcaataatgacggtagacaacaatttattctgtaaagcccatttcacggttctgcaacaatcttcattggtagctccttacatcgaggagcacttggctctagttcacgccaggaacatcggtaagtccgatgcatggattacacggcatcacattgatactttccccgcgtggatacgacaacatctcatgggtaacgattcgatcaaccaacaacttgccttcctagcaaggggaccgtctgggttgattgcgacattccagggatatgagatcaatgggtacacattctacacgagagcccaagacatgatgagcacgaaccaaaacagcgctgttcgtgtcgatgccatgggacacgatggaacaactggcacgtattacggtgccatcgaggacatatgggaacttgactatggtcctctcaaggtccctctgttccggtgccaatgggttaggttgactggtggaggcgtaatgattgatgacagtgggatgacaacggttgaccttaacaaggttggatactcggacgaaccttttgtccttgccaatgatgtaacacaagtctttttcatgaaggacatgtctagcaaagaaaaaaagggtagagggcctgacgagcctaagcgtcacgtggttctcccaggcaaaagaaaaatcatcgcagttaaggacaagactgacgaggattacgatcaggtggatgggcaaccccctttcacggtgacgattaaccctagcatcctcctatcaaatgaagacaccccttactcacgtagcgatcacaaggagggaccaatagtgaggagaaagtacgtgcggtcaaccgtcaccgccgatgtattgccgtaattattgtgtacacgatgtaaactattttggatgtattgattatccatataaatcaattgatgtatggcatatgttaattacgcacgattattagaggttttaacaagtttaaatcatgtatatgctagttatatgcgatacttacaatttttaaaagttttaaatcacgcaggtggcaatttcatatgttaattagagtttttaacatttaatttactatcattcatatgctaattataactactagagaatttttaaaagtttcaaatcatgcatgtggcatttacatatgttaattagagtttttcacaatttaatttactatcattgcatatgctaattatatatgactattcgaatttttaaaatttttaaatcatgcatgtggcatttacatatgttaattagagtttttaacaatttaatttaatataattcctatgctaagtatatatgatgattacaatttttattaattttaaatcatgccgtatgtatatacatatgttaattagagtttttaccaatttaataatatcattcatatgctaagtatatatgattattagaatttttattaattttaaatcatatatttgcttattacgttttatccacttaatttattacagacaacaataatttttcgaagtaattgtcattaatctttgtactttaaataattgtaatgcattatcttctattttagaaacacatatgtaatggaaaataatattcaatgcgcttatcagtagtcctggttcttaaccctaaccgggtttaaaaagaatttggaaatagcgggaaaagatctttagtcccggttggggacatgaaccgggactaaagatctagggctatatatattcccgatgcgcgccctcgtcttctccaccaacacttagaagtttttacccgatcgatctctctcggcttctccttcgccgccactgcctagggcatccccgcgccgacaccgccgccgtatctcgccgtcgtctcgcgctcgtcgtcgtcgccgccgcctctgcctccttctccgccgccgcatctctggggtgagagccaccgcgcgccgcctccctctcgatctctctctccgatctcgatctctatctctccctctcggttgccgccggccgccgagtttcagacgccgacgccgacctcgtcacgacacgacgccgcgccacgagacaccgcgacgccgcacgccgccgccgcgccacgccgatgccgcgcgcggcgccacgccgccgccgctccgctgccaccacaccgccgtcccgctgccgccacaccgagaacgtgaacgagcgaatgagcgaacgaacatgaacgagaacaaggtgaatgaacgtgaacgagaacgagcgaacgaacgtgaacgagccaacgaacatgaatgagaacgagcgaacgaacgtgaatgagaacaaggtgaatgaacgtgaacgagaacgagcgaacgaacgtgaacgagccaacgaacgtgaatgagaacgagagaacgaacgtgaacaagaacaaggtgaatgaacgtgaacaagaacaaggtgaatgaacgtgaacaagaacgttgtcggacgaacgtgaacgagccaacgaacgtgaacgtgaaatgcaattataggcaggttaatgaacgtgaacgaacaaacgtaggtgaatgaaacgtgaccttaacgagaacgcgaacgtgaacgatatcgtgaacgaaacgtgaacgtcaaatgcaatatatgttacttcgcgtttatcctaatacatctttttgtatcttgcagaaaagacgttgtcggagtcgtccctcaagccggagtggtagagctagccctcgaaggaattcgcccaggcaagtgacgtaattatatatatatgattgttatatttgtaatgcaattaagattattagatttataattagacttaattaacatataagattgtgtagtgttctaatatacgacagttacacttagaatacatgactaattgagttttagtataagattattggagttttaatataagattattatatttgtaattagacttagtatataattattgactagctagggtcctataatatacgtcacctagacttagcatatatatcactatttgagttttagtatatgattattagatttgtaattagacttagcatgtaagattgtgtagggttctaatatacgacagttacacttagcatacatggctatttttgtcttagcatataagattatttgagttttaatataagattattatatttgtaattagacttagtatataattattgactagctagggtcctataatatacgtcacctagatttagcatatatcactatttgagttttagtataagattattagatttgtaattagacttagcatgtaagattgtgtagggttctaatatacgacagttacacttagcatacatggctatttttgtcttagcatataagattatttgagttttaatataagattgttaaaacataaatgtctcatgacttagcagatgtttcctgtatgaaagatggctgatcgcaatgatgaacagatattgtacgattcaatcgcggagggaagaagccagtactggaacgaagaagagggaaacgaggatccaaaccagtatttgaacgaggaagggaacgtggagagagatgcggaggggaaccaggaggagcacgtggaaagggatgtggaggggaaccaggaggaggaggctagtggaagtcaaccctccgttggacagaggagggcacgtgggcatgaggtgccgcgaagaagcttgagggtcggcacatcgtaatggaagtggaagaagatggacgacctagtgccccggcagaagccgccaagaactatgtacgtcacagcggttgggttgtgcgggataacgtgcctgtcagtacggtgtactggcgaagaacaagggcacgcggagatcatgagagctttgtcctagattcggagaaagagatgctgtggaccacaatgctcgagacattcacccttcccgcgggtacagaggacaaagtgaaaaagtggactctgaagaaaatgacagaacagtttcagagtttcaagggagagctgtacaagaaatatatcctgaaggggcagacaccgaacttcgacacattcccaaagctaagggatcactgggacgagttcgttgcatataagacagtgaacaagggcaggcgatgatggaaagaaacaaagaaaatgcagccaagaagaagtaccatcaccacttggggtcaggccgctatagcgtcgtgatgccgaagtgggaggagatggaggctagcttgcttgagaggggtatcgaaccggccaccgctaattggccggaacgatcgaagttctagtactatgcttacggtggaacgctcaacccagctgatggctcactggtcttcggcgatcagatacgagaggctgcgcgtcgactaacagacgcagtggaagcctcttctcagggcacgttccgaccagatagagagagggacgagctgtcactcgccctgcagactccagagcatccaggatgaacacgagggaaaggggtgattccttggaagattaggttcaaggaggacatccacacgtacaagagtcggatgaggagcaagagagataccgaggcgaagattgcagatcttgagttcagggtatcgagctacgagctcagcatgcaagaggaggtggcaaggaaggttgatgaacgcatggccgcacatcggtccaatgatccctagccgaccattcctcctgcaatggtgagcccgtcaggaaaccgtagcagctgcgcctcaacggggcaggtaggatcacagagcatggacgccatgcaaacccaggacgaatccacctgccccgttgatgacatcactcaacggacaccatgtgagctgcatattcctttcaagaacttatcaataaaggtaagctcgtagtttatatattttagatttgcccattccgctagttgttgcttatatatgttgattactaataaataacctctcaccacatgaaggtggcgtcgggcatagccatcccaacggacccttcaggtacttaccactgcaggccgattccagcaggatactccaaggtcgaagttgagttggtcgaaggaacgtacgtggacctcaagctggattaccctggaggagacggtgagacgcatctacgagacacaagccatgccattattctatggcgcaggcggtacatcatcctccctgggcgacaagcggcgtctcgtgcaccatctcctccggctccgccatctcctcctcaggatcctgcaccgtctcctcctcatgctccagcaccgtctccacctcaggctcctgcaccgactcctcctcaggctcctgcaccgactcctcctcgagctcctacaccgactcctccgcaagctcctcttccggcaccttcaaagtcaagggccccccaagctccaccgcctgcccacacaagggcaacgaagaaggcgaaagctgacgccgccaagaacaaggacccggggtacgattgcacgcaagaggagcttgacgcttacatggcatcagaagtcaagagacaattcaagcctcgaagtccagaaaagaagattcctatagacccgagtgtcatgaacttcttcaggggtatgtctgcacctgccaaggaggccattaagctatcggactatgagcgaacgctgaagaaagcatcttctggaaagtccaaaccagtccctcagcttggagagcaaccaaaccaggagattgagccgttagtgaccggtaaagaaatgacgatagaagaatttattactgacaccggtctaactacggatcaattgctaggagtcgcaccaatcgaaaaggcggaagtgaaatacatgtacgaactcggtaaaccgcttgtcaagcctgagctctgcagtccctacccacacaaatgtacaagttccatcagctgtacatggagatgagcgccactggtagagagatgatcggagcgaggatcagggacatggacttcttgcaaggagatgacattctctggatcaatttcaagggaatctacgaactataccaactggatgccctcgacgtctctattatgagttgctggattttgtaagtatatcgttcagatagattcttaatacgtctcctttaattaattaggtccttgtatataagtagactatagaaaataatatactcccttttatcgctgtagaatggagattcaaaaggcccgacggcggggagttttcgatactggattcatcgaccctcggaaagtaaacgtcgcaatgctcgaccaatatccgcaagccacagaggacaatctcgtccatctcctgaaggtgcagcattacaagatgttcatactgttgccctacaacacagagttagtttaattttactgtcttcctataccaaatttcattcccgtacgaacttgctaagtgtttcatatgtaatgcatcccacgcacattgcagattccactgggtgcttttactcttcgacctgtcggcctgcaccgtcaacgtatatgactcaatggataaaaaagagtctacgtttgacaaggttttcgaacttatagataggtaccgtcataagttcctctgttaattaagaaaatcttgttatgttaattgctactacgaatcatagctttaaactccatgtagggcttggtatcggttccgtcatttggattcatcaacgaacaaatctttgatcccaagggtgaattctactacgacggaaacacaattcataggtccttagcttgtgagctagcgactactacatcgaaatcgtagctagctaggacatataatggattgtaattaatacatgactacatatgtttctatatgcatgtgtacacattttctataatgtaaatatattttggtcatacacacacagatgcatttgcataacatatatatgtataaatacatatatattatgcatgtacatatgtattgaaacatatataaatataatataatatatatatgcatatattatatatgcatatatgtactgaaacatatatatgcatggtttatatatatataaaccatgcagcaacagggccatgaaaaaaaaaggtcagctcgatctttagtcccggttggtaacaccaaccgggacggctgagacatctttagtcccagtgggggttaccaaccgggactaaagattgatcgttagttacggttatttcacccgggactaaagataacgatctttagtcccggattggtag

SEQ ID NO: 14522 - DNA, 3096 bp, Oryza sativa
aggagtatctggtgaagtggtgaccaacatagcataagtcgcttccaataatcatgtcatgccagttggaacacatacgagatacgacatcgcgggtcccgttggtatcgactgggtaactactggacatagtacaagtaggaccatataatgggatctagctacaatacgatcaatcaatatgcgcgccactagccaagtagccattgcacacaaaagaaaaacttttctggaattctgcgtgttttcataagcttgccgttcttctttacgtctgggattagtgatctagagtatacatcaaaggacggtttgttttccatctgtctagctatccacattacacattcatatactatactgctaattgtgcttagactaacactagatattgtcccaccaatacggatgcgataccaccagcaattattaccacaaagaattcagcgtcgacgctttgataatttggtctgttgagacttgagacggcgactgatagtgtgctaatagctccaataattgtataaagtatacgatgaatatataacagaggtgttgatcggtacgtatgtactatgacagtagctagagtttagtctttagtgaggacatcgttttcttgtattattaggttgaaatctaatggggaggcgagtggccagcaaaaccaactaagctgtgggcctgtggtgctggcacctccaaattgaagtcgttgccatctctctcaagaaggggcggatctaggaggattaataggagagtttaaacaaactatataaatttatagccccctcttctaatgaatgtatggcagaaaattttagtggggtctttatggggactcccatgattacaacacaggtagtgggagctcgagaccccatagaccccatggtggatccgccactgctctcaagtctcaagtggaggagatcgatgcagccgccgccggcgtgcggaggagggcttttactgcgcccggaagctgtaggtatcagagacagttcggttgtgtttagtttcactggcaaaaaaaattgtcaggtcacatcaaatatacggacatacatttgaagtattaaacgtagactaataacaaaacaaattatataatccgcatgtaaactgcgagacgaatttgttaagcctaattaatccgtcattagcaaatgtttactgtagcaccacattgtctgatcatgacacaattaagcttaaaagatgcgtctcgcattttacacgcaaattgtgtaattagtttttttttcaatatttaatactccgtacatgtgttcaacgttcgatatgacagggaaaaaagatttgccagtggatctaaacacccccttcctccgttccaaagcacaagtcggttggagcagctacaacaacagattataagtcagctatgaacacatatcgagataaaagagggaagagatgagtagcggactacagatttgtagtcagctgcagtacagactctaagacgcaatgtatatatgacaagtgggaccagacattaatagtgttgtatatgtttataggtaattattgtatgaattggatattaaactgatttggatctaacaattgactatactatttaaacttgctcttactaaaatcatacgaatagcaaatttattacggattttctcagctgatttctccagtgatttagattactaccaatgatgaacattatatcatagttaatgagctaagtacgccaccgatgaccatattaattttttcagttttctgacctggaccactaatgattgcctagtgtagagtccgtacacaaagtacacaacttcgcgtggctacccaaccataacgaacctgacaaatgtcgccactgctgctgctgcttctcttccaatctgcttatgcaatactcacatgattagcctagcttcacctggaccggctcgaatgctcgatcgctgtttcttcaaggtacttattctattatgaatacggtatgaattatgatcaggatcagctaactgaagattctgacgattattctacccttcttggccgggcacttgcaatcgacaagttgctgatgctctgacctcaacttttaatagaagtttttccaggaaaaataggcgaaaatgattgttttgattatcgaacattataatgactggattgcatggaatgtgttgcatatttgtaaattgtaatcggggatgcatcatgcatggaccgttgatcagaaattcagtgtcctttctgaacttgaaaggacgcgtatggtagtacacagtacgtgtccgtaagtccgttgtacgtactttctactagtattagcttggatggtatatgcagatgcatgccgtctcgagctgattaaactgctgcaactgtctcctacttatttccagtttttccctgaattattggatcgaatggtgtaactgaatactcgatctgtcgatcagtaaaagagagagcagtttattccaaaccggccatgtataagctagtgtacttgtctttactgcttcttctactaacgttgcaaggtagagttttggattattctggtaagtagtaaaaaccattattcagatggttttgatagattaaggggtgagttctgtctgataaatagtgataatagagacgaaaagcaaaccacataaatatagtagggactaaatacgaacatcttgctaactttaattcttcgtgcaatcccctgttggtagcatcctacgtacaaaatcgacgttttcatatgattctttcaatgacgcagccaaattataggatgagatcacgagattggctgtgtgcattctctcatgaatgtagaggccgagtttcttaatccattatcttaaaaatgaattataggacgagaattcgagcagctgattggttcctctccactagttgcgtccaataatgcagcgttttcccagtgcaatgatgcactttgttgactgatccaaatgtcgcctgtcaggcagaggattataccgatccaaggaaccactcacatggtcaggttgtacggctgatttttgctattgttcaatttggggaatttttttagggttagcctactca

SEQ ID NO: 14523 - DNA, 3324 bp, Oryza sativa
caatgaggctgatggagtggaggattaggtgtagccttggtcaagctgcctgtggagtggagccgtctgcgccgtttatttattttccgctgcttagatctttattgattgagaggaactatctacctctgtaatgacattttattcgcttattaattagagtaataattgtactctattatcaatttgttattgtgtgcctcggctgattcctggacgagggttcacacacatgtaagcgtttggaattttggatagaaattccgggcatgacaagttggtatcagagcccctttgaccctaggttatgccaaatggttatccatagaagccctctaaaaatattggaaaagtagaactgttctcctccctttctcttttaattaaaccaaactaatggcacatgcacttcataatctcttttaatggttctcattaaaaatttattccagtgttattagtactgtacatctattactgtactaatggctcatttaccagcaaaagttttacaatactgttttatttaatcttgctgcaataaaataaatttagcatgttgattttataattttctttcatttcttttgaaaccagttattcaaaattacaaaatttgtgacctcgtttccaactgttttaacttatctcgcaaagcttggtttactttatttacttacctttttactctgattttctaactttattcaaattaatcaaaaaacttgtgctattaattggataaaggtcttaactccctcctttcacttgtctttagatgccgcgttacaagcctgagtacctgtttggtgttgagggttttgtccaggagttgcgttcgatgtcctttgtcattggatttgggactgcccctttttatgcccagattcctcatgatcgtcatgaagagaagtgccgagtcaaagtcaccttgaacagtaatagtgaagatatccccttagtgatgtttgaagctggaggaagaaactacatccatgcatgtcaggaggtggcaaggatcgccataggagagctccgtgatcgctacagtgatcaattggccgacactgagtatcgctaccatcctcgtcaaccccagggaagtgaccgtggcagctatcttgagactgaaggaattgagaatgatgctaccacgaagcatttggttgagatgttgtgggctatggatgaaagtcgtgcggagactgtgttagccgctcaagatcgtgaagaccggaatcgtggtaagatttgtaagttagaagacaaggtggatcgtttggagaaggaattagccgcattgaagggagaagcaccgccgcagaaggccaggattcgtcttaccgcaaggaagagagctctatttgtccctcgctatcaactggcgccaaaggttcgtgtggtggagaaagaagttgccccagctcaagcggatcctccggtcatcatcataagtagtgatgaagaagaagaatccaagcgcaacaattccaagattgagtgggtagcaactcaagatgataaagacgagccttcaatcgacctccgatgcttggaagaactagagtgacttgttaagtcgttgtcttagatcgttgtgttagtttgcttgcttaaagtttgcttgtgtgtggctcgcatgtgatttacatcagtggtgggatgtaagtgcatgcgtttgtttgcttttgagtgttaggaagttggtgagtttagtggtgtgagagtctttagtttgtaataatgaaactcagttaagatcaataaaagttaaagtaattctctgtcctaagtagtttccccggtttctcttcttgtgccctgtccatgccaatggtgaacactcgcagcaacgggaatggtcccaacaaccccaataacaacaatggagagaatcccattctggcccaagttcttgctcaacagacacagcttatgaacatgatgatgcagcaatttcagaatcaggaaaaccaaggaaataaccatgcacctccccagaacaagttagcagaatttcttcgtgtgaggccacctgttttctctagtaccactaatcctgttgaagctagtgattggctgcatgccatagagaagaagttggatttacttcagtgcactgatcaggagaaggtctcatttgcatcacatcagttgcatggccctgcctctgaatggtgggatcacttccgccttaacaggactactgctgaacctatcatttggcttgaattcaccgctgctttccggaagacgcatataccatcaggagtagtgtctctcaagaagaaggagttcaggtcgcttacccagggatctcgctctgttacggagtatctgcacgagttcaatcgtcttgctcgttatctccggaagatgtgcgcaatgatgaagagcgccaggagagtttttgggaggacttaatgatgagctttcttacccactcatggttggagattatcctgatttccagaaattagtggataaggctattcgtcaggaggacaagtacaatcgcatggagcagaagaaacgtcggattgctcaattcaagacacgacagggaaataatcagaagccgcatcttactttaggaccccagcccatgccacagggaggttcttcgtctgttgttcgtccgcagcgtcagttcttcaacaacaatgctggcaacaacatccgtaatcaaggtccacgtcctgttgcagctccagcacagcaacaacctgtcaagagggagcaaggcagcaagcccgtggtgtgtttcaactgtggagatccaggacattatgctgacaagtgtccgaagccccgacgcgtgaaggttgtccctgcccagaataactctgctgtaccagcatccaaggctcgtgtaaatcatgtcgctgctgcagaagctcaagatgctccagatgtgattttgggtacgttccttgttaactcagttcctgcaacagtacttttcgattctggtgctacacattcattcttatctatgagttttgtgggaaatcatgggatggaagtagaagatcttagacgtcctttgatggttagtaccccaagtaatcaagcactctctttgcaacgtagcccctctgtcagaatagaaattcaaggagtaccatttctggccaatcttatcttgttagaatccaaagaccttgatgtcatcctagggatggactggttagccagacataaaggtgtgatagactgtgccaacaaaaaagtaactctcaccagctatgatggtcgagttgtaactgttcatgcattgtcatctgagtctttaaggtcaagactgaaccagataactttgga

SEQ ID NO: 14524 - DNA, 746 bp, Oryza sativa
ccaccatgatcactgtctgagccactttctgggccatcagaatacttgtccttaggagcctttcttcggggcttatcatctttagattcattgcgagaactatttgtagatttcttcttcttccgatcatagtcgctgtccgactcactgaacgaaccatcaccctccgagtcagtatctgaatcatccatgcgcttaccctttctaggcttttcatcttctgagtcatgtcggcgagagatcgtggcaggccttttctttctctcatcacgatcgttcttgccatgttttgttgtcttcttgccataatcaccatctgatcagactctgaatcatggcgagagctctttccacgccttgcattcttatgatcactctcagaatcagactctgaatcatggcgagaactctttttacactttgcattcttatggtcactctcagaatcatcatctgtatcatggcgagaattcttcaagtgtttactgtgcttcttttcatcatatttagcctcagaatcatcttctgaaccatagcgagaattcttcttcttcttcttgttatcatcatgatctgaatctgaatcatgaccaagtttaatcttcctagaacttttgccatgactctttgcatcactccctttatccttcttacccttctttgcatgccttctgtcatcctttaaagtcttgccatcttctggcccatctatttccaaaccttcatactcctttccaagaacaagc

SEQ ID NO: 14525 - DNA, 657 bp, Oryza sativa
ggttagtgcaaagtcaaattgaagagttaccacacccaaaatgggcagtccctgaatcctcccagagtctctctcctccagcctccttggcttctcttgagacaattggtaatacttctccaactcttgaacatgtagaattacctcttgcacaacgtagagagactagatccaatgctggtagacctcctatacgtcttggttttgagcatcttagttctatgcatgacattgcaaactatatcacatattctcatgtttcaccagcatacaaaacatttattgcatcattacagacagtgcctataccaaaggattggaagtgtgcaaagcaggatccaaagtggaaagatgcaatgaaagaagagttgaatgaccttgtgaagaataagacttgggaacttgtaaaacttccaccagaaaaaagggcagtgggatgtaagtgggtctttacagtgaagcaaacccctgaagggaaggtggataggtataaagcaaggttagttgcaaaaggctacagtcaaacatatggaattgactatgatgagacatttgcaccggtggcaaaaatgggtacagtgagagctttggtatcttgggcggtgaactttgggtggacccttcatcagcttgatgtgaaaaatgcatttctccatg

SEQ ID NO: 14526 - DNA, 1098 bp, Oryza sativa
cgtcgatcctagtaacgtggatccgtaaccaattggaagcaaccaaagacagtttcagagattcgcagtttcctaggcctcgcaggatattatcggaggtttatagagaatttttccaagattgctaagcccatgacacgactgcttcagaaagatgtgaagtacaagtggtcggaagaatgtgagcagagttttcaagagttgaaaagtcgcttaatatcagctcctattttgattttgcctgatccaaagaagggttttcagtgtattgcgatgcatccaaacttgggttaggttgtgttctgatgcaagatgggaatgtggttgcctatgcctctcgacagttacgtccgcatgagaagaactaccctactcatgatattgagttagctgcagtcgttcatgcattgaagatttggcgtcattatcttttcggtactcgtacagaagtgtacaccgatcacaagagttaaagtatatctttactcagccggatctgaacatgagacaacggagatggttggaattaattaaggattatgacatgggaattcatgatcatccgggaaaggctaatgttgtagcagacgctcttagcagaaaaggctattgcaatgctacagaaggacgacagttgccattggaattatgcaaggaatttgaaagattaaatttgggaattgtcggtagaggtttcattgcagccttagaagcgaagcccactctaattgatcaagttagagaagcccaaattaatgatcctgatattcaagagatcaagaagaatatgagaagaggaaaagctattggtttcttggaggatgagcaaggaactgtatggttgggtgagagaatctgtgtccccgacaacaaagatctaaaagatgcagttttgaaagaagctcatgatactttatactccattcaccctggtagtactaagatgtaccaggatctcaaggaaagattttggtgggcaagtatgaagcgtgaaatcgcggaatatgtagcagtatgtgatgtttgtcagcgagtcaaggcagaacatcagaaacccgccggtttgttgcagcctttgaagattcctgaatggaaatg

SEQ ID NO: 14527 - DNA, 803 bp, Oryza sativa
taacttctgaaaccagaatcttgctcaatggccatgaaagtgacagcttcaagccggcgcgaggactgcggcagggtaacccgttgtcgccgctactctttgtccttgtcatggatgcgctgcaaggcttgctcgccaaagctacttcctgggggcttcttgccaagctggacactcgacgttccatcccaaacacatccatttatgccgatgacaccattgtgttcctgcaaccaatcgagagggaggcaacagcggtaaacgccattcttcagcttttcggaaaagctacagggctcaagaccaacctcagcaagagtgctttgacgccgattaggtgtgatgatgatgtgttggtcggagttcaacagctgcttgggtgtagggttgagaatttcccgatcacttacctcggtcttccactctccctgagaagaccgacgaaggcggaagtgcaaccgattttggatcagctgtccaaaaaagtggccggctggaagcccaaactgctctctcccgacggccgtctgcgcctgatcaaatcggtgctgaccgcgctgccagttcatttcatgtttgtgcttgtgctgccaaaatgggcaatcaaagagtttaacaagaaatgctgagcgttcctgtggaaagggcaagaggaggttaatggcggccactgcctagtggcttgggatatcgtctgcagcccgaaggagtgcgggggattgggagtaaaaatctggaattatttggccaagcgatgcgaatgaatggctcgctagacgattggagcaaagaggaaggccgtg

SEQ ID NO: 14528 - DNA, 3362 bp, Oryza sativa
accggcgtgtgatcgcctgatctagctcggtcaaaggcgtacgtggactacgagtgtgaagagaatatataaaacgcgatcgagtacgagttctttcttccttgcagctttcatggcgctgctagcttcctgattgcagtagcagactagctaggccgtttgatgacgacgcatgtacaggacggccggcaataattaatggacaaggccagggaccaaaaacgtttctccccatattttccagaatggtactatcaaattaagtcacactattcagagctcaggttttatttcggttcatggttaagggtgtactcttctgttttgtttttcaacttctactttctagttgttgtgcgcacgtacatttcccaaaccgttcaataacacgtttttttttttgcaaaaatgttactatataaaagttgtttagaaatagaccatggtacctttctgtttattctgcgtgccgagtagaaaagatttccaaccctcttaaaaaacacgaccttagttgtcagccatgtatccagattctagaatatagatatcaacataatgcatagtagtagtaattactccctccgtctcaaaataagtgcagttttgcactattcacgttcaacgtttgaccgttcgttttatttgaaaattttttatgattagtatttttattgctattagatgataaaacatgaatagtattttatgtgtgactaaatattttcaatattttcacaaaatttttaaataatacggacagtcaaacgttaggcacgaatatctacggctgcacttattttgggacggaggtagtaagtagtaacacgcaggttttgattggttcgtggttaaagtcgtcaggatctccacggcggcgtaggatagggtcaaacggtcggtgaccggcgttcgttcgctttgtcatcctgagctcagccctcgggactctgaatagattgggaaccgggcacgaaggctgcgagagcaggtacaatagatagccagctgcttttgtccaccgctaggcctcgtgccaaacctcaccgcacgagctagtggcagatcggcaatagccagcctgcggattgaccggttctacacgagagtccgggctaagctcgatcgatcggtcggggacgttatggttgccaatcaattcgatcaggaaccgtccgtgacgcacgcgacgcgctcgcgcgcgtttccgtttcctccctcgcttcccggcggttggatcacagtggttagttggttatacgtagtgattcagcgcgccgctcgaacgtcaggtcagcgcgagccttcgaggtcttggagagcagatagatagatgtgcaatggcgcaatgctcacgtacgtggatagcggagcgcggctgacctccggacaataaggccgtggcccgtggaaaattggggaatggctgtgctcatcatatcgtcctatcctatctccgaatgattgaggaagggtatatatgccattggccatcatgattaaaaaaaaaaaagaggctgcagaccatcagcctatagtgttgtggtctcttgtgcgccgttggattggatgagatgattcggatggatcatatactgccgcatctgttgcctaagagcatcttcaacagcctctccattctaattctcgaagctaaattttagctattttagctaaaaaaatattctccaacagcctctccaactggatggctaagccatatgtctggccaaaacattccctccactagccaaatttagctagccaaaagtgccgtttttttgacaaattgacccttttcaaaaacttaattcgaaactaacccctgccataaacttcaaccaaaactaggccgtcggctcagcgccaagcgcattggcgctgaggttggccgtgtcagcgccaacgggactggcgctgacattgtgccaccgtggcggccgggccgatcccctagctgacgtggcagctacctcagcgccaaccgcttcggcgttgaggtgcccaacctcagcgccaagtaagttggcgctgaccttggctacttagagcccggccgaggccgccccagccagttcttcctccgttttttccccagccgcccgcctagggttcggtcgccaccgcattctcctcgcccaatctcccccaaaaacctctctaatcgaaggtgatttgtgcggcattgagtttgggatcggaagagaaggtaaacccctctataaaccctaagttccccaaagttttattggatattttgcattgttttggttgtagacgtggtttgataatagttggctaaggatggattattagatggataatatgggtggggatgaagtgtggaagtggcatatctttatccatttggttgttattgatacatttgacaaaatatatttgggatggatgtttggtgatgcactagggtttgatgggagatggatgtgtggtgatggcctaggatgtgggatggatttgtggtgattgagagggtttgaaaggggttgatgtgtggtgaagggtaggtaatttgtaggagtagagttttttttttatcaataatgtgtagtatttgagtaatgtacttatttattggaaaattagacatgttgttagcttttgaagtattggtattgcaatggtaattacatattattttcaagtaattaatgtttatgcatgggttaaaaattgtagatggatagattggtccggcttcattatggtggttgtgtggtagatgaaagtacacatggaagccaatttgagggaatgacagttagacaattagtgttttttgcgaagcctacctttgaggagttaatgtctcgcatcaagcatgaattggattggaatgatgagtcggttggtatgcaagggagatacgatgtgggcggcggtgtcatgtcacataaatttatgttagacttgaatggagagatcgaatggcaaacatatatagatatagtattggggtcacatttcaaatctcttgaggtgtatgcatggaagaaagatggtaggatagggaagaaagaacttatagaccttaatgaaagtccactcatagaatcacccattaactgtcacgaactgtcggagaggtgtagtaggaaggaagaattgattgaggaagacgtggaggggggcgagggagtaaatgatatggcggatgtggaggtcagggaagagaatgacccggtaagggaggaagtacatgcagaggagaatgtgccgttaagggaagaagtacatgcagaggacaatgtgccgttaagggaggaagttaatgtggaggagaatgtgccggtaagagaggaagaagatgttgaggatggtcgggaggtaggagatgatgt

SEQ ID NO: 14529 - DNA, 4853 bp, Oryza sativa
gaagcggagggcgtccacgtcagcaacaagcatcacgttcggccaccagccgcaccaccaccacggcgggcgccaccaccgccgggtacgagcctgacatggaagccatggcgcaggtgaaggagatgatctaccgggcggcggccatgcgccccgtccacctcggcacggaggccgccgccgacaagccccgccgcaagaacgtgcgcatctcgagcgacccgcagacggtggcggcgcgtctccggcgggagcgcgtcagcgaccgcctccgcgtcctgcagaagctggtccccggcggcaacaagatggacacggcgtccatgctcgacgaggcggccagctacctcaagttcctcaagtcccaggtccaaaagctggaaaccctaggcaccaccaccaccacgtccaagttaccgcagcagtattacagcggcaacatcaacagcagcaataatcaccatggattcctcggattcgcagcaaataacaacaccatttcagctggctacgcaaattctaatgctggaaatgcaacgaaactgttgtagcactgtggctagcacaagtacttgatacgcacaacgtacgcgtggtctcgtcgtctatatacatgtagtaacatgctgctgttttctactgtttctaggcttggtggtgatcagtgtacgtacacacggcacataattggagtcttaattagtggtggagtgcatgctgatttagttcgtggtcatgttcttgtgcaagatttagatttataatcttccgctggcggatcagctgcatggagtgagaagttacatcaaattaaaggggccatctgatggttcgttcaaaaaaaaaaaacgggtgccatctgatagaggaaaacatgtggttcaataatggaaaagagtggcctggacgagcaatttgcgagtgaagatttttagctttcttttttttcttaatttatttatgcatgaactgagtgagtttatcgccactcgaaagtatatagacgtggatcgagtaactagtacatggatattcagatttgtatggttgttgcgcaacgagacactatatataagataatataattaattaaccgtccttaagcttcgtttctatttcacatatgtttaccccgcctccatttttagagttactgtgttagagtataattaagtgaatcgattgtcgttcttaatcaacctaaggtttcagggacgaagtgctaattgagctgttcatatataactcgatattgcgcatgcaagtgtgtcaattgtgctgtcacttactaagctactgtagctgattcgatctctccatatatgtatcattgggtgcatcatgtcatgaggctgcaaatcttgggctgttcatgcttgtgcagtagtggtgaatctttgtgcttccgattttgggcatgataaaacgcttttcctctcagcttttgtgtcaacgcaacgaaatctcaattattccaagtgcaaaagagaaatagagatgtaaaggcttatatacttttttagaccaaagaggagctatcttcttagctagatgctatactatgcctctctatccatctatctatgaataaatatcccttctttttatcttatctatatatctgtatgatggggcaggctttctgcatgctgatgataaaaagtttgggattaaattaacacggaaagggccttttgctaagcacccctttcctccttgcaaatgaccatcgatgcactgcatgcaacgagcaggggaaaaccctaggcactttgcagttctgcatgcatgcatggatctactatcattcacatttcacagccttcgtcgtcagtaaaagctgcaggtcggtgaagtagtactactagtcaatactcatgcaacggtgcatgatgtagctagaataatagtagaatcatggcaaacactccatgattaaggagcccaagctaataagctagtcatgggaatcccgaatccggacacatactttttctatctcacactagcttggtctcctccggcctcttgccttgcttggaccaaagaaagaaaaagttgacgaacacagcagaggaacagtggacgaactgtgatcgaacggaggatatggtcagcacaacagtgttacacaatccttaggtattttccacatgtttccatgtagaaacagtatacttaaattagaaaattgagttacaaatcgatgaggtttcctatgtttttcagtgtctggtccgaaacgtgccctgttttctcatattttccctatgttttttcttactacttttgtaatgtgggggttgttcacagtcacacacacacacacagacacattctgtagccgcggtagtagcttttgcgtgtgccgtgccgccgtgcgggccggccttgttccgtttattcctgcgtgttttcgctttccctttcgtgtcccggaatcaaaattctttgagcagtgtgcgcctatccgccatgagagagaaaccgagaatgcccctagccgcggtgcagcggctggcatcagcagcacgcgctttttgcagggggacgacgctttcgggcctcaggtcgcagctagcgcaggagcgcaggagcgcgcgaatggccgcacacgcacgcacgcagtcaggcgagcagcgtgtaccggtgtactcgtacgtgctgcgcggccgcgtgcagcggctgcttcggttgggctgcatgccgcgcgcgccgtcccggcggcggggcgaccgatgcggcgcgcggcgcggtggccaaaagacattccctttcttccctcgcgggtagctttggggctgaagaacctgaacgccccatgcgaggacgtactgacacggcatgcagctatgatctactacaagtatgcgctcctcctgacgtctctctctatcccctcccctggactcgtgtcgacgacatggagcgtgcgccttgataagaacacccccccgaaaagccgcctccttcctctgccagcgccctcgttcccctcccctcctctcacatgcgcgcacgaattgtattttatcttctgatagtctaaactaaagacgtgttttattatcaaccatactttttacatagaaacacaagcgtcgtaacacgcacacatacacctatttctatgagcatttctaaaagactgggctgggatatcttaatattaacaaaatcatcctaccctaaatagcatctccagaagactaggccggtatatttgagattgacgaagtcaccatggccgttgtcgactaaagattagatcggcatatattgagattgacgaaatcaccctacccctataagcacctccagaagatgaggccggtaaatcttaaaatcgatgaagtcaccacgggcgggccagcatggtgaaatcaccctacccctatagcacctccggaagacgagggcggtatatcttaagatcgacgaagtcaccacgggcgcctcgttatcgactaggccggcatatcttgagattgacgaagtcaccacagacgcctcgttgtcgactgacccgatatgaggacctccggaagactgggttgattgaggaagtcaccatgggtgtcttgctattgacaggtacattgcctaccaccgaaagagtaatgagccgtaaatgcaagtaaccatgtcaagtttataacttgaatcctggtgagctgattccaccatgtgtaacctaaccagttaaacttgttatatatcatttataaacatactgccgcatttggcttattaagttgagacgatcaaattctctgtacaccatagtaagtcttaaaaaaatattaccataattaagtagtagctaaacttcttttttttaaaaaatggaccaatatgattttttaagcaactttcatatagaaactttttttttaaaaaaaacaccgtttagtagtttgaaaagcgtgcgcgcaaaaaagagagagatgagttaggaaacctgtggtaagaacacagcctaagactacaatcaaacaattgtcaaaggcagtgtagacatggtaaattatggttggtttcccaaactgttaaacaatgcgttttttaaaaaaagtttctatggacaagtttttttttaaaaaaatcgtattaattcatttcaaaattttatagctaatacttgattaattattaattatgaatctattgtttcgttatcgctttgtttttgcgtgagaagggaggggtttccaacccctaaaaaagcacagcctttgagctctgttgaatgttgatcatcagttctatggagcgtcaaacttgcatctggactgctgaataaaaccggcaatcttgaagcgagctatcgatcgagtatgcacatggggattgcacatgcctggaaaatacaaagaacaacaagctactatttattaaacctggaccacgtacccacgaccttaattcggtccaaaattcacaataacaaacaggaagcaaagtacaccacgggatataggcatggaatttatttaaggaccatccatgttggtggcaacataattgacttttagtgtattgtattattattcagttcccttcctgatcaattattcccaggaggaatctaatttgtcaaacgctccgtttctcacgagattgagagctcgcgacttttctcgtcgtgtctcgcttgtcccggttgtaacaaacaaactcgatccatcgatcggtccgtcagttccggtgcgtacgtgcatcatccaaatcaaccggcgtgtgatcgcctgatctagctcggtcaaaggcgtacgtggactacgagtgtgaagagaatatataaaacgcgatcgagtacgagttcttttcttccttgcagctttcatggcgct

SEQ ID NO: 14530 - DNA, 647 bp, Oryza sativa
tcgaccccaataagctcacacacacacacacacacacactctctgactacatggctcgagctaactaacgccggtggcgtttgcatacaatgggaacagggggagggtggggacggaggcgagcctgtagcagtggttgacaagcctgccgtcgctgaccacgggagagtccaagttcggggtgaccttccactgggaggtggagaagatgggcatacccggctccatcatattcaagaacaacctctccgcccagttcttactcaagaccatcaccctcaacaacgtccccggccacggtgccgtcgtcttcttcgccaactcctggatctaccccgctctccaagtatcgctacaaccgtgtcttcttcttcaacgacgtaattaactaattgatcaatcaatcaaccaaattataatgctattcgtaatctaatcaaacgtctagtagcttaattaattaattgactggttatatgggtcttttctgctagacttcactgccagacaagatgccggcggcgctgaagccgtacctcgacgacgagctccgcaacctgcgcggcgacgaccaggagggcctgtaccaggagcacgaccgcgtctaccgctacgacgtctacaacgacctcggcgagcccgactcc

SEQ ID NO: 14531 - DNA, 1137 bp, Oryza sativa
tcagaagcaggtgggaggactttacgctgcagcaagtgtgatctgcgcggccatacttacaagaaatgcccgaagaatgcagaagttccaagcggcgcagatgctagtccatctggacattcaagtgatggtaggcgaccacctggtgaaggaacaacaagcaggcgcgcacggccaaggcgtcgtcgcgcagcgggcgattccatggtgtaacaatgctatcgatttaggaaataaaatgctgttgtgatgtgatgagtgttcggactaaatacttctatcgtgtaatttcaattgaatgttgttgtaatgagtacctccgactattgttgtactagtagtattgcgaactatttggtgttgtatcataatgttatcgtgatgagtgttcggactaagtactcatatcgtgtaactgcagttattgttgtaatcagaaatattccgtatggtgacacttttgtttgtttgtactcttgtttaatatgtgttagtaattcgcttatgaacatttattacttatgttgaactaattatttatatgtttctgatcaatctatttgatgcaggtatggcgtacgacacaccggcgctgttgaaccgtgggattgacaggaaccaccgctcgttcctgtcagcagtcgagggtgcacagctcggcaccttccgtccacgcacgtcgcgcgagtggttgcgtgtcgacccccgtcacgttccttggtacgcgtatgttcacatttcaactcaactttgctttgtgttgtacttatgtttgaagtttgctctatacaggttgcgtgcggcaggccttctaccactttgtaggcttattgaggcggcggcggacgaccgtgacccagcgaagcggtgggatgcagaccggtcactccttgccgctctggtagaccgctggagacctgagacgcacacgttccaccttccctgtggggagatggctccgacactgcaggacgtgtcgtacctgctcgggctaccgctggcgggagcaccagttggtcccgtggacggtgtttttgggtggaaggaggatatcactgcgcgcttcgagcaggtgatgcgccttccacacctagaaccggccaacacccttcctccgtactctacagtcgggcctag

SEQ ID NO: 14532 - DNA, 24982 bp, Oryza sativa
tgaaaacacttcagtttcagctgaaggacaacttgagagagcaatgggatgggcttgtgctggtccaaatacttctggagcaggcagttcaaccacaaaggcttcaggaatcccatctgaatttcatgatcatctgttaaaaaggaggaaattgctttgggtcatccaagaacaggcatctgatcttgctaacatctgcacatctgttttggagtttgaaggatcgagagacggaatttaccttattcctgaggataaatcttccggacaatctactgacagaggcaggacatggcagcaaactttcttgaatctcctgacacgtctagatgcagcatatcgttctttcacatgtaagtgactactttttcgcacttctattgtatgtatgtttagatcaaggacccccaaacttgttcttgtgtcaaaactgcccaagatagcttgccaccatgagatgcaggcatatacaggcttcaatgaatcatcctactgcttttcttttttcggttactgttttcagtgttattctgtataagacatcagtaaatgagtgtaggccaccaaagtattgacagaatttggatgccgtgcacctgtcttagttcatcctgctttatgatacgattttctcgtgttattgtaacagttttatttctgcttgctgcaagcaggtgcagaacaagagtggaaactcagtcagttcaacatggaaagtgctgggaaaagcttgtattcagtaaccaatcagctctctgtagtctcttcgagagcaaaatctgctttaggtctgccatctactcatgactttgttgctttgtgtttcttttggttaaataaatattctttttgttcctcatagagtgttctgtctatattttcccagttaatctacaggatactcttgtgtccatgtatgaacgagcttctgaagtcactgcatcattatctgggttcaaacatgtttcacaggatcgcactgctttgacttctgaatgtggttcgttactagaggaggtacgtgattattaaatataacctttccacgcacaaaaatcttgttggaatctactgtgagtgcataggagttgctacttatgaagtcagccgtttgttttcagctgtgcaactttgtaaatgattgtgaacactttggtggttagactttagtttacgagctatatataatttagctattttacacataaatctgggaaattagatattttatctctggttttgtcaatttatgcacttatgtccctttttagttgttcatggtgatcaaatccaaatttttatctgtagttgttgatttctgggaattctttttgcaggttttggcaatagcagaggggttgcatgatgtatatatcgtgggaaaggaagctgctgttatgcacaattcaattatgtccaatctttcaaaggtttttttcactgttacgctttgttctattgcatttcctttcctagatcaatatgaacacttggtcccgcaatttgaatatttggtcctggatactcagtggcagcattggacctgcaccttttatgtgcatatgctgttcagacttccactgagaatcccattgtaatattaaggctggtatattgatatgtgttacttgtacattcccagatggccagaactgaggaatgcttgacaccattagtgtattcggattactagaaattgtttttttttcttctgaggaaaaacttttcttttgatgtttgacaggcaaacacaattttacttccactcgaagcctcattgtctgctgatttagctgttatgtctgaagcaatctcaaaggaaagagagaagaataataccagcatgcctcttattcatggaaaggcattataccaatcttacattattagaatacgggatgcttacaaaaatttagaacctctggtgcccccacttgctgacgatgcgaaggagttgcactccttgatgactaagcttggacgcctttctagtattcatgcagggagccttcataaggtacttaactaagacccagttactctgagttgccgttaattatttagagaaatcttttttaattatttgcatttcaatagcaatactccctccattccataatataaggcacaaccactttttttagatgttccgtaatataaggcatgcatgcatatagaccattaactatgacctcttctccattaaattattacttttttaaatcctccactctcatgttctctaattctattggatgtatgtattgtatttattaggatgatccaaactacaagatgataataattattttcttggtctttgggttaggggtgtgtcggtgacatgggaccgggagtattatgacttagagacttgaggcagacacgatcacccacgtggcctaaccccctcgggggggggggggggggcgggcccgagggtgatacggccgcccttctctttgtctccccgaggggtcggaccgctcccgtctcggccccgagggccgaggcgccccgaccccttgtgggttttgcgccgcgtatatggggtaggtgagcatagcggggctcacctaaccacatttattgcggtttggacgagcgcgtcacgccgcatgtaacgaagtgcagcgcgctcgtttatccggtctgtgatcagtcacagaccggtcagatcatgggttaggtggcgacaggcggtctgacgcacgcctcgccccatcccgtcaggacaagagcctccaagcactcgtccctagccggagccggcgtgttagctcctggagatggcacgttggttccggtcagatatatgccaggcttcatcctaaccattacaggcaagatattgtatgaagaagggcgaacatgcagattgttaaactgacacgtggtggacaagaatgaccgatttgtgaccggtctgacaatggtcatgtcgtcagcagacagccatgttcccacgtcgcgcctgcttccggcggaagtggaggtaggtatgggccgtcccatcagaaggtcattcggacgacagccatacaaatctccgtccattaatgaagagaagggaagtaagaaagagagggagagatggtgcatgtggtatccccttgagatataaaaggaggaccttgcccacttagagaaggaggagaaaaaaggatcccagaacgattgggggctggctcgcactttgtagcttcttcatacacagatccaccaaaacacaggagtagggtattacgcttctcagcggcccgaacctgtatacatcgcccgtgtcttgtgtgatttcactctcgcgaactttccacagaccaagagcttagaacctcacccagggcccccggccgaaccggcaaaggggggcctgcgcggtctcccggtgaggagccccacgctccgtcatctggcgcgccaggtagggggctctgcgagtgatcttctgagctctcgcactctttcgtgtgcgccaagctttttctgttcagcccaatggccgaacaagcaaaggcgcacaacctctctccgagcgttagcggtgacgatggggagccaaacccacgccgtcgagctcgtactccaccgccccctccacgccaaagtcctaggcgggaggaggcgctcgagagggtcgaaggatctgcgacttcgacatccacgggtgatggggaagggcggcgagatggggagcgtcgcctcctcgtctacggcgacggcagcacgccccagggcgcgctccaagctgcgggcgcgctcctacgtcacccgcccattgtccctgacccggagtctccagcccaacgttggctggacgacgtggccaacttggtcatgacggcacggcagcgcctaggtgctggtgggcggtcttccgccaccaagacctctggcgctgctaccaccggctccgtgtcgtcaaggcggagggcgcggcgagcggcggctgttgctcgccattcggccaccactccttcgtcagcgcctccgacccaggaagatctgcgtggggggccggatgcccgcatcgatatcgagcgccggcgtaatggccgacgtgctgcccacgcaacggagggcgcctcctcgtccggagtgtcacatcaacacggacgcggggatcagccctccgtgcccccggttggtggtgtcggctgtagagcctttgtggcgagccttcggaacgtccgttggcccccaaggttccggcccaccatcgccgaaaaatatgatgggagcgtcaaccccgccgagtttctccaggtctacacgaccgggatcgaggccgccgggggtgacgacagggtcatggcgaatttctttcccatggccctgaagggacaggcgcggggttggctaatgaacttgccacccgcgtcggtccactcctgggaggatttgtgccaacagttcaccatgaactttcaaggcacatatccgcgcccaggtgaagaagcggacctgcatgcagtccagcgaagggatgatgagtcacttcgctcatacattcagcggttctgtcaagtccgcaacaccataccatgcatccctgcacacgcggtgatttacgcgttcagggggggggggggtgtgcggcacaaccgcatgctcgaaaagatcgcctccaaagagccccagactaccgcggagctttttcagctcgcggaccgagtggctcgtaaggaggaggcatggacctggaacccctccggttccggtgtggcagcttcggccgcccccggatccgctgctcagacagggcggcgtgacaggaggaggaagaagaggtcagcccataccgacgacgagggtcatgtcctcgccgtcgagggcgcttcgcgggccacccgaaaggggaggcctgcgggcgacaaaaaggaggccgacgctcccagcagggagcgcccaaccggcaagtggtgcatcgtccacaacacttcccttcacgacctcgcggactgccgcgcagtcaaaagtttggctgagcggacgaggaagtgggaggaggagaggaggcaggagcgccgagagggcaagtccctggcggttccttccggcaatcggcgaagtgaggccaagcagaaggcccccgccgaggacattgatgacggcgatgatgacctaggtttccaagagcctggggccaccattgccactgtcgatgggggagcgtgtgctcacgtttctcgcaggagcctcaaggccatgaagcgagagcttctggccgcggcccctactcatgaggcgacacgccgggcgcggtggtcggaggttgccctcaccttcgaccagaccgaccacccaccgtgcgttgcccggggaggacagatcgcaatggtggtttcccccactgtttgcaacgtgaagctggggcgtgtcctcgttgatggaggagcagccctcaacatcctttcccccgcagcctttgacgccatcaaggccccggggatggtgctccggccgtcccagccgattatcggtgtgacgccggggcacacttggccgctaggtcatatcgacctcccggtcaccttcggtggatccgccaacttccgcacggagcgggtgaactttgatgtggcggacctcagtctgccctacaacgcggtcttggggaggcccgcgttggtgaagttcatggcggcggtccactacgcctacctccagatgaagatgccgggccccggtggccccatctctgtacatggcgacctcaaagtcgcgcttgcttgtatggagcagtgcgcggaccacctcgccgccgcgtccaagcccgagggtggcgacgagaggcttggcacatccgcccccgccgccccgaggcagcggatagtcacatgcgacgaggtcctggtcaaggaggttgccctgggcgacggcccgtccaagaccacacggatcggtggtcttctggacggcaaataggaagacgcgctcgtctctttcctgcgggcaaacgctgacgtcttcgcatggagaccggcggatatgcccggggtccccagggaggtgattgagcaccgtctcgccgtgcggccgggcgcaaggccggtccggcagaaagtgcggcgccaggccccggaacgtcaagccttcatccgcgaggaggtggcgcgacttctggaggccggattcatccgcgaggtcatccatccggagtggctggcgaacccggtggtcgttcccaaggcgaacggcaagcttcggatgtgcatcgacttcaccgaccttaacaaggcatgtcctaaggacccttaccccctgcctcgcatagatcagattgtcgactccacagcggggtgcgaccttttgtgttttctagatgcatactctggttaccatcagattcgcatggctagggaggatgaggaaaaaactgcattcattacccccataggaacttattgttatacgacaatgcccttcgggttaaagaatgcaggtcctacttttcaacgtactactcgaatttctttgggtagccaaataggacgtaatgttgaggcttatgtcgatgacttggttgtaaagacgcgcaaccaagagaccttactctcggatctagcggaaacttttgagagtctccgctccgcccgcataaaactaaaccccgataagtgcgtgttcggtgtacctgcgggcaagcttctcgggtttttggtctctgcccgaggcatcgaggccaaccccgagaagatacaagctatagagcggatgcgcccccccagcaagcttagggatgtgcaatgcgtcactggttgcatggccgccctaagtcggttcatatcgaggctgggagagaaggcgctacccttatttaagctcctcaaacgctccgggccgtttacttggacggaggaagctgaacgtaccctcactcagttgaaggcgtatctcagctctcccccagttctggtcgccccggagccaaatgaacccttgctactctatttagcggcgaccccgcaagtggttagtgcggcattggttgtggagcgcgatgaggacaatcctcattccgcgcacccccaccctgtgctggcttggcccgggagagagcagggaggagaggcccccgagccgaacggtggcctaaggcccccgacgaccggagcaggccctctgcccgcttgtcagacggtgccaggtgtccccgacccccaggatggcccgagggccactgcgggaaggccgcacctatcgccctctgaccccgaggctaaccctgtgccggttcggccggggagagagcagggagaagaggcccccgagccgaacggtggcctaaggcccctgacgaccggagttggccctttgcccgcttgtccaacgacgccaggagcccccgacccccaggacggccccgaggccactgtgggaaggccgcccctgtcgtcctccgaccccgaggtcgtcggcacagaagacaagtacgccccgcgaggccgcttggatgaagagtgccccagggacgtggcccctagcgaagaggatcggccccaccgaaaggtgcagcggcccgtctactttgttagtgaggccctccgggatgccaagacccgataccctcaggcccagaaaatgctttacgctattctgatggcctcgaggaaactgcgccattatttccaggcgcatcgggttacggtggttacgtcttaccccctcggccaaatcttgcataatcgagagggtactggacgggtggtgaaatgggcaatcgaactttctgagttcgatttacactttcaaccatgccacgctatcaagagccaggccctcgccgactttgtggcagagtggaccccggctcccgagcccgtctcagtccccgaagccagctcgggcccctcgcagctgcctcacaccgcccactgggtgatgcagttcgacggttccctgtctcttcagggcgccggtgcgggggtcacgttgacctcgccgagcggagacgtcctcagatatttggttcgccttgactttcgggcgaccaataatatggcagagtacgagggactccttgtgggactcagggtggcagctggactggggatccgccgcctcctggtgttaggcgactcccagctggtcgttaaccaagtctgtaaaggagtaccggtgctttgacccgcagatggacgcttacgtgcgccaagtacggcgtatggagcgtcattttgacgggatagagcttcggcacgtgcccagacgggataacacggttgccgacgaactcacggctcgcttcctcgcgagcccagaccccaccgggcgcctttgaagaaaggcttgcccagccgtcggcgcgacccgaccccttaggggagacgggcgcgcatgacaggcccccgatgcccgtcggagtccaggcctcgggacccgaggggagcgctcccagctcccttagattgattgcttggatcgctgagatccaagcatacctcacagataagactctacccgaggaccgcgaagggagtgaacgcgtccagcgcatctccaaacgctacgtgctggtagaagggaccctctatcggcgcgcggctaacggaatcctcctgaagtgcattcctcgggaacaaggcgtcgagcttcttgccgatatccatcaaggcaaatgcggatcccactccgcctcacgcaccttggttggcaaagcctttcgacaaggtttctattggccgacagctctcaatgatgcggtcgacctggtccggcgatgcagagcgtgtcaattccacgccaagcaaatccatcagccggcccaggccctgcagatcataccactttcatggccatttgctgtctgggggctcgatatcctgggaccgtttaggcgggccccgggcgggtttgagtatctgtatatcgcgatcgacaagttcactaagtggcccgaggcttatccggtcgtcaagatcgataagcactccgcacttaaattcattaagggcatcacagcccggtttggagtgcctaaccgtattattacggataacggcacccaattcactagtgaacttttcggcgattactgcgaagacatgggcatcaagctctgcttcacctcacctgcccaccccagaagcaacggccaagtggagcgcgccaatgcggaaatcctcagaggccttaaaaccaagaccttcaacatcctcaagaagaacgacgattcgtggatcgaggagttgccagcggtgctctgggcgaaccgaaccacgccaagccgagcaaccggggaaacgcctttcttcctcgtctacggcgcggaagtggttctcccatccgagctcaccctgaggtcccctcgggccaccatgtactgcgaggctgatcaagatcagcttcgcagagatgacctcgactacttggaagagcgaaggcggcgcgcggccctccgagccgcgcgctaccagcagagcctgcggcgctaccatcagcgccacgtccgggcccgatcactctgcgtcgacgacctcgtcctacgccgcgtccaaacgcgtgctggattgagcaagctctcaccaatgtgggagggtccgtatcgagtgatcggcgtcccccggccgggctccgttcggctggccacgggcgacggcacagagctgcctaacccgtggaacatcgaacaccttcgtcgcttctacccctaaagggggatcgggtgtcaggtttcgggctcgggccaaccccgcacccccctcgggcgtgcagggttggccgggggctaccacatatgtatattcttatttctcttatatctgtatttcaataaaagtattttcgatttcctaaaggctgtatctgtgctgttgtttccttttgaaggatcttgacttgaaataggtcactcgtgttcaatcctgccctcgggggctcgggtcggctaaaatcgccaaacggggcccagaaccgagccgtgccccggggcgtggtgaactccgggggggaatcggcaaaaacccacaatcgggtcacccataaccctcggtcaccacgctcccggcctggccagtctcgacatgtggatctccccaggcactagccccgacccgagccatttgaggactaggacctgggcacgagcccttgttcaagccaagacacaaaaggaccgcggcacagaccatcctcgtctcatacacaacaaatagaattgacacaaaaaatttttcctctttatttgattgcagattaaattagtctatacaagaagggggcccgaaggcctcggaagaagaaaagaagaaactatttaaagattggcgggggcctgggggctcactccgatgcacccgggtcgccagcctcgtcgccactgtcgcccactccgacgtcatcgtcctcctcgtcggagttgagggcgaacgcgagccgaggggccgaaccctcgaagctgtggacgatatggtcggcggcgtcccggacctgcgcgcgcgcgccatcctcggtcccgggagggaactcgtccagcgccgtccatggggagaagtcgggatccctggcttggtaactcgccagtacgagctccaccgctcctcgggcgaggtccctcgaggatgacttaatcgtcctctcgagctcctcggggagccgttggagagtcccggctatctccgagaggcgctgggcgaggcccccctggttggcggcgtacttcgcagtccgcccgctccagaggcccgcctgccggccggcgcggtctagacgggagacggcgtcccgaagcatgccgggccctacctcgcctgccaagcggagggcctcgacctccccggcggacgagtctagcgcgccctgcagatcggcgatggtgtgttcggcagctgcgaggcgggcggttaagtcgctttcgcccgcggccgccccgccgctgcgcgccctcgcgtccagctccttctcccgcgcctcgagctcagcggcccgctggttcagcgcggccctctcggcgcgggcaccttccagattacagcgcgcttgttcctcttgcgcagcctcgcggagggacaggctgtccgccagccgttgcgccgcggcctcggcctcctcgagagctcgctcccgctcggtgagcgcgtcctcgcggaggcggagcgcggactcttcttcggcacaggcggcttcgtgcaccgctagtgtgacctcccgaatagcaacggcggcctcgcgatccgccaggtccctctccacggcgcaggcacactcttccagcgccatggcacgggcctcaagggcttcttcgcgccgccgggatgccacctcggtctccgccgcccgccgttctcgggcagcggcagcgtcaaggaccccccgggcggcgtcgagctttttccctagctccgcctcccagctcccgtattgaaggcggagggtgtcctgcgcctcgttcatcacagtggtggcgatgagggcagccccccgctcctcctccacctccttggcgatctcccccagcaccttccgacgggcttcgagctctgagacgtgccggcggtgtgccttgcggcccacctccaccatggcctccaccgagcgacgcccctcttcgacacgtgcccatgcggcgtcgagctccacccgctctgcttgcaaggcctccatctgggcacttaacccgtccaacaccgtggtgtttgcgacggccaaggcctgcagaaggggttctgcgctcagtggaccagcggaaggcgtggggaagagccgcctcgaagaggatgccgcgcggcttggcccgccgatggacgtgccggactcggggatgtcccccggacctggtttgtcctgagcgtcgcacgagggagtgggcccaagcgatgcgcccgcggcctcgtcgcgagctgcttcggaagtcgtcatcgcctcggcctggcgaagtctagcctcctcccgagcggcttcctcggtctggcgagcccgggcggcctcccgagcggcctcctcggcttcccgaaggtgatccgcggcttctcgctggtcagattcccgcctccgggcctctgcggtcgccgggtcctcggcctcggactggccggacttggaatggcgggagggacgcgacgggatctcgctgaaacagaagaaagatcagaagacaaacaagatggatgagtgaaaactcgcgttgagggaatgaatacggccacgatgggcgtgggacgaacctgcgagggggtcggttaaacgaccaccttggaggggaaataaggtttccccgggatggttctgtcccccccatcttgcggggccatttcttcttccgctccccctcgggctgcgacgtcggcgtggccccctccgggcgcctgctgctggcacgcgccgccccgccccctcggggaggagatgggggaggggttccttcctgcttcctcttcccccgggcgtcggcagggcggccgctccctgggcccccgtcgcggggcccagaagcacgaccccctcccggggtagattgttcccccctgcggctcccgcccgcgccatcgtggcctcgaggagcccgctcctccgacgccccgaccgcctgcatgatggtcaggatggaggcgcggtctggatcgctgcagagggggaggactccttgaggaatgagggatgcctccacggagctgagattcagcacccgttggaccactatcttgaagtcctcaggagcccagtcccatctgactccctggtgggtcctcatacagtcctcggacccggtgtactcccaggcgccccgggcgcgccgctggagtggcgcgatccggcgacgaagatagtcaccgaacaccatggcccctgtgagcccttgggatcgcaggcccgccaggcggtcgaggacggcgtcgtagccatctcccagatctaccggcgcccgccagttggaggcctgcgctggaggctggctcggaagtcggaggcgcgcttcgtcggcgaggggggtgtagaaccagtcgctcttccagtcatcccacttcttgcggaggacgcagggaatgtagcggttcagcaccggcccccgcggctggaagtagcagccaccaaccaccgacggcggcgacaccggctgtgcggtgaagaaccaccggaacagccgaagggatgggcgcaccccgatgaacatctcgcacaggtgcgcgaagatggccaatgtcattaccgcgttgggggtgaggtgcgccatctggagattgtaaaactccagaacatccatgaagaaagaagaaaatggcggaaccagccctgccatagcaaaagggaggaagaagacggaccgccccgagtagcgtggcgccgggcatccctcgcccagcgagactatctcccggccggtggcagattccggcatgaagcggcgcggcagcccggcctgtctctcgctcacgatgcgggaaggcggcagcacgctaccgtcaagcggagcggagccccgtgccatgacgccggaagaagagatgtttgagagcgagcgcgtgtggcaaaggtagggcacaggaaacaaggagttagggcacaagcggcgaagacaaggggaataatggcgagaggaaggaagcaaatctcttcctcggcgactttatacccttgccaacgctaagcccggctcctcgtttcttgcgcccactatctgccccctcgtttctcgcgcccacgcttccactaatcccattcgcccgtttgcggtgcatgaggtggatatgcggctgtggcagtcgagatggaacatctcgtgcgcgcgttaattacgctcgccgaccgaagcgccatcaccatatctccaggcaaaacgaaccagctcgtcccgattcgcgtgttactcgagtaatgtggcagtcttgaagagactgctcattattgacagccgagtaaccattgccgatgtgcgtgatttgcgaccgttgggtttctgcccaactgtggagaccggtcccacctgtcaccaggccttaggaagtggcgtcacgcccgaccgcttccctcgaggagggcgatcgccctggcataacgccgggggctactgtcggtgacatgggaccgggagtattatgacttagagacttgaggcagacacgatcacccacgtggcctaaccccctcggggggggggggggggtcgggcccgagggtgatacggccgcccttctctttgtctccccgaggggtcggaccgctcccgtctcggccccgagggccgaggcgccccgaccccttgtgggttttgcgccgcgtatatggggtaggtgagcatagcggggctcacctaaccacatttattgcggtttggacgagcgcgtcacgccgcatgtaacgaagtgcagcgcgctcgtttatccggtctgtgatcagtcacagaccggtcagatcatgggttaggtggcgacaggcggtctgacgcacgcctcgccccatcccgtcaggacaagagcctccaagcactcgtccctagccggagccggcgtgttagctcctggagatggcacgttggttccggtcagatatatgccaggcttcatcctaaccattacaggcaagatattgtatgaagaagggcgaacatgcagattgttaaactgacacgtggtggacaagaatgaccgatttgtgaccggtctgacaatggtcatgtcgtcagcagacagccatgttcccacgtcgcgcctgcttccggcggaagtggaggtaggtatgggccgtcccatcagaaggtcattcggacggcagccatacaaatctccgtccattaatgaagagaagggaagtaagaaagagagggagagatggtgcatgtggtatccccttgagatataaaaggaggaccttgcccacttagagaaggaggagaaaaaaggatcccagaacgattgggggctggctcgcactttgtagcttcttcatacacagatccaccaaaacacaggagtagggtattacgcttctcagcggcccgaacctgtatacatcgcccgtgtcttgtgtgatttcactctcgcgaactttccacagaccaagagcttagaacctcacccagggcccccggccgaaccggcaaaggggggctgcgcggtctcccggtgaggagccccacgctccgtcagggtggttatgccttatattttggaatggagggagtaatatattttcagatgcttgatctgatttgagtattttagtcaattttcacatttctttgtgacaacagcaattaactttgtggatttacggagcttccttgcttggggacagagccttgaggatatgggtcatagtaccctttgaaatccttaccactttctggaatacatgtccacctgtaggatatttaatttggaaaagattgaaatttttataatactctaaacgaaataataacgataatttcgatgtaaaatatgattcaaataattcaaagatatattgattatcagattgaactgcatgatacttgagaatttcgtcaactcaagattcaaacactgttgctttttcttggctatgctgaactgctgcagaatcaaccatggaatgaattttatgtttttctattccctccatcccaaaatatgattttcgcggggattaaggtgagggatgacagtaaatgggggatggttgtgattggttgagatgaggaagtagctggagaaattaaatgagagatgattgtgatcggttaaatgagggagtatgtagagaagttgctatattctgagacaaaatttgaacgatacaaggtgctatattttgggacagagggagtacttgattctttgtttaggattaaaattccaatttaacaaaatgtctccagaagttcattcatcttctcttttccgcaggctctagaagttcttggtgaaagtgaaactgtgaagtcacaggatatgccttcaacacatgcagatattttgcagagtgattcatcaattgagaaggataaaggttcttctgggagcagggaaggtggatctcaggatttagtaacgaccactgatctttctttacaagatgaatgctggatttctcctcccgaacactcatatacaagcagttctggatataccacagagttaacccagattacttcttctgagaacatagagaatatggatcccttattggttgacaggcctgtgatagaagctcctggtgctaatgatcaggaaagaggggctgattcggaatcagattcaagtagcaataagcagttgttcataaacaatgttacattgacgaatgttaatagtgttgatgaggttgaaatctcattgtcaaaggagaggaaatctgaaaatgagaatacaaatttgccattcaaacagattagaggacaagaatgtgataacagtgatcctaaatcctatccagattctgtgactcgattgacaagaggtaaaatgaacaatagtaggtagttagatatatggtgctagatgttgctatttatttttctaaattattttgtacttcatagtaggctgccgtaaaacttcctttaagtaatatatcatgtttcaaacacttcctttgagatttacagcattgccgttttgatctaattgtgtctgtcagcaccatgttaacaccgtacagattatcctccaagaagggagaattgcatatactgcagaacttgattatcaatcttttttgcctagtatgtaatctaagtatctattagattttcatgagaagatcaatgcaagaaattaatttaatgtttcacactaaaatcttcacaaattgaaactgaatattgtaatcattttaagactatgttttcatagtgctttgtctctgaacctctcgtgaagtgttaggattccgaagccaagacaaactttgtagctaatgctcgcttgttctttttgatggccacaggtaaaaatccttttgctttgtccatactgaagcaagtggagcataagttacatggatgggatatagatggcaccaggtgggcaattaagcatcttagtaatcacccaaaaatgtcctcgtgttctccagtttattgatctactgttccttctaggtccttgaaggtttctgagcaagttgaccatcttctcaagcaagcgacaagcattgacaatttgtgcaatatgtatgaggggtggacaccttggatatgattcaaagatacatgtgaacatgtctttctacgatttgttttttccaggtatcaactgaaaatataagatccccctataggtttgtttagtaccttgtgatagaaggggttgtccaaacagtaattaattttcagatggaacatattgctgtggtcatcattatttggcatttcttaaaacctagataagtcagtgccagctaactggccaaaaagaatgtcatttaaaagggaactgcttaactgccagtatattagcatattcaactacattcatttacaaaaattatgtaccagactaacggttcatacttgtagaagagtgaaacacgctggaggtccctaaacatgtgccattgtcttacttaggtcactatacttttggtatgatgttagccttttcatactccatagtatattaccgtcatgaattcagatcaatgatttagttagtcaaaacaagagagaaaagaattccaacagcttctcattgtttgcagggcaagctgaagttgagatctgaatgggcataagttattacaatatccaccttttatttgcctagttaagtgtataatacctttcctctgagttgatatctccaattcctacgttagttcagtgacaattttaacacatgtataactttctgtcagtatactagtcaactttctgccaaccattttcctggatcactgtcaatagtctggtacgtctccccacgtttatacatattactgctttccctgctttgggacttttttttttaattcgacattattgattttaagtttttgtgatataactttgatcgctacttttatatacttataacaatactctctcttttacttgacattttgacttctcgtagtcaccactcaccaatatacagctgtaatcattctcttttgcaatttttaatttttaatgtatatatttcatacatctattctgtacattttttgctatcttgatgatcaacatttggaaagtttgatggcatgtattctattctaggtgacaagtaaaaaggaacagatggagtaagtacttttagaaaaatctagtagagtagtttccatattatccaatatgggtattatagtttccattaataccacctccatttttaaacatatgacactgttggcttttggacatacgaccatccatcttatcaaaaggatatgtatcacttatttttttgtgacttgtttttatcattaaagatactttaagcatgactacatttttgcataaaattttttaataagacaaatggtcaaatgtatgtccaaaaatcaatagcttcgtatatttaaaaatggagagtattaatggtcaagtttttactacatggacatgaaattttaaaaaaaaaggaaggaaatgctcattttgtttgtttttttacacgtgcatatgtggatacatgcactatcaccaacgtaatgatgcacgtttaaattcaaatcttctgttcattatcatgtcgtgcacaaatcatgaagcacgttggactgataggatagtgcatatgcagagattcatttctctttcacataactataaccttctgttaatacaaatcagtttattccttttaatattttcgttttttttttgttgcaagctttaatgaccatttgtcgatcttcattttctaacgtacttagaagtaacagtaaagcataagtgatttacccaaaaaatttctgtttcatttccagagtttggacaagacaatccatagtgaaaacaagattgccacagcacgtcgagcaaaagcaggcttactgccacaaagaggtttggtttgcacctgctctttactttttcttcaaaacaaggctgaggctagctgtttaaacatttcaaataagagtgttcatatttggtctagctttacagggtcaccattcactccatatcctagcagcaagatatgaactgttaagtatgggtagctatggatggatccagacacagcaaggatctgaagtactttcagcgttttcatgtacaatgttctcagctatacagcaatgtattgcagaattcaggcatcgatattttgggatatggactggttttagcaatggtatgaacaaaaataccctagctaagagtttgcagttcacgtggacagccatggctttgcactcccagtggactgaagacttcatgatctttaacagtaagccgtcttaagaacatgaagagttttagcaagcacgttttaaaagcacaaccaagaaatctggttcgagtatagtgtacataatattttgcatgtacttgtgattttagaagattcctaccatgaccatgttgcattgatgtaaagataggtgttcgacatgcaattctggaagtgggattctaattctaaagtgggcaagtatcacagtatttttttcctctatgcacacctcaaatatagctatattttcgcgtgaaaaagggtctggcgatattcaaaagcaaaattggaaatttatagcttgtagaatacatgaactcttgctttctttccttgtgttttattcagatacagattggtctgaaatcttcaagtatatatatagccttacagcgtgacacgttgatgatgtgccccgtgctgttaacattgtaattttttttataaaaaagaaaatcttatcatcgttcataattcctcccgttttattgctattatttgagatggagattgatcactttatctgaactcgagtacgaactggtgggcagtgtttgtgctgttgctgactagtggtcatggaaaagatagggctcgggtggcctctgtgcacgctggcagggcagcaataccctggccgcgtcctctccataaaacattcagataaactcaactcctttttccccagctgttattttcaccatgtttaatttttacctttgcattttgtatggcccaagaggccaagaagcctgtgccttaggtaaatctccagtaaatgtagcgtagtttttttaatagacaaaaatgcaccttctcatgtggataatatatttttgacccccaaaaattgtaccaatgagcatacttttattcctgttatttctttaattttcttgggagaaatgtgagatgtcgctttcggagattaggtgattttttttatatacacttgctcccagtgttaggtgatggatgacaaagcgtttgtgacttgtgatctgtaagttgagtggtcaagccgctgtttcctttgcgatttggtaccctgcgtcctgattagtggtagctaatcgcagcaattatataagcaaaccatatctctaagcgcacaggatcattgtttggttcgatacattttctccagtgaagaatcttgcctgcttttgggttggtggcgatcttgaaagctaacacgcacgtaaaataaactatgctaaatggcagggcacccggttaattatttcttttcctgcctctgggaccaacatccccggatactttcagccatttgatctagtgtcattagatatgggaatataatctcgttatgcgaattttctcccttattttgctgaaacctattttgcttaaattgcaccacccattgcaatttacacaattaaaatcaagatattctttttatccgaatgtaaccgcatccataaaaaaaaaaggtactctgctatccaaaagaaaacgttgtgttgcaaaagaatagaaaaaacagaagcagaaaaaaaaacataaaaataagtaatgctagtggcaaataagaagaacgcgaaaacaaacgaccaatttacatgtctaaaatctcaaaaaaaaattggttaaagattttttaaaaaataaaccaagggttggaattttttttctttttatttaaaaaaagaagaaaataaaaataaaaggaaaaggaaaagattaagcagaggttggtgatgctgatgcgtccggtgtggtgggtgctggggctgatcactgcagataaaaacgccacgcgaatccactacctcccaaaccccgagacccccccgcctccaccaccacccgccgctcgccgctcgcccaccatggccatggcgacggcgctccgcaagctctcctccgacgccctccgccgccagccgctctcccgcatcaccccgctctactacatggttccgctcttcttcctccattttttctttaatttttttttgtttatatcgttgccctcttgagaaatggtgcttaatccgttccatggattggtttgggttcgtgcgctctcgcaggcgtccctgccggcgacggaggagagatccggagtcaccgtacgtgctctctctctctctctctctcttgactatgtgttccgttgctcgttggtgtctgtggtttgttcattcgttttttttttattattattttgtttgtgtgttggatgcagtggccgaagcagctgaacgcgccgctggaggaggtggatcccgagatcgccgacatcatcgagcacgagaaggcccgccaatggaaggtaaccagcaaccaccaaaaaaaaagtgcgtggattgttcagtgtttggtccaccgacgcattgctgaattgtggcaatctgtttggtgcagggtctggagctcatcccgtcggagaacttcacctcggtgtcagtgatgcaggcggtgggatccgtcatgaccaacaagtacagcgaggggtaccccggcgcgagatactacggtggaaacgagtacggttgattgcgttctatcggttgcctttgttcagattatttgggtgttaaaaatgtttaatctgaaagagaaatcagtgcctgatgggagtgaatgatgtgaatttctggtggctctgggttttccttgcgtgcagatacattgatatggccgagtcattgtgccagaaacgtgctttggaggccttccgcttggacccagcgaaatggggaggtaaatcattttcactctttatcttgccttgtcatgtttttatatgaactccagctttcatgcgcatcaatagcctttagtcctcttttgtttcctgctttgggcgatgtaaatgaaaaaaaaaaaggataggggcaaaaaggttcctttggataagacacagtttttatggttccatagttcacaaaaaaaaaaaaagggattttgatcagaaaatttcttctaggttcttaatttacttagcttcctcactagtacaatgaaaagattacatcgtttataaaccactcggttcttcagtaacctgaatacaaatggtacacgagtggtcctattcatttatatttttcgaattgtttgctttcattattaaccgctttgtacttaaatttatctagaatacttattctcaaaattttagttttctttctccaaaaaggtggcattctaacttgacaaccaatttctacctctgcagtgaatgtgcaacctctatcagggtcacctgccaacttccatgtttacactgccctattgaaaccacatgagagaatcatggctttggatcttcctcatggtggacatctttctcacggctaccaggtacatgggtctggacttcttcattgcctccttactactagttgtttcagttggcatgcaagcataatgcttccttccttgttgtctttctttgtcctcacaagtttttcaattctctcatcgttactatataccaatgagtttcttccccctcaattcttagttatgttcagatataatgctcttggtactctcatcctcccatggcttagttgttcaacttcttgatggttgcagactgatactaagaagatttcagcagtttcgatattctttgagacaatgccctacagattggatgaaagcactggcttgattgattatgatcaggtgcaatgtcctccttatctgttttgttttaatgccatttaacttattgaattctctatcattcttttataggtatgagttttcattggacaaaacgtgttctttttgcatctagcagattccacagctgaaaatatggtttcaagtagcattatctaggatatttttcattgcctcatatctctttcaattgtgaaattatttcaagatgaatttctgctgacatgcttgatttgctacttctgcacagatggagaaaagtgccgttctttttaggccaaagttgatcgttgcgggtgcaagtgcatatgcgcgtctttatgactatgaccgcatgcggaaggtgaattttactgctcaatagtgcatgctgaatcttcaccttctgtaatcagtcaaataattcacttgttatgcaatctgcaggtttgtgacaagcagaaggcaatacttctagcagatatggcacatatcagtgggcttgtcgcagctggtgttgttccatctccttttgattatgcagatgtagtgactaccactactcacaagtcactccgtggaccacgtggagccatgatcttttacaggaagggggtgaaaggagtaaacaagcaaggcaaagaggtatatacttgagcagaacaatagcaagatagtagcgtagggtgttggtactgtttcttctccatcctgtgactctgtgagcttcaaaaaaataaaaatgcctaatgaccctctaccgtctaggttatgtatgactttgaggacaagatcaatgctgctgtcttcccaggtctgcaaggtggaccacataatcataccattactggcttagctgttgcgcttaagcaggtctgtagcacttctgatccctgatgttttatattttatagatcacattgtttgcctttgtcttggactctaaaaggactttctaacttccaggcaactactccggagtacagagcttatcaagagcaagttatgagtaactgtgcaaaatttgcacaggtatgtgttcaaattttgctaggtttttttttttatctacaatatggcttgatctttctttatttcacaacacttaataatgattttgttcttcacttagttcacctcagcatgttacgaattgcaaattattggtttttcaacatgatgaattgtgctttaacatttgaaccacttccttatctggtggcaatttatcacttccagagcttgacagcaaaaggctacgaacttgtctctggtgggactgacaaccatttagtgttggtaaatctcaagagcaaggtaagacaaacatgtgggacgctttgggtgttttgagatattttagttctatctttcagtttctcttatgagtgctcaccaataaactttcagctgcttccttttaaaaaatatcgattgatgtctatttaacctcaagcttgctgtttctgtatataaatgatagctaaatgtgctttgcagataaacttgtttttttttttcaaatttttatgccatatggggacaattatcatcctcttcaaatttcatgtttagggcatagatggttcaagagtggagaaggttttagaaaacgtgcacattgcagcaaacaagaacacagttcctggtgatgtttcagctatggtaccaggaggcatcaggatgggtaaaatctgcccctatgtggttttttttttaatttacttaaaatagatttgcaaaatctcaatatcagctccatgatcatgcaggaaccccagcactgacctcaagaggatttgttgaggaggactttgctaaggttgctgatttcttcgatgcagcagtgaacttggctttgaaggttaaggctgcagcaggtctgtcaaattcctagttttttttttgtttgaaaatgttgagaatacaaaacaattgttgcatgcattgaggtgccctcatatgatacttcaccctaggatcatcgtattcatcattttgtttttcccctt

SEQ ID NO: 14533 - DNA, 6797 bp, Oryza sativa
ttgacgctttttcatggccaacacaaaatcacctaacgatttgcggtgtatgtaatcaacagagtcgccaaaatcgatagatcaaaatcggctagtgaaaccgatttcgagattaattcactttcgcggaatcaagcgactaatttacaagcaaattagtaaagaggataactatcgcacttacgtgatgatgaacgactagtttccgagcaaactagcaaaggataacctcctcgctttcgtggagaagcacgaccgtttttcagcgcaaaacggcaaagattaaccaaattctagggttgacagaactcagccatgaaaacaaaatagaataacaagaatgtaaagaagaggaaaatagtagattgaaattgtttggggggttctcaaactgatctaataccccactatatataggggcacctaaccaccggatgtgtaaatcctacattcatggaaactcttaattaacaaatcagctgctaccaaaaatgtatattccatagctgactttaccgcatagtcgcataatccagtccgcacacacgattctgccttggttgcagagccaagcagcagtgtacgtaagtgcatcaatttccatcgcttgtccagcacagcagctctcaacaaactgaaatacatatttcctcgctgcactccatcatgccatcaacccatcaactgatccatacatatcccaatgccagattaaatactatgatcacccaatgttttgcaagcatgatctagccgatgcaccgaagatccataagccaaattataccacaaacactaaaaaggttaaaaaaaataattaaaaaccgggtaatagtgtcctcgtcgcagaaggagcgagtccccttcatcatcggcagcatggcctccggtgccgccatggcagcggcagcgagaacgtcagcggacgcagtcgcgtcgtcgtgacgatgacatgggctacgcgcgccgggcagaaactgactcctgcactgcacatcgtggttgtgatgaggaggtaggggatctcacacatgagctagctccttcgtgatctcggcgatggacacgcttcgtctttcccggcgcccccacgatcgagccagagatgcaggagtacgttggcctgcatggcccctgaaagggggcttttaacttaggcctgatatgcgtgtgactcctgaaagcccactttggcctgatagcagagtataatcaggagttgggtacccacgggccacggacactttcacagtcctactcggtccttgactccttatatatgttttacggaattgctaaatggccttcaaccaaaaaaaatcgagaggatttcttacagcttttaaaccaccccatttgcttgaacattcgtgcgtccaacttcttctccagctccagcgatcgttacctgacgagttaggatatagggtttagggtggggtgaattaggggatggtgagttcagattggagtactaattagttagtaatgattttggcaatcatttttcctgacttcgcccctcatttgtttggaggagacgtagggttcatccattgttaacaacctgtcaatgtagcgtcaccattgacaacttgctaagagagcaccaacgtgaaaggatcttattgttgaggcttcaaccgatgggaactagtggtggactagctctatggaattgtgtgcgtatgaaaaaaaaatataatctggaggtttctcacagtcaccggaacatgatggagggaggagtgggcgggggaatgaatgtggtgagcaatgagaatccaaggataaatatgcaaacaatgtgagggtttttataaaaaaattcctatgcggaatttgtgtgcttcaatctaggctgcaagatctcttatcggcaagattatggaacaactttgtttggattgctaccattcttagcgatataatctataaataaaatcccttcatttgggaggaattttaccatccagcaagctgaagcggtaccaaatctaggtcattggctagtccaaatcgaacggttcatagaactcgatactgccaggtaccaatttaggctttgggatggtaccgtagaataaaagagacgtagaagggcaggttcatattttcacgttgcaaattttgctggttcaatctaaggttgatggaggataaggcaaaatcccgagcgccgccgccactctcatcgtggaatcgctgcattaccgtcgcctcgtccccgcacgagctatgccctcccctgtcctgctacttggttgtgcctccaccttcattggctgcccacgtccaccgttgtccactcggggcttgccgcctctaggggagacctcctccctgccagcgagccggaggccgtgatgggtggcagtctcgccatatcccctcactgtcgtccaagtccaaatccttgcctcgtctagatctcccgacctcctcctcctcctccctcctcccctccgctatacagcgcaggcggcgaccgtgggagtaggagacagcgacaggccttctccgcccatcttcaatttgtttccaatcttgcccctagtaattcaatggttggatttcatttagtacctgatagtactagtacctcgaggtactatctgctggacagtaacaaacctcttcatttggactgccaccacttaccagcactccaggagcaacagtcattcttttcccaaacagacccctactactcgttatttctgcttcatatctaatcagatccgggatcgcatgcctcatgtcagctttgtttcggtgtggcacatatcaagctatcactgcgtgatcctgcctaagtgcttcatcgcactctcgatccatgatcatatcaagacatgacgctactgcaaaaaataattttaatgaacactcccttttgttttttacaagcgcactaaaaaagacacgcctaagcaaatgtacttgcgtgaccgatcaagtcccgtccataaaaatcgtttttcacatactgacttcttattagggttgtttgcaaaaatgtgttagttttcaagcgggccccttaatagcttgtgaaaaagcgatgatttatcttcgtctcgagtccccgcatgcattgaccgcacgtaggatgttcctctcctccttaccctcctttttctctcctcatccttcctcctctccaccctccacttttcccttctctcagctctgtccctcactgcacgtgcgatggagggggcgattagatccgatgagcggtggtggaggcgatggcatatctgcctgcgcggtgaagaaggtgggcggatccgatgcacatgatggtggaggaggcggcatatccgacatgtgcggcctcgtgatgacggatccagctacgacgcccttgtgatagccggatccagtggcggcggccttaggataggcggatccgccatcgtcggtcattggagccacggatccacatgcagtgtatgcggggagtcaaggcaacaacaacctcgactttggccgtgggatgacagccacaaggacgacggtggcgacttcacgatgaccgattttctggatttgtttttcaattatttttttgaaaatgtctttgcattcagtgtcctaacttaggtacttgcaaaaaaaaaagaggttttcacaagcagcgtcattaggagggccacctacgaaactatgttttcgtgtgtagttatgatgcccgcgtatgaaaataccgatttttacaaacactagttagatgggtatgtacgatccatctgcccgtgaaaatgagttttggccgtctgcgaagaaaaactgaaaagaaaagagcatcaatataatcgacaagtaccacttgtttccgtagtatgatttgcaaaggatattatattaaaggtggacgtgatatttctttccaaactaaaaggttcatatacgtatacgtgattaattggacgggtctgtccggatcgataagcggctcatgatgactcacccactgtcctttttatagtgcaacaagtgtaataaggccaagcgaatgcgaatctctcgtgcttctcctgttcttaaggacgatggcaccatactccatgcatgcacatagcaagttgctagctagcgatcatcttatatatgtacgcggtgattattgttgttacaaagctccaagtctttggatccacccatgcgtgattgtctatactcccaacgtacgtgtttaaatatatataatggtgttaattttattatgtcaaacttttgaaacttggtaataagtggttgtagcttctattgaagtaaagaccagatattatccattatcttaaaaaataacttttgaaactttgactattaattcttgaaatgtttagttgaaacataaatcgtatggtaggtttttctttacaagtactttcacaattctataattttgttagatattatcattatattgtataaaaaatagaatagtggccaaagttatataccaaacaccgaaaaaaaaatcaacaatgttgtatgttttaaatagagaggtactactacttcgtcctccctaaaatacaacgtgtcctagttttgatcaggaaatatatatatcaacatttaaaatttttgactaataattgaatcgttagatttgtctttgaaaatattctcacatgatattaattttgtagttattcatataacatagtatgaaaataaatcaaagagatcaatgttagagaccgtaaagaaaactaactaatgtcataacttttattttagaaactgggggagtacttgataacaccgtatcatggcgctcgtgtgccacgatttttagtttaatagtgcaaggtaccaattaattgcagttgcactaattggcaggagttctgtatatatttaattaacaagtggagataaaaattttgaaccgatgtatctctttccaaaaaaaaaaaaactatgatcgatgcaaacttgtgtcaataataaaagtggtggccctccaagcatttggacgttgagactagtttatatctcgtcatgtgaggctcctgctagttaaaagttagtaaaattgtgaggacaatattgtgtccttcaatttacaggtttatgcagagtgcacatatatatatacccaccatgcattgaccatttcgttctgtatatatctatctctctgccgcctcaaagtcgatatgatgtgtgctgtgtgcagtaattcagtatctgcagagaagcattgcaaaatatatatagtgtgctaagtatttctaaagatatggttattaggagaccttttagaacataaaaattaaaatggatgttattactttgtcagcaagagatatctacttctaatttataaattgggtactctccttagatataatttgtctgaaaaataatactccttccatccacaaaagttagacatatttcacatttgagttttttcaaataattaagttgattttatttgtagtctttatgtatttaaaacttaaatgaaaatataaattaaatgcttgagaacctaagaagtcatctaaatactcgatcattggttgtatgcttacattcactcctggattttgtaacattcaagatgattttttttgtcttgatgataaaaagtagaatgtgtaacttttgtgatggagggatagtaatcaagggcctcatgatgatgagatcaagtagcaatgaacaacattagtttacctcgttgctggtgtgcacgtggatcgattcgtagtttacacggtcccctacagtttggttaatcattgtttgtttttaatttactaaaccaacagtttactaggatgctgctcgtcgcttcccaatattaatctgttgtcgtctgaattcatgcgatctgggacaaagataacattaagagaaattttatggtactcttgtcgagagtaccaaaatttttaaatgccagctagctaatacttcctccgtactcgtaaaaaaaatcgttttggattgcgacacggtctccaaagcacaactttaattttttgtttctatagaaatatttattgaaaagtgatatatgtatacttttatgaaagtatttttcaagacaaatctattcatatactccctccttccaaaaatataagtcttacttctttttgcaccaagaccaagaagcaattaattaattcaccatgtgacaaaactaataaacatgcaaccaataagcattaaatggcttcttggatttctatcaacaatttaatttagcacataataactacaaataggacttagacttttagaaaaaccaaagaatgaaatagatcttagacttttggaatgagggagtaatttttacattttcaacctcaacaacttaaaagttattcatgatttatattcccaaggtttgatttaaacattgtcctaaacgactttctttacgagtatggagggagtacatatttatcttcaaaatagctcaaatattaaacatttgtttgaagcaatatagtcttcaaagtacaaatgctaagtccgcatgtttctcttacttctctcaccgtctatgagcgagtactaatattgtataatttaatagacatccgaatattaagatctttattaatggacattataaaaataaggttttacttacaaacatcataaaacttagtaatttactggacagtagacactacgataataaaataatatatatatatatatatatacactcaggccagtgagaagccgtatatatgttactccctccgttttaaaatgtttgacgccgttgactttttaacacatgtttgaccgtt

SEQ ID NO: 14534 - DNA, 38004 bp, Oryza sativa
caccaccaactccctactttttttaaggaaaaaaaatagagtaccaagtctaaagggcccacttttcagctcaaaagatatgcaggcataagaggtgtgcagaaagtacggcaaaaacgggttgagatttttctttaaaactcacattgcaaggtacgtgcaatatactagtagtagagaaataaagtaaatgttttccatgtattaatagtttagattagagtggagttacgtgttgaatgcacgtcacatgtagaaactgacaaaacaaaagtctcatgctaacctgaagatgtaatgttcctctatccttggtgtccttaattttaagagaatctagtgattgctgaagtttcaaagtgatttcactggtagcctcaggttgaagactgttcactgctagtttagctacaccaagctttttgtcttgctgaagtctgtcttcatcatatacctgcaaaaaattcacaagcatgttatctggtactacattgagtagattgacacatagaagcataatattaagaacacataaaatcaatcaagatagaaacaacttatgggaattcaagttgaaccgaaatttctaccaatgatgcatcaggtccttccaagcactttcaatgaaactagatcactgccaggtatgaaacattctcaaagcacatctgattttttttctagtccaagtctccaagacgcaccaaggaagtatcatcatctcttggtttgattaggcaaattatttagtccaaaagaaatcagaaatttctgtcatctgacattcgtatgttaaaaacaattacatgtattgtcccatgactgtttggacatgaaaatagcaatgcagattagactaagatagtgacattgtgtaatcccttctagccacccaatatgtagcataatctgactaaaaactgcctagggggatgggacaagctcatgaaattaaggagaaaaaactaaattacattgtctgtgtatatattaggtccattttagggtaaccaaatttgaaatggctctattgaccaaaaaaaagggaatccaaaccagggctgagcagtgatagaaaacagtatgttaacaatattattgatccagctactatctactccctccatccaaaaatatagattatatagcattcgaaatttgtcccaaaatataaggccttctagactactacttccccaacccaaccactcatcgtttaattatattcaatcttatatgcaaagatatgcagctctgctgcgtattcgagaacaaaaaaaatccagtcttaccctcaaccacccctcatttaatgaagcattacaatcctttcccttcatccttaatccctccaaaagaagccctagaagtccttatattttgggatggagggaatacgttgcagttaataatatattgttgtggtacttaccatatgtatacaataattgccacctaaaaacaaagaggcatggaaaattaacaaaagggaaaagaaagatgacaaaatggaaaagaactgagtggatttcatgagcagggatatggtccatgctcactcttcatgcacgatcagtaccagactaccagtgcaatgttgttggctgtcccaagttggttgatttgtttatcttcagcgataagctgctaaatataaggatttgacgggagaggatttttgacagtttttgagttagagataataagttaaaaaaaaggatttatcccttcttaattcttttggtagagatcacgtgttagggctaaacctcaataaaaaaaaggagccatagcaccaccatacagaaaactaaacaatagaagttggcatgggactaccatgtacagtaccagacacatgcatcatagtctgaaacttctgtacacgtgtaatgtatggcaagcattgataacatggcatttccatccactgaaaaattctgaattatgggcatgattctacagtaagccttgaatggaaccaaaagacacattgagtgaaagactgaaacaccaagacataacttgactcatgactaatgtctcaaagagcattcatcatacatgtgtaccatgaaaaatagtacacacacatgagcatgccactagtccatagaaatttattgatatcccatcaaagcacaaatagattcttcacctttcctcaataactcaatcttttagattaactaatcaggccataaaactcaacatggtatcagagctagaagttctaagtttttctaagtttgtgatgtagcacaatcttggagaaacacaatgtcggcaaaatacatggtatcagcttatcatggtctccaccatcgtcaggctatcatgatgtcaactttaggacttccagctctgataccatgttgaggttcataatctaaccagccaatccaagagcttaaattattggagaaaaggtgggcaatctactcatacctcgacagctatactgattagcataatttatccctctgctttccatttatggaacaaaatattcttctatgcatactaaggaaaagtgagctccatatcgagttcatcagtatctgggctacaagcccacatgtcaccttgtttggtacaaacctgaacattataactaaggcttgtcttaattcatatctggactagcgaaccaggctttctagcttctatgagcatttttctgacatgtttacctaactgcatgagatcaataaactatttatacatatgagcaaagaatgcaattgctttaacagaagattttacaaccaacacacgtccatatatatctgactacaatatatcttgagtagggggtagatacagaccataccatcaaccccaactcccttttttaaatgagtaaagaattaaagaataactggaccatttgccagcatgatctggaatccagccattaatcagccttacaatccaatgcagattgtttatagaaagcaagcatataaatctttcttgataaaattgtctattcccttcatatgaatactagcaaaaaaacccatgcattcaaatggatctcataagagaaaaacttaaattatatatatttctcagggaaaacatatataatttgcaaacaaacatcaatacacaaatagcaaatgcacatacacaaaaatatcaatttatccaccgttagaagaacccaccaactctagaggtgtggtaggatggcagactcacaacactgtggtcttctatatactagagatatttgtgcatattttattgtttaattgacaccattttggtcatagttgcatgtgagaaagaacatgcaggaaacaatgaagaattacctcaaaaatgacagactgggtttctttgtcttcaacaatcagagggaatgtttcattccattcaggatttaggttatcatctatgacttttgttttgaccttgaacattggacgcacatatagtatcacatatggatctgatttaccaatcaactccttattcttcaatgaagttgcttttactacagtaacagtaagtcttccctgaggtttaagctccagctcactgcagatgaagtagagcaggacaaataaaatttttgaaattacatgccaatgggatgcaattcattataaagatacttttcagaacaaataaacaaaaatattagtgattttcagaccttaaaagctagcgtgaggcatcaaattaacatattatgcttgtgtatatctcatgcctaccaaaaaaatatggccaccaccaaatatactccttccgccgcaaaatatagctacctttagcattaaaaatttgtcccaaagtaaagctagctttccacctctcaaccaatcacaaccattttaatttctccacttacttcctcatctcaaccaatcacaaccatccatcattgtatttcacttttctcatcaatacccgtgcccaactctaaaagctcttatattttgggacggagggagtataatggaaagattggcaacccacataactcacctagatggaaatgcagtattcaatatcacataaggactttagattgggatgtgaatcctggatgaaatgatactccagaaatatattctgaagaactccagaacaaagctaccctatcaactttttcagatgggaggatactaaatctggatgtgtgatgcagactaggtcactcaagtgacacgatgacccagctaattttgtttaagttgcacaaaacaacagtgcaatgtttaaactattaacaccacctaatcggcacaacattgtaaaacacgccaggtttttgtcatttagaggaatcagccagatattgaacagcacactctgtacataatttgaaatgaaactatcaatatattccaatttcatcatctctttttccccaaccctttttcccgatcaagtcttaccaatttttcactaagttatcaaaacattctgttttgtgcaaaaaagatgctaatttagctcgagcaatatgaaatttactttaaattctaagtattgaggtattgtctggtccaatcgtgtaatcattaatgcagtcaacatctcttgttaagcattaatgttcatgtatcgagaacatcttgcagttggatgattcaaaggaatgaagaattattatgattaaaaaacaagttcctttcaagaaaaatgaatacatgatactatgtgaacaataaatataacacagaaaagcagctcattgtcaacatttattgcatatgattggagagctaacagttagcaggattgattataactggtgacaacattcaagagaagtcaccttgtatcaacattgacaccaagtggaacaacaagcctgtgtggccacttgagcatgtcagaaacaattgaattgacagtgtcctaattaaaggagaggaatcatggtcaggattttataatctgttagaagaaattaaatgttcaaaatactttcatctcacatcaatcatgtcggagagtcctggaacagcggtcagacttcctccaatagccttcaaagtgtattgtattttcggctctggctgaagcacaaagaaccgccattgaagaaataccacaggaaatgctcataccaattagcaaaagactccaaacctcaaatgtagtcaacagattatctccagagacattcaacaataatggcaaatttgcagtatggaacatgtattaagttcaaaaaataataatgatataggccaaagtaatgaaacatttccttgaattggccttaaatgttatttgattggccaatttctaatcaattaacattaaaactggaccaggtggagttggcttttcttttctcattaggaccctttcacataatctcctaccttggcagtccactttcaagctatacttggaacagtgttatgtgtaatttaatcaataatttcaaggaaacagattaataaggttataaacaatctcaaggaaatttcactttgtgtcatcctaatgataggggcacccggtgttactaaaatagctgccatcgaacaactgtgcttaggatgtccaccttgttaattcaagactcgtctctgcttagacatgcagatctcctgtattgtcttagaaaaaaaatctcctttgaaatagaaagataaatcattttttgtagatgtatacctctgcaagaagagcaacaacaacagcagagatgcaagggatctcctctgatagttgaaatacaacacggacaatggtgtagacttgaagatctttgagctgtgagatggttggcaaagatgatatcatgactagttcaagagagatttacttctgtaagaattaatcactgaaaagaacaaagaaatagtaaaacctgaataggaagtgatgcaacaacagcatcaacagcaaggattatgcttggatcaccaccccaacgaagatctatatccattatgatttggcctggctgaatattttgaatgcgaatacctttacacaacatgacaaaacgtgatgtctcagttatttagtattgcattaacatgatcaagatgctaaacaaaacatagcttagtggggcatccctaagaaagaactcatgcataatatacataaaggtaacatcaggtaattagcatttatttaatgagcattgtttggagaatgtacataagaccgtcccctggaggcctgaagcaattgaaatgacaatcgcatggatgcaactataccacaagggcaggggggaaactatagagactagagacttgtttattcttgcttgatgccaatacttgcaagaaacctcttatatagcggactcacctacctcttatatagaggactcccgctcccctagcaattatagatatgatcaatttaaataataacttgcctaactactggaaagataccaaacaacctaagagctagattatcaagtaacaaacccatgcctaatcataagacgatgtacttttcatatgagcagtaactacacactgcactacacatccagggcccatgccaacattggcagttggcacatgagtacatgacaatagtaaagaagaaattaccagcaaacacataaaactgcgaagatgatggccaaaacataattggtatttagtaattagtaggcaaagtaaccttgcttgttagctggctatcagttaggaagggtaaaatggcatattttgtgttttttaacctacaccaatctgcattgttttgtgccaaaattttctttccatatcacatctatttgacgagtttgtctctctcgacaaatcctatctgaagctttttcacatcaagttatcaggggtactcatgccattttgaaaattttccctccataaatacgtaaagaaatggactcaattaatcaattattgactgacagtttgcatcgaccgatgttaacataaagtgtcaacttggtaatgttggtcaatctacatagaaaatagtcactcagaggtcgcaaagagtgtatcgtcagattcacaaatcacaaaacaaaaggatgaacttgtatttagtagtcacgatggtcagttcctgcaattaaaaccatctaatgaaatactcctaaggcatgtcaccagtcactattaccactgggtgcagttcttggtttacatacatcagatgcaaagattgttattctcactgtaggaattctctaattcagaacccagacaggaggcatacaacagagtaaaaatcagataaatagtgcagaacgtggagattataataggaaaaccttctatctttggtgaaacagttccaagagagaatttgctgaacttcagagattttattcctggaggtcgataatcatctagcagtggctcaacagattccttgactactgcagtggcagcctgaaatggaactaaaagtttagtagcccccagaagaactaaaatctaccaaaacatagtacatacttttaagaaaaaaaataacttggagaatgagattggggcagaataaaacaaagaaataagtcctatctttattaacacaattgtacatatttaccacaattaaaaggattaggacattgtgcatactagtggaaaatgttaagataacttgatagaggtatgctttcaacgctatactgatgaagcgtatcttgatatatcttcaaaaaccaagcacaatttgtataaatagaaaatggcatatcactttgaatgaaagtgacaggatgattgagatgatcaatatttaagttaaaatgtttaacctttagaacctgcagttaggagtagcattacaatacacaaaaagatcaacatgaattatacccccccccccgcgcgtgcgcgcggaaatgccggtgtttttgtttagataatggaatataaattccggcctttacttcaaagaagctacagccacttattacacaaaactctcaaagagagccaatagtcaggcaacaatatgaactaaaactctcaaagaaatgccagtgttaaagacaaagaaagctattaacaaataacaattaggaagtttgctggaatagcatacacataggaatgaattttttttgtaatcaaaggaacgaataaaaatttctacaagaaaataccatagttgtcagcaaacgggggctgtaggactgccaaactaacagcatactttacattattatcagttggctagagcctagagatttaacaaacatttgtcttacttgatcaacgaaaggccagagtttgctgagatgcttgttcagccatttcacctgtagaaatcaaaattgtgggtaaaatagtcattgtccatagtacaatggataaggataactcaataagcatcaagaagtgtccctttatgatgggtatttggattacaatacgaatattgccagcacattaatctggacagacggtttttccagcttcgttgtactaggatgtgtctgtccagattcatgtactaggatatgtcaaatcaaccaaaatcccttatattatgggacggagggagtaataaattgcaagaaaactaaacaaatgaaacatcctgtcaatgtaatgatgttcatgttcaccacagttaactttttcacaagcttacaaattacaataagtatagccagctaaaggtcttttatgaagataaaggtctatttcatttggttaggtttgtattaggtgtagtttataccaccttgattcactagtgttcagttggtagtacagccatatgatggatatgagaatttcggctagtgtttactcgaaatttcaccattgggttgattaagctgtcacctcttttggggtaaatacaaagtagcaatgctaactaaattgcgaagattgaagcctgtcaatctcaatccatcatgcaagcatactatgatgtgaatcaccaatcctcaacattgccaatagtttctgaactcaaaatgaatgcatctattttggtcaaactaagccaaatcccttacaacctactgtcctactctagcagctgcctccgcatgttgctgaccaccaaagggctacagcacttaccaatcctcccaagggcagccttagttgctgagatgggctgttaaggcgatgtaaggcgacccaacccaaccttagcggtaaggcgtaaggcgatgcgaaaagaagaagaatgcgagaacagatatgggccagaagtacatccagccagccaccacactatagtattctgcagttaaccccagcccaacagcccgtttaaagccaaccaggtccctttcctctcttgccccagcatgccaagtccacaaacattctatatatctatgtacccatcttgaccctctatagcactactttgtttttgagatctctgcttcttaaaaagaattgcaccagacgtccaaacctacctttggctttgatcttgtagtttcaaaactagcacagaaacaagtcatcatgcaaactactacaattttccacttgtgaatgaaggggttaaaaggttagattataaattgtgttccattcattatttttctttacttgactttcaagacatggactcagcatatatgatctttttttttctctaatgacatattcatgaaaattatttaaagagcaactgcatgaaagtatttttatggcaaatctattaatgtcatttctacaaatcaaatcttaataattttgcatatgttaacaagttgaggtttcaagatctgacagcacggtgcatgcattctcaaggaaaatttggttccatgaaactgaatccatgagttatgtaaccatcgaaagctcacttcaatatcaccaaaaaatttgcaaagctcctttttataccatttccatccaactgcgctaactatgacccagaaaatcatctagcaagaacacagacccagtactaccatgcttatgctgtattaaatttttggtgaagaacagaaacggcgcaaactttcggtgtcacaaactcaatatcagttcttcccattctaaaacgtcatcatttgaggacatcgggtagtagtttacactttacacagacaagaacaaaaataagactaggaacatttcggaggaatcaccacaaacctgctcatactgcgggaaggatatccactcggggaaattgtcgccgcacagcttcttgagatcgtccctaccgagagacccaaggaccttgatatccgcagcctgtagaaaaagtttcggaaaaactaaacaaaaatcaaaacctcgaccacgaaaattaaacgaccatcaccctagccttatacgcagaaacaaggagcaatccaggcgaagcatcaccaccacgcgcacccgaaacacgaaccttagcgatgcgcttcctgctgcgccgctgcatcacacggctccacccggccataagcgcgacgccgaccaccatccccatcaccatccccgagatcagccccatcctggcgcacccgcgaccgacagcccgccctccgccggccagccaacctcgcttctcgcgccggcaccccccttacctcatcaatcgaatggcagctcgagatctgcggcttcgcagcggaggagacgagggggagggttacgcctctctggcttgcgttggcggtttgcaattgtggcttgggagtggggaatgcggaggattgcgacggattggggcttgggagaggggattaattacggggattagtgcgcagttaatgccccaagggaagcatcaacgaatcgatgtactgctcgcttgctggaacagtgacgaggaagtcaactcgaggagatctggagaggaaacggagttgatttttaggacaaacggcaagtcggccgcgagcgagggggcttttaactatttgccactcttacggatgttgcttaatgatttgccactaagctcacatgtcatagacacatgagggcccacatgtcattgacagggtgtggcaaatcgttaattgtcatgtcacaagagtggcaaataacgtggaccttccaacacccccacccgcgagcgaggggcaggggctgtctgcggggggaaatttaacctccacgtgagcctggctagtagcttcgctttttgttttacccaaacaaagcagatgggagaccgattttacaaatccaccccaagtttgacaaaactatcgtaaaaaactaaaaacgtctcttttgagtaccttcccatgcaacacgtagcactgcaaaacacgtacctgcaaaacgaattgcctgtatttgtatggatgtaagtaacagttgcatataaacatatagcaattcatatttgactatttgtggatgcagcttgaagctgcaaacatacggagtaaatttagagttgacatattagtctaccctttgtatataataacatcctccagtaattacaggcctgtttggcagagttctaactcttaaatttagctagttgggtctggagtggagtcgtggagctgcctaaacccaactccacttctctagttcattttgtgagagagctctacctagctctgctcctattttagatagagttgagactgtttggctaagctccaccttcaggagagctggagctggagctgtgccaaacaggcccacagtgagaaccacaccgattttcttatttttttgcagaaaaaattgcttcttttgaaaaatttgacatgtggtgggctagtttgaaaaaagatcattgtctacgtacaaaatatcaaacaaacctcccggcgcacttgacacctagttgtgttttttcggaacaactcttgtcttttcgtgatatacaatgtgaagaagagaaaattttgttgctatggataacactttacatatggaaactaaaggggtattttcataaaatctcctttactcacctcaacctctccaccccatcaaaaacccatccttctccccaatccgcgctcctgttgcacgagtgctgcacatccgtgcctcacgccgactccaacgctgccatcttcccttccttccacacctgtcgcatagccatcgtcgttcttcctccacccacaacctctcttcctgagcaagcacattgtcggctgcttcaaaaatccctatcttctcgaaccctaggccaggcgacaagagcagcaagcgtcggtgtcagggattgttggttcttctctttaatctagggatagttcccttcccttcctctctctcactctccccatatataagcccttaattagattagaaaatatataactgagatctagtgcttcaaatggaagaaagaaaaccaagcaagattgaattgccacccatttaataaatttgcatctacctacagctgacgttgcacggaaattatatggaacaaatgaacaatcaacttccaagcgagaccagcatggaaggatgcgcggtgcaatacaattatgatgaatggatgattttttttttcaaataagaattgataaaaatcgtaaaattcaaaattgcctctaatcattgtgccgacgggggatacccgtagaccgaatatagagggtattagggtatgctggtacgaggatctacgtagtacgacatcaaggaaacaaaaaacatgaattatactggttcaggcctcttgataggtaatagccctaatccagttgatatgggattatatagtggaaaccacagattacaaagggaatagtagaattcgatgataccgacgagaccgtagtcgagttggttcaactagatcacccgacaacttggctcctgtaggctccgacttcgtaggctgtggcggttgtattggcaatgagatttgatgcctttgatcctccccgggggtcccttttataccgcaggtcagtcggtttccaagtaggactcggagacatcggaccctacacgatacagtgacgacccagttctatccgagtaggaatctttccatctgtggactccatgatggatttccttgcgtgtacgaagaacgtccgtatacgcgcagatataccatatcgacgcatagcgtatatccaagggtagagggtataccttatccgtaaccctgacacattgagtttgtaaagtactaatacgcccttatgaaccgagagttcagatcgattctactagtagtatcataatatcagtaatactaccagtagataacaccattgtgggactctattgactaaaccaatagagtgattaaaattttttcttgttttttgtagcattttcctgttgccttgcatatatgatggatttggatgttatttatgatccttgttaacggtccttaaatcataatatttgaccgtcaatacctgcatataatgaaataaaacatggtatccaacttagtggtagggattattactaatcatttccaccagtgttggtgaaatatgtgtatgcatgtaatttgaggagaaaacacatccgtcatgcgacaaaatgcacctcagtgcattcaggacacgtttacacggattggaggcctaataagtcagtgaaaaccatttagaattgggccaaaacatagcataggttgttggggggccattaagcaacctcccggccgaaggagaggccgggaggagtgtttttgggttcagccgaacccatcctggcgctttccgccatctgttttcatgtggacggcttggatttctcccctatggcgtttacagggtggtttggtcatttcccatgcccctaaccgtcatttagagcttatataaggaggtctccatctcacttcaagcacacacaactttgagctgaattacaagaggctttattgtatcttttgtacattagaattaggtatagagtgaggggaagctctggaggagtgctcggaagtttggcgctcatccgacttctacctcgacgagaatagcttcctagaaggaattcgggaggagtacctgagctgtcggtacactctgctctgggttcagaaaaacttcttcaataaagtaagcattcgtgttcttttcttatgttatttaattactttgtctaagtaagatagattttcatctttgcgggttcattggttagtattcatactaagtgctctagtactaggactctggataatgaatgaagttcctgcacaaatattagagtagtaattaataacttagacgtagtgtttaggttagagattacctttgtttgttgtgtatcccacggatttgtcagaggtaggcgacaggtggtgatagccctaaatcccgtcctagtaatcctccacattcggatacatcatagaactatagccggaaccaggctggcagaccagcaggggtcggtgcccgaagcaacagataggaaattacctttgcttagcttagataattaaaacacatagaaagtcctctctagcctagccagcctacctatagttgttgtccttggatagtcttagccttaagtagattacacacgttcgctgagttcgatatccttttggggtcaccgaagatgaagtgctataattgtattctgtgcgcttgcggatttatctgtggtcataagaaatgccaacaatcctcataattaccaaatggattttacttggtggattttattttgcagtagtttctttgaaatcccttgtttctatatggtttcaaatttgttcaccatatgccttttgtgttagtgtattggttttgcctaacatttcatttgtttgtcttatctaagatagtgttgcattatagcttttggaatgtattccatcacagttagtggactaaaattatgtgcaaaatctgttatattaaaggaaatggaggaaagtgcacgggtggtccctaaacctatcatgttgtgtcatacaggtctgcaaaactctcaaaatacattttcaggtccctaaacttgtcccaggcacaaattggctccaacccattctggacactgacatggcataccatggtggtacctatatgtcattaggactcacatgtgatacacattaaaatataaataaaacattctcattatgttactttttttccctttcttcttctctccccttctctttctttactgtcgaggtagttgttcactctctctctctctccccttttcccagcgagcccctctttggagcggcggtggtgagggccaaggctacgccggtgagatcctgcttactcaaaatctcaaatgcgaggccttccctgatgtcatcatcacctatggtaatgtgcactggtccgcacaggttcctctcgttctcatatgccctagtctatagtgacaaaattaagatgtgcactgctcagttgtgaattgtgataaacctttcaagcaatcatgatgattaaaatccaactcatgaagcgtacgtagccatggacgtggccggcgaagcctcatagagaatgtgctccatgcatggcctttctcatggcctcgccctccacctcgtgtcccgcgttcatgttgtaccggaggcatttagcggcacaacgcgtcgtgccacggtggatggtggcaaggttgcgcgccagccacctacacggtagtactgcgccgagctcggagtctaactggtcattgagccactctcctcgtacgacatggcaagtccggcagccccatccactactaagaaaaagtatttttcatgacatcaaacttttttttactagcgggtttaataaacacacgcttgtaaacatatatttgagggtttctaatcacaaaccaccagagaaaatcgattttatgttagctgtcacttacgaggtccacctgaaaaaacaaatcgttataataaattgcagtgccatatgcgctaagtattaaataatcgctatcctctcaatttctccccagctgccttctcaattcctcttctccctagccttctcgattccttctcgacttctcctctcgactgctcctcctctccctccaggccccctccgtggtggctccctccagcgataggggctccccccagccgatgctctcggcaacaacagcaacggcgacaggaggtggatccggttgcgggatgggaggaggccgatggcgggcggcaacactcttgccctcccctctctctcctagatttggccggaggggaggagaccgctggtggcgacagcattagcaggggagcatcggtggtagccctccaatccccatccctcccagttctagtaggaggggcagcagcagaagcaggaggctggtgatggcagaattagtagagggggcagctgcgatggctcccccagacccctccctaccctgcctcttttagatccataggaggctgccggcggtgacagcagtagaggggacagtggtggcggcttccccactcctctcccctccctctcctagatctggccggaggggagacggccgatagcagcagagagggtggcttcggcgacgtcttgtccatggtggcttcagcagcctcaaggtagcagagagggtgacttcggcgacgtcttgtccatggtggcttcagcggcctcaaggtcaccagcgagctcatccatggcaactagggttcttgtgaattagcgaggatatgcttgggagcaagggttgcactggtgaatttttccgtgtttgttcttcccttttggcttttgcagatccatttaatgcagtggtgattagtatttcatagggatgatgtttgtttatctgtagttgatttgatttgatttgtggaaatgggtagctacatgcatgtggtatttttgaaaaaaaaaattggccacaatgcatctattctagcggtcattgtaatttgaccgcaaaaatcggactttcacagatggtcgcactactataaaacatcaaataggtgtcgccattataggtgccggaacaactaaaatcggcacctataatgcatttctcacccaaaaagcgcatccacgggacaccattggctagaatcggcacctttgtaaagagataggtgtcggttctaaataaaaaccgacacattttagattagtatcggtttttctgaaagaaccgacacccatatatttatattataggtgttagttttatgaaaaaaccgacacctattcggagccgactgacacctatttagagcactcagccttatcctcagcctctcttcccttagagcaagtataatagaaggctgtaagccgactaaatgctgaggtggaggagagaagagaggagagagaggagaagcgggctgtaaacttacagccggcttggacacaagaaccaagtaactctgtgagagaggcaagtgggctatgtattaattgtaaagagctaactattatataggtaggctgagaggaggctgcaaagaaccttacaaccaacaagtcggttgtattcttagccttgctctgatcctctcagcccctcttctctgtctcctcccctctctcagctctctctctctctccaccacacagtggcggcccgacggcggaaggggatgcagcggcggcagcggcctggcggcggctcagcggctcgggaagtggcggcggctccctcccctccgctagatttggcgggagaggggaggtggcggaacgggatgtggcggcgatggctcggcggcggaaggggatgctacagtggtgggaggggaggcggcggtggtggtcccacggcccgtaagatgttttgacttgtgattatttgttgacgtggtgatttaatgatgtaatgatttgtgatttgtgggatcggcttgacggctcgatgcatcgaggcgatttttttttggctcgtgtgtacttcaaaggtgccggttttgaaaccggcacctttaatcttctgtaatctgtgccacctctagagtgctggttgggaaaaccggtacctgagggggtttcccaaccggcaccgaattgagattctctagtagtgtcggcttaacctagttgcttgcgaaaaccattttcgctggcggttgggctaggtcacccgccagagaaaatgatttcttgttccgacagtcgccgtagaaaatacaaactggccatcaagaaaaatccattttgtactagtgattgccgcctccacctcatggttcccctcgttgaccatccatgctgctcgccggctggcataatctgcatgaaccgaccaccgatgttgtggtgatgctcgtagcgctgatgtccagtggcgactgtgacgacctcacaaacagcatcattgcgttgttggcaaggcttgccaagcagcccgtcggtgcggcagccatcctgtccagctgcttggcactctcatgtggctcgttgatttcctcagcgtgtcggtgttacggttggctaagaagcacgacactacgctgttggctcgctatgctgccacgcgcggcgacgcggtggtggcactgctatggcagcacattgccagcctgcacgataggggatgatagaaatgagcttttttttatgcgactgacttatgaaccccacgaaaaagtccaccggagattcatcgtggtccacatcagcgagtggagcgggttgcatccaatttggattagttgttatacccatgacgagtttagagatctgaaagtgcattttaagattatggggacctagatgacaaacatgataagtttagggactatccgttcactttacttaaaaaaaagttgggtgtccgacctcatttctatatgatatgcaatttatttatctagatgtctttttgcatctattgtgtttaaaaaagtgcagatctttattatgcaaactaaactgtatcattacttcttcatttttttaatttttttaaataaataaaatgttgactggattaccatgcgtacgccacgtaggataaaatcactctgtattgggtcgagggggtaatttgttcagtattgaaagttgagggtgaacgatgtctagttttcgggtttaggggggtaattcggtcgaccgtgataattggaggaggggggtaattggtacctttttccctttttttttcctcgtgtgagtgagcagcccttcccggtctcatctatctcattccttttttgaactagcaagaagtgatttttgtcgtggtctacgggcctgatgctagcacttaacagaatgggccaaatgatagcccacaacaaaacgagcaaaatggtagcccataaaacaaaaggagtaaagtccatcaccggtccctaaacttgtaccgctgtgtcatcccggtccctaaacttgcagatcactcgtttaggtcctccaacttattcagatgtgtcaccccggtccctaaacaggatggtctaaaaactttatatcaaaaaataattcataactttttcatgtgaactctaatgaagacaaactttatatcaaaattgtagccttcgacgcgacttacaactttgtatttgaaaagtttttgaattaaaactgtttaggtcccaaaatattgttgcatgtttatatattttgaaattttaattttaaaattacattttgggacaaaaaaatgacttaaaataaaaaaaattcaactacaaagttgtagatcgcgttgagggctacaagtttgatataaagtttattttcattagagttcacatgaaaaagttatgaattatttttaaatataaagtctttagactgtcttatttgacccagatgatattcaaatccaagtttagggaccggggtgacacaattgaacaagttgtaggacctaaacgagtgatctgcaagtttagggaccgggatgacacagtcgaacaagtttgaggaactgaacgatcgatttgcgagtttagggaccgggatgacacaacggtacaagtttagggaccggtgatggactttactctaataacgagtttgggaggttgggagcagatccgatccagttggcatccgagtgtggaatggggatcccgagtgcgggtgcgctcgctttgcttgggatgatttcatcggatgtgaaaaagggtgtcgaaactaagggtgtgtttggttgggcttttcaacctgcttttgcttttgcaaaagccaaaagccaaccaaaaggctcaaaagccataagggcttttgctccaaagctgcttttagtgtagtacaaatccaaaagcagcccctacccctgctttcactggcttttgagggaaaaaattacccacctatgccattatgaaaaaaaaacgattcgctctttctttctttctttcccgttccccttctcgcgagatcgagcgcctggccattcacggttcgatgcggcgctagggtttgcgccgccgcccgtgctcccgccgtcgcgcgccgcatcacccggtgccgccctgctcctgcgtccgtctccccgtcgcccgcccccacgccacccgacgccgccccaggccgcccggcggccgtctccccatcgcccaccccacgccggccgatgttgccccacgccgcgccgaagccgcccctgctcaacgccgcccgatgctgctccgacgccttcgctaccgctcagccgacttgaaaggtgaggccgaatcgcccctgcccctgtgctcttgtgttgatgcatgtgctgtccctagaatgttacagcaaattgatttttggcctgcaaattgattgaacaacaaattatttggttcaagaataggtgacatggcagattggggtgattgttttgtaaagcatttgtttgatgtttgcaaagaagagatagaggctgggaatagacccatgggaattttcaccactaccggttggaaaaatgttgtttccaagtttgcggaaaaatcgggtgacaagcgaaccaaaaaacaattgaagaggaggatagttattttgagatatggcatcattgtatgaaccatttatcttttgttctgtttatgtggaccatatcactttgatggatgaaaaaactaatatatttcgatgaaaaacttatacattttttaaaaaaattggccttttaaatacaaaatattgaacaggttaggtttgtacaagtaatttgcatataaacagtcctacatgccattaggggcattacaggtatttcttctacaacctacagtttcacagctgctctaaccaaacgggcttctgcttttcccacagctgcttttccacagcctacagctcacagcagcttttccaaaagccacagctcaaccaaacacacccttggcgatactagaaggggtagcgaacaagctatgaaagtgaatgggttatgagaaaagatttatacatgttcgggccttctcaatgagaagtaatactctactcctgtctcgggaaatattccgccgattgtgctattgatctaacgatctaatagcatctccaacagcctctccaaatctgactctccaaatactcatttagctagcctaccaactaaatagagtcaattttgctttcactccaacaacctctctatttacactgtccaatctaataattggtcccacatgtcacatgtcagtgtcagtatagttcttttacctccctccaatcttctctccacgagtagcacatcgccgttctctccttgtccccgcctcctctgcacaagccgtcggcaccgccgcccaagtcaccatcaccgccgcagcaaactgtcacgccgctgcccacctcgccaccatcgctgcagccgtctgtaccactgccgcgcaagtcgccaccgctgcatcagctgccaaagtcgccacctaatgtgaccatggctactacggatacaaccattgctcacatcatggatgaacaaggagatatcaagatcaagtcctccaagtgctggaatctgattcggccacctactacactgctgacttcaaatggccaccgaatctgcatacgacctctgttttcggcccgtaagtacttgatggaaagctcttggagccctctttccaacggatccagcctcatcgccaatttccatgtcgtttggccgcaatcacataaacaaggtgctatgtcacctgtcttgggcctataggcttgtaactttgtttgggaccccgacccaagtggggcccatgtggggtgcgccccaaccaggtggagaatgaccattggcaccccttggtcttcctcccacccctataaataggtaagcaccacttcagggttactcgggttttgtttagatgaaagtttagccattgctacttcctcgcagcgcgcgtgtcggctagaccgtctgtctgcttgtattcgaaaccccaacttatcgtgtgtactcaattcctatttgcaatatcagattgcttttatcttgttcttgcttgtttcttcgatttacttgcaggaataaggttgatctgcaccggcaagatcaacaacccacggagaggtgtatcgatcgctaaggtgcaacacaacgtctcgtacggttgtagtcggatagtcaacgtttctcccaaatcgtagttatctgaactcaccgaaagatcggggcaacaacaaccttgagtttcgagtggaactcagggtttatcaggtggtattagagctttcgttgctcggtgagtttttatctacccataaccagaaaataaccacaaaaaaatttgtatcatttacctagccatatttgtgcctttgcattgttcttttcagtttttgctttgttgagttttctgttgcatcgtcaagtcgtgttgctggtcgtagcgtcaagtgcgtttagggttttgagttctggtcacgcttagtaccactatcaccgtgtgctctgttgtcgtcgggacctacgaaaacggaatcggctcgttgccacggttctatttttgtagttttcagaagtttctatcggttagtttttgagttcttgagttgcatctaagggcttctgttcggtggttgtgccgtgcatgtgtgtgcgaggaagaagataacagatcagtagaaaagaggataaagatcggttttcagaggaagttttgcatattagatcaagtcggttgggttgtttccatgtaaggccaaacttcccactttggccgattctatttcctcccccacgcgtgaaggccggcgtccatctccttctgtcgcccactttagctgaatccgactccctccctctcacgttggttcctcctgttccgagttgtgtcaaacaccttggtgaatttttgcttggtttcggtttcgagatctgtttggaaaaacggaaccggcataaattcaacattccatttttgtataattttaatttttgagtttgtacttttacagctgagtccctgtaatttccatatttgcatttgagccccagtgatcatacattgaggtccttgagtcagtctttgtaaaaaaaaataaaagaaaaaaaaggcagaaaggtgcataaaaaagaaaaagaaaagaaaagccacaccaaagaaaaagagagaaaaaaaaagaagaagaaagaaagaaagaaaaagaaagaaggaaaaaaaatcacttgttatcttttggatcgcttggatatatcagagtatgcttgagttgtttctagtactattttgtggtgccgtttgtgtctaggctcgcgtctctagtacgttctagcctaggaccagcacagtactgactttgaacgattattcaattttgcattatctgatttgagcatttgctattcctttgctacatatttaagcctacccagagctccacagatttgattgcagccgtacagcaagtgtttgccaagtcatcgatacatccaaactccattggggtgtttggttgagtcggtgtggacaccatattctagtttgcattggtaaaaacttgtaagagctcgatataaagcttgagtgtgtgtgatttgtgagcttccactacctcctagttgataggaacgtatatattcttgtatatgtttcttgtttgctactaactatggcagggttacacaaagagtttggagctgttcgtgctcaatgtggacattttcaccttcgacaacacatggcaagtgaccaacatgacgcaaataaggtacatgatcataatcttgcaagagtagagtctgttttgctatcttttgatggaaagtatgattccgctgcatacgttaattgggagctagccgtagaaaaacaatttgatgagtatgatttttctaatgctcaaaagattaaggctgctagtaataagtgtaccggttctacatctttttggtggcatactgtgagaaataagcttgaaacttgggatgaatgcaaaatactgatgagaaaaagatttgtgttttcatagtatagacgtgctctccttgagaaatttgaacatctaaaacaaagtgacaaaactgttagggagtactttcatgattttaaaatttgtatcacttatagtggtttacaagaatctaatgagaacacaatgactagattttttagagggcttaattccaatattcaggctgggcttgttaatgtgacatataatcaaataggccaattgttcatgcttgcttgcaatgttgagcgcaaaattttggagaacccaacggagcaacaagctatgcttgtgcctcctatcactgatattttgcaggaagttcagaacagtcctcaaaatgagaagaacgatatgtttgagatgtcacttccatcactcgcgaatgaggagaaggctgatgcacctacattatctgaagagggcataaaaggtaaattaaatggtgtagaaattactcaaggtgagtgtgcttctgatgaattacatttttccacttttcatgccagagaagagcaaccattagtgaaaccaattgctgagatgcctttgtcacaagttgatttacttgctgttccttgtgataaagaagagttgtgtgataatgcttcacttatatccatgccacaactggtgaatggacatgctatttctagtatttctttgtgtgctgattttaagcatgttgttcacattgctaatgaagtagaggaacgtgaattgctatcttctttaaatactttgggctatgttcagcttgatgatttttgtgagcttgataatttggaggagaaattatttgctaagtctgatttgccatgtccaactaatgctatttttcatatatttggcgaatatgatgatagaggaatacgtttggtgcatagagtttatatatgttcggatttagaacctcctgtacatgtggataaaacttgcaagctagagaggcatgtaatttttaatcatattacttccagtttatcttgttttgattggatgaaacaggttgttttaaatcgaccacacgatgagcaccatatggaaaaccgaggacggtttttcgtgaagaaggggaggatgatgtgactatggctactacggatacaaccattgctcacattatggatgaacaaggagatatcaagatcaagtcctccaagtgctggaatccgattcggcctcctactgcactactgacttcaaacggccgccgaatctgcatacgacctccattttcggcccttgagtacttgatggaaagctctcggagccctctttccaacggatccatcctcatcgccaatttccatatcatttggccgcaatcatataaacaaggtgctacatcacctgtcttgggcctatgggcttgtaactttgtttgggaccccggcccaagtggggcccttgtgggttgcgccccaaccaggtggagaacgaccattggcacccctttggttgtcctcccacccctataaataggtaggtaccccttcagggttactcgggttttgtttagatgaaagtttagccattgctacttcctcgcagcgcgcgtgtcgactagaccgtccgtctgcttgtattcgaaaccccaacttatcatgtgtactcaattcctatttgcaataaggttgatctgcaccggtaagatcaacaacccacggagaggtatatcgatcgctaaggcgcaacacaacgccttgtacggttgtagtcggatcatcaacatttctccaaaatcgtagttatctgaactcaccgaaagatcggggcaacaacagccttgagtttcgagtggaactcagggttcatcaccaccgcagccgactgtaacgccgctgcccaagtcgccaccgccgccgcagccgaccgtaggatggcgagaagcaaggcgagatgggggggagcaggatgacggggaggaaggggtggggcgatggtggcatggggcggagatgttgacgacagcggggccgacggggccgggcggtgatcgtgctgctgcgctggataaggaggtggcggcggcgacagctcgaggtaaggggatttgcgtcggcgttgctactcgccgcgggtgggaggaggctccggcttgccgtcctcccgtctcgttgtcctacctttgggtcggcgatcaaggtgacgatggggtcatcttcctcgagccgggaaagactgtggcagcgacgaggggagaggcggatgggaggagatggtggcgagctagctgctcggggggcgtcgttgctagccctgctcggtttggggcagtgatgctcgctagtcctaccgccgccaacaggtggttccttctccgacctgctcgccttcctcttcctcttgccttgcctgcagcgcacgctcctcggcgccgtcaacctcgtctatgtcatcgcgtccctcgtcgtcctcgtccgtccccgcggcggcggtggcgacactggggatggtcccaaatgggaggcgctgctgccaaagccttggtcgtcgggaaggcctttcctggtcgtggtcacgctcggggcatcgggatgtttgtgtttggccaaccaaacaggccgactacatttggccagtgagatggcttagccattcaaatagagagtctgttggacctcattttcttgttaagtttgctactccctctgtcccataatataagggattttgaggttttgcttgcaacgtttgaccactcgtcttattcaaaattttttgaaattattatttattttatttgtgacttactttattatccacaatactttaagcacaacttttcattttttatatttgcaaaaaaaatgaataaaacgagtagtcaaacgttgcatgcaaaaactcaaaatcccttatattgtgggacggagggagtattttttaacttggagagtgtgatggccaatctgttggagatgctctaaagtatgattatgtccctaaggagccctcgacccttccttatatagaggaaggagtcgggattataagataaataccttatcctttacggtccaagttctataaatattttataattgtaaccgattaagactacatgatactttcttgatatacaagttaacataatacacgagtttctgttactatgagttaccctgataaccagtcgagtaatgcagccacgtgggtaatctccacaaagggctagtgtgtttataattttttttactagggtgatacatagacagtcccaatataaatatatcggagcacgcatctaaacgagtgaatgaatacaaaacttggcatgaaaatatggaacgcacctttatcataatcctctctctcccaacacgataggagaccaatcaataaggcatcgaataaaggagcggcgtcgcttcgcaccgcaccacccccaaagcagaggcgcggacggcggagcccacctactccttccgccgaatataagcaacagcccagtgaatttttttgagaattaatattatttttatggaaaatcgcaaaagtagtagtcaaccggggaaaatcgcgaaagtaggtccctgtcgaacgggtgcagttcgatagggcgcctatcgaacggccagagcgtgactggcgaggagatcagaaggctgccgttcgacaggacctgtcgaacagcccccgttcgacaggcagggctgtcgaactgcccctgttcgacaggatatccgtcgaactggcgcagttcgacagggtcgcgttctccatttatttgtaataagttattttttttaataatatgtaatttattttagtgtgtaagaaaggaaaatatttttgtaatgttatatgtatatgatttagggttttgataatgtttggtcagaaattgtagtatttatttgttggttaaaatatttgaattatttagtttcattatttgtatatttgaatgataatttgtcatgattcattcgaagggtatgctactgagtaattatccgaagaagtttatgaaatagtactgatagtgctaagttaatcgtaaagtgtttctcaaatagtacggacagaacagaaatgactaaaagtttaatacaaatagataagtcaaggacgatcagtgcccttcgcacgcttgctaggtcttcccttcttcctacgcctaatctgctcagtgggatatgtcaaattatcaggggggtgcctatctctagctgcctgctgtggtgtcacgtctggcccctgaccggcctccgtctcctgcgtcggctgtgtgacctgaggtgctgcgtgccagtaatccatccctacttccccctggggaggataagtggaaaagaagtcctcaatgaatgctgtgcgaggggagtaagcaggcattccgtgatgcgtcgacgccgaaccgtactcatcgtctgtttgcacaagagggagaaaccaaaaaatatggcgtagttagtaacgatacatataattagaaactaaagcgtgttattgtttaaaatgacttacatgtgtgctgtgtgtggccctgctctggcgcacgcggagtgatatgaagtccccatgctggtgtgttcaacacgttttcccccgttggcatgtaagggaagtgtgccgacccagatgctccctgcgaggggtgaacataaggcggagtttggaatacctgcggacgtggtggtgccgtgctcgacgtgggtacccctgatccggctgaccccctggtgtactccggtgctggggtgtgctgaaaggaaggacgaccgtgagatgtgtgggccgcttcgtacccgcgacgtgaagaggatggaccactccgatccacgctggaacgtcggggtagtggtggtgatggccgtcggcccgacgtctgcaccacatctgccgcgctccgacaggagacacgacgtagtagtgcggcagcacgtgcacggaagttgcgaaggatgctcgccacgtcgtcaggcctgacgactggaggtctcgcgctctagtctttgcagcagggtgtcggactccatgtgaacgtgctcaacaaattccgcctgttccacaaataatcaaggcaattaaaattatttaaccagttgcacatttattaagagtatttaacaagatgcacatttgttagaaataatgaaccagttgcacatcatttataaatactgaactagttccacatttatgtaagaaaaggaactagttgaaccaattgcacatttattagacatactgaactacttgctaactttttaaaaatattgaactagttgctcaaattccacaaataaacacgtaccattgagttgtaagctgaactaggctgaggggcaaacgtgtcagtaatcgctgcctggtgggggacggtgctatctccttgtggaggaaaacacctccatcgtgtaacactgcggtaccaacgaaggtaagctccataataactcccatcgtctggaggtgtctgaagtgccaagttatcagctgcgtgctcccactcttgtaccgtcggctgaaccgtggtcacaataactagctcgtaggaaagcccgagcccctttctggagtacctgcacaacaacaaattcacacatcagaaaaaatgttgtgcagtgatttattttaaaaaatgtaggattaaacaactgtgatgtgaactaacctatgaagactatcagccaaaggacgaccatctctcggagggaagtcctgatacatgcccaactgtttgagaaccctgtggacattgtgtggctcgacgtgcacgtccaccacgaggtgacaagtcgtcatccagagttgcatatctcgcgtgcaaagatccgcgagaccgtgcggtgcatgatcattgacatcgtgctgagtgtagggagtccaccgaacacggtcaggcgtaagctgatcaaagtcagctacaaactgagtgtagacacgacgtgtcgtcccgctaacccactgcggctgtaacaagtagtagttttcattagtcatataaggaaagtttgtgaactagtattcataatgataacataaatgaatttaacaaaaaatacctcacggtgtgtccacaaggatcccatagtgggacgatcgtcgatgtcatcaacaccagacctgtacatctctcgcaaaccgtagtttgcgtacgagtcaagctgaggcctcccaatgtcgaagcgctcgtgcgcccacaacataagtagcaacgggcatccagggagtgaactttgcttgctgttcctcacgcaagcatcacacagtccggcatatgtcaccgcaagtaccgccgacccccaactgtactgtggaatctccgcgataggtaactttgcaatctgctccgcaaagtggatgaagtgcttgtccacggagtcagcgtgagttcccgtgaacatcacccatccaaacaaccacaacaggtaagcgactaagtgccgctgcacgatccactcctcctggtcatcagggaagacatcctgtcgaaactgattcaaccaacttttcgtaggcccgtgcccatctgtgagatcctccagtgcaacaggcagcacaccaccaaaactggccagaaggtcatccgcccatccagcattcaccattgttgggccaactgctggcccagctatcggcagccccaacaaataagacacatcctgcagagtgggcaccatctctccaactgtgaggtggaaagtgtgggtctcaggcctccatctatccacaagagcactcagaagcgccgcgtcaatgtggattcgttcggatcttgcacgtgaaggctcgaccaaccgtgcaaacgtcaacaacccagctgctctcagcctacaacatgacagagcgcaagttattaatacatgaaaatataaacaccttgtattagtaaaaacaatatattttcacacaccttggaacccaacgaggatcaatacgccaatattgatccggtcctcgcatctttagcacattgcagaaagttcctgtactaagacgtcgcgatcgatggttcctatcgatctccttgtctatcagctgcccatcatattgatcagccatacctgcagatcgaaaaccacattagtacaatgcacgtacggtaacagtacagtaaatgtatgcaacataattcaagtaacaaatttgcatgccatttcaatttaaaattacagtaccagcacacatagatacagataagaatagttcagtacatttcaatttaaaattacaagcccaggacacatatattatgatattacaagtgcagtgcagttcgaaatttaaattacaattccaatacaaatacatgacgatattaaaagtgcagtgcagttcaaaatgaaaattacaaggccgttacaaatagattcgggtaataaaagtgcaagaaagttcaaattaaaattacagacgcactaaacataaattgaacgataacgatcttcaaagtagggagtccaccaaggataatagcgaactaaggattatttttcttcttcgacttcccctttggaacgcgacgaacatcagcgcctgtggcatcttgccctacattgtacatgctgcaatctttacgggaatggttctccccgcaaagaatgcaagctttcttacgacgagaacgatctttcacttcagcttcatccataaggttcttgatcctgcgcgactggcgacgacccttagtatcaactaataaatttgagtcaggaacccaattggcttgccctggaggaggacgagtgaaatcgcacacggcacgccaaccacgcaattcaccacgccaagttgcctcccacgattcctttctaaagtagggagaaacaaaaatgtttccatcaacacccccttttgcggaagcagcaagaacatgggaacatggccgatgtaacaggtaaggcttgttgcaattgcatttgcaagtgtgatactctggccacaacgtgcattccaatgtgatgttagtagtcccaatgccgacaccactcttgtcacgaagtcgtatctcaaataacaactctctgttcccagcatgccacactctgtggattcctcccttcttacttttctcatccatgtactgtgtaatagcggggctatacttaacactgggtttgctgaggttcagactatccatggaataccttttacagagatacttctgtgtacccctcgtgatgccctccaggatagcaacaagtggtagaggttgtgtattcttcataacccagttatacacttcagcaagatttgttgtcatcacaccatacctcgatccgtctgtatcgtacaacaacgaccatttctcccttggctcaaattctacccactccgtgaagcacttcatggcccttccacgcttcctgcgccgagtaatacttggtgcttcattaggaatgggttcaagtccctcggctcctcctgtctggcaactatatgttttttcctaacctcttccatgtgtgtagtggtcaaacgatccagttgatcccatatggcatcaaactttctttgttgattctgcttgcataacttcttgaacaggtccatcaatctcttactcctgaattgtctataaaaattagccccaaaatgtcgcatgcaccatctgctatgtaaatctggctatggcacggactgtgtgacatcttcttgaagcttctgtatcgctgatagcaaaccggcgtgtcggtcatgcagaacacacacatttggtctgttttcaacaacacacattttaatgtgccgcaaaaaccatagccagcttgatgtgttctcgctttcaacaaatgcaaaagcaacaggaacgacatggctatccgcgtcgactccgatcgcggttagaattgttcctctgtacttgcctgtcatgaaagtgccatcaacacagagcaaaggaatgcaatttctaaaggcctctatcatgcacccaaatgaccagaaagcccgacgaagaacattctccccatattcattcacctcatcgagaatagccatgtgtgtgcccgggtttcttgcctgcatcacctccaatagtgggggaagattgtgataagaatcctcataagttccaaacctcatctccaatgctttctgttttgccctccaagccttgtcgtacgatatctcatatccgtactctttctcaacgtcatgcattatggtgaaaggggacaaagatgtttttctaaccacctttgaatataccatttgtgccacaaatgccgctgtcaggtttctgtgcaccagacgggtattctccaacaaacacgtatgttgctcaaccatcaaagctacccataaagtgtcatgttgtggcttgtaaccatgcactctccaaggacatccaccctgtatgcacttcacgtcatacgtcgtcctatttgaaaccttcaccctgaactcacgcttctggacaaatgcccacctcttcaccgcatcttgtaagtgacctttgtcatgaaacatttgtccaactttcacctgcttactatcataacaccagtgggcatctaaaccatcgtttaccttcatacgactcattgatatggtcgtccaatcatcgggtatgttagtttcgttgtcccacagtgttgtatcttctccttccactacaagcgcaaggtattcctcgttttccacttccatctgatccactaccgcctcattctcctccgctgcatcaacacgcataggcgaatccggttcttcatcgtccgagtcgttggcctcacgattagtaccacgaacaatgacctctccttgtgtattaccctctactacttcttcccctcgaccttgctcagtccgccaaacattttcaacttgtccaccttccaacggagtttcttccaccacggcatgacttgactcccccgatcgatcaacacatgttgtcttctgcaccacgccaggctatagcctttctcccttactttactaacaaacttcctccaactcccagttgacgcaacctccactactctccactgccatccatgttgacccctcactggccacacggcatttatgacaaatttatcgtgcactggatctaccccaaacatattatacaaccaccctaacacgtcattcaaacccatatgctccggtgcattcagactagtatcatggaaggcatatacagtcaaatccaccccgctatcacatatttgtataggagcatcgccataatacagacgaatgggcatatcacctgacatcctgataaaacatgacaaatagtctcacgtttaatcatttaatcattcgataattaccctattacaacttatactatattaccgtgtactaatttacaactattagtaacaaacaactagtttaataatccaaataaaatataacacctttgtacctattttaacacacaacatatcaataatatgtactaactaagaactaatttaaccgtacaattacttaaatacctctaccaacatttagcaataacaaatatgtgctaaccatacatactaacatcgaacaatgcgaaacaattaacaactcttaaaccaattttttattaaactttcatatgcattgtacttagggattactaatgtataccttaacttcactgctggagggcgtcgccaaccctttcctcccggccggcgcctcctcggcctcctctccggcctgctatcccctctcctcgctccctccggcgctcacggcgacgatgtggcgactctcggcggcggctggcgatgtggtcctcaaaacaaatcgaactcgcggcctaggtggacggggctttaaaccggcctgtcgaacgcccattgttcgacagggtcggtggagggccctgtcgaacgcccccggttcgacaggcctcgcggcgccgggtggtgggccctgtcgaactccctccgttcgataggtgagcgtgtcgaacgccagccgttcgacagggctttgtcgactgcccgtcgttcgataggtgccctatcgaattgcacccgttcgacagggacctactttcgtgattttccccggttggccactacttttgcgattttccataaaaataatattaattctcaaaaaaattccagcccagtcgccagcgcgcagatagagccaaacgccctccacccatagcctgacaagtgggacccacgccaaaatgtccccacatgtcatggacgcctcttgcctggctaccaagtgttcccctgcttgggaatatgtcgctcggccgacctctcgtattattgatgcgacttgcagcccaaaacccccaaaaagccacagaagagagacaggggagaaaaccctaatctcaaggccgcggctgtgagcgctcctcccgtctctcccccaacccgccgccagccaccgagctcgccaccgtctccgttgcctcgccgtgctctaggtctggatgcctgctccccttcatccctcctcttctccgtctaaagccgtcgtgtttagcctccaggggcggctcgccgcggcatcttttttttttctttaaggtggtagtgcttacatggcgatgctctatgtgcctcttgtgcgtggataggttctcggatggaggccgaggcggcggcgaagagggcgcgggagagcggtgacgcggcggcggccggtgccggcgagcaggcgggtatctctgccgtcatccctggatggttctccgagattagccccatgtggcctggttcgttccgctctcttaccctctgtagccctgttttgccattacaatgccacaccctcttgctttgtaaattcgctcgacatggactacaggttcgcttttaatttatataaaaaaggtttatatagtttataaaggagtatattgtttctttccagaattaatgtgtccagttgaatctccgattgggcttcttgtatcatgggacggagcacatcgttagggaactgataaaattctttgccattttttttaaaatttttagcttggttgggtataggggtgggcattcggttttcccggttggtacagttcggtttgttcagctttcagaaagattggtttttaataatcgcaagccaaagtgtctgtgagaaaaaaaataaaccgcgccgaatagactgatctaccttggttttcttgttcggttttcccgaataaaccgagaaattggctactcatggtacggaggtgccgcaggccttgtgcgcgcactgcacggcgacgtttaggctggctgccgtgggaattagcgcatgatctagtggcctctaggggctggtatgatgctatcaatgggcttttgcatggatcgatggaccgtggacgttccacctttcatagacatgcatagatcaatttcctggtttcttcgatttttggagataaaagaccaagcaaattaccgaaggcctaacaagggaaaaaataaaccgaagaggaatccgatgaccgaaaaaaccggctcttcggtttggattggccttcggtttccggtgattttatgcccacccctagttgggtattgctttatgctgttcaaggcttcaagcaaccgtgcagagaaacagatttaccaccctaaaaattctaaatatattaattatgcaacttgcgaataagattttttttctggccacaacacgtgattttttgcgctctagtaatttttgaaataatgtttttgagcccatggcaggtgaggcacactcattgaaggtcgaaaaggtactattccaaggaaagtcggactaccaaaatgtgatggtgtttcaggtaaagatcttttattgcaccaatgctgctttttcttcgtcttcactcaaactggagtatgaacctgtgctgttattttgctttctagtcctccacgtacggcaaggtgcttgtgctggatggagtgattcaggtcactgagagggatgagtgtgcttaccaagagatgattacccacctccccctttgctctatcaaagatcccaagaaggtaatgcatctaatttgcagattgtatgttgtataagttgtaatcctgctggtgtataacgagatgaactcttataattatttgtggttaggacatgcatgtgtgaaatatattagacataatattattagaccttgtcgagaaaagtttgctcgtattcttttgttcatatcaaccatgcacttccaagtactgatgatgataatattttttactgcaacaaacaccaacttaatgacaaggaacttgacaacatgattttggactaattcagagccaaacactggcaacatgtttgctaccctattttaacatcaagttttgagtgaaaagttccatggaaacacaagcaccatgtgaattctagggattcctaggattttcctgcacaaacgttgtcatgacccgaggtcatgacgggataaacaccgccgggaagatagccgggcggcgtcggctcctggagaagggatgtagattcaggctagggagaagaacattattgggagggagagattagactaattgatattcattgcttaacttgagatgaatacaatccatcccttatatagagatgatatgacttgacccataagaaactaactcaaactaactctatctaatcctatcctatctcctaaccgactgctacagtactcgtggtactgtttatccgctaggacttggcctcgtgggcctcggcctctctgcccaacgcctatgacaaacgtgaatgcatttttacattaacagaatcttgtattgttcttagttttgctacttgtcagcattcctattaagttaattcttctggccagaacataataaagtaccatttagttcctttttcttgcatcttttttaaatcgacgtggccaaacagtt

SEQ ID NO: 14535 - DNA, 21626 bp, Oryza sativa
tcaattcaaattatttcatgtgatttttttacacagaaaaggttgggttacctgtgggaacgactgctccggtcatttagtgcagtggcgccgactgcacggttcttctgcccaacattcatcaattccatcacgtccattgttgatgcgacacagacaaggcttgcatccggcacattaagtccattctgagaattatttcgaatctctaatgtatatacttgttaaggaagactatttacttcagcagtacaaaataatttacttgtgaaagcaatttataacacaaataaagtggcacaatttgatagaaacatgctgttgtgaggatatcttttgttcagaccatcattgacaaggaggtccctgacttgctcattataaatctctatcatttgcacagcaatatcataaatgaatgctcctttcctttgttcggcaagcttaaatagatcacttagtgcccgataatttacaccctgggtttgctcagtcatgttcttgggcccactctacataaaagaaatagagaagatgttaatggtacatgaagggaatccatggtagtatatgctttagaaacactattaattgatatcagtcatatatattgaccaaatattgttactgtactcaccattgtatatgtcttccctgaaccggtctggccataagcaaagatgcaaacgttgtatccatcaagtactgagcgaataaggggctgggtatctaagaacacctcatctgcacgacaaaaaaccattcgatcttcttccattcaagagctcgaaaaaaaattgagaaatggacaggtagaaaaccttgtgttgctgaagggccaaacaccttgttgaagctaaaagtctttcgaccttcctttccagacttggaaggagtgatgatggttatattgccctcatcaattgaacccacagcacaagaacttacttgtccaggtaaaaagggtcgtactctacaatataccctgatactccctataaacatggaaaataatcaaaatacatgctttctttctgcttctcacagcacatttttatccttaattggtccagaaacacttggcatgaatattcgatataacaagcatacctttaagatcttgcacttggttgtacagcttgcgattttcttcaagaactatatgataacctgaggcagcatgtgcaaggctaaacagatgccttcctggaataaaatttgcaaatgcatactttgtttattagcgttatattaaaatagttagtttaattaagcacctcgggcatgcccattttacctaagatgttgatgtcctcggagtacttcatttgcataaactccatgccagcttttgtagctctaatatcagccttgagttcctaaagaaaagaaccacaagcagtaatataaatatttaatcaccaccaagacaatgaaaaataaaatgaataattaaaataatacctcaacatgctttgactgtagttgtagcattgaatattgcttcagtgtaacttctccatatgcttcctttttggtttgtctatgtttggagtaaacctctatcgtatccatctatagaggaagcaaaagaaatgttggttggaaactaaaaatagtagctgctagcaacctacacctatctatttttgtgattgcaacagagattcctacagcggttgaaaacaaatattttgaacatactaaataagagcaaatttatagcttgcctttttctcattagaatttggggtggcttcaaccagaacctttgatttcgagaaggatttggtgccatctgtaccatttttcagagccgccttcacctgttccaatgaattaaaaatttgattgtttatatcatttccaggcggcccagtctacatattgccatatgtcacgcagaaaacgatttcaaaaacaacagataagaagtgtacaaagatgatatctaccaattcatgttggctagtcaatcgattctcgaattcctcgacgagtttactcagcatggactccaagagctgcaggcaaacaatagcataaaaactccaaggaaccggtaaagcatcacatgaaagggaaagctgcttgcatgtatcccattgaaccagtaaacagcttactaaaaaatggggaacctgattggcctacctgtggaacttcgtcgggcctcttgtcggacaaaactgcactaaccaacattttcaaagggcgtgacgtcgactgcacgaagcattaaccgtttagccgcatatcgtctagcaaaacaagacaaatacaaagcagcttcaaaattgaagcacggagctaaccatgtcaccggaatcaagatgataatcaccgctgaatccagcctcctcgtaaggcacctcgccctcgttcatcgattggcacctccggaatggctcggagttcttcctcacgaacgacttgccggaagccgacggcttcaaattccccccgtatttccatggcccggtgccaccacattgtttccagtcaccgtacgacttcaatgccagtacgcagttcaccaccctggcgctcttccctccctgcgcccagaaaggcaaaaaaaaggcgcgcgtcaaaatcacaggctccacaagagagtgtgcctaaagcaatcgacgatgagggtgatggccgctttgctgcagctgcaagcaacggcgcatgggggccgggtggcgcgctccgacacgaacctgctccaaatcggaggcctcgaaacacggcaggccgatctcctgcgccgccacgaggaagttgcgcacgttctcgaagtactggaacgccgacagcgccgcgccgtccggctgcagcacggagtccgccgccgtgttcaccaccacctgcggggcgcgcgcgcgcgcaacatcacagcaaccaaccatcacgctacagtggcaaacagcgcagcgggagcgaatcaaattaacgaacacaacgtgtgcgcatgccttggggacggcgcccgggtggaccctgttgagcgcgccgcagaggatctggccgttgcggaggccgagccggaactcctcctccgacggctcctccggcaggtcgcgcgcggccaccgcccccaccgtgcggcgcagccaccccgccgcctcgttccgcctcgccgctgcacggaaccaaacaatgtcgcgtgagcgagcgaagccagccgatagcgggtggcaaattggcaaaagaccaccacgattccacgcagaacacgcgaagcgacacgacacgacacgacacacgcaccggcttcctccgccctgcgggaggcgaggtcgcggtcgctgaggcggcacccgtgctgccgcagcacgtcctccaccacggcggccgcggagagcgagaagagcgccgccgcctccgccatccgtggctcgcgcgcggtgccgcctcgccgctgcagctgctccgctccgctccgctggtctgtctggtttgaaatggacggtggaattagggaggtggcgagtccattaatggggcgatgcgtggtggttttgtgggggtggttataatggaggggggaggagacggagaggtgggagctttgtggttagctgcaatgcattgcgattttgcgatgcgccaatgcctgcgctgcgtgtatgcgcgcttttctttcggctgcttcgggcttaaaaattgtggttagtggaagtggatttcagttttcatttcctccccttttttgtcttctcatcttctgctcttttttctttgttttcgccgctctggcgttttgtttgagtaaagtgtactctgctccggtgctccctaactacagtacggcggccgcttgtttttttttctgttgttaattttttttcataacgaaatgataaagattggtccacgctgcacatggtattttcttttttaaaatacaattatgtgctttattcaaatataacattgatcactatgaaacttaaggcttggtttagactacgtggagcaactaagacgtgaaaataatcggtgaagtagctaaaaacaatgcaaaaatattttagagataaaccgtgttcgtttcggcattttggtgattagccgcttagcttatcaggaaagacactcaattagtatacgattaactaactgctagctagtacaaagttaaaattttgagttgttttaatcttttaatacgaaaagtttttcttaaaaaatgcaccatttggtgaaatgtgttatgtatatgtgtttgattattttatttttttgagaaacacaatacaaaacagagcgttttgtttgagtaaagtgtactctgctccggtgctccctaactacagtacgggccgcttgtttttttttctgttgttaatttttttttcataacgaaatgataaagattggtccacgctgcacatggtattttcttttttaaaatacaattatgtgctttattcaaatatagcattgatcactatgaaacttaaggtttggtttagactacgtggagcaactaagacgtgaaaataatcggtgaagtagctaaaaacaatgcaaaaatattttagagataaaccgcgttcgtttcggcattttggtgattagccgcttagcttatcaggaaagacactcaattagtatacgattaactaactgctagctagtacaaagttaaaattttgagttgttttaatcttttaatacgaaaagtttttcttaaaaaatgcaccatttggtgaaatgtgttatgtatatgtgtttgattattttatttttttagaaacacaatacaaaacgcaggcactcacaaggccggcacccgtctaggatttgaacccaggtgggctggttccaccacaaggaacctaaccagtcaagctatgctcacttcgcatatgtgtttgattattgctgtactagtatattttatattggaaaatgtccatataccacttctaaactttagctttaagttaataatctaatcaccataaactttaaaaatgtccatttaactctctaaactttacaatattgttcatattttctaaagacaatggaagctttattgaatttaaccaattacatttgttcatatagcctcctaagaggattttgcaaggtattatagttcctgaaaacatatatgtcatcttgtagtgaatcatacttatacgtacaaatgtaggcgctcaaacaggtgtataccacccatataaacgcacacatgtacattctaccactatgagcacttttcaaaagactgcaccgttatattttgagatttacgctatgagcacctcctagcaaatcatacttatacggtataaacacaaacactcaaacatgcgtacactcacaccctgtctctacgagcacttctaaaatattgtgccaggatatcttgagattgacaaagtcaccacagatgtctcgctatcgataggtacgttacatgccactaaaagaataattagttgtaaacttgaacccaggtgagcagatcccactgtaacccatccaatttagctaatctcacttcacatacttgcaggtgtaaaactaaaatagcctagtattaaagtagaattgctagtggattttaaagagactagcgtgggaatgtttttttctaaaaaaaaatcgagtgcattcaatttcagcatttcttcaaacttataataagttcttttttttttacctttttatctgctattatgtgtgaaactactccgtcatttccgctaactccaacattcatgcattctctgaaaacgactgtctcaaatgacaaggggtcgtgaaggttatgcacagaacgatgtttttggcaagtaaagtgactccatattgatattactggtttggagggaaaaaaagaagagaggtgaaatgttccattcagccgtacctacgtggtcatcactaactaactttgttgtacaatttgtctcgggatcaccaactcaccatgtttgaccttgccttgatccaccaggccacccccacacagtagtgcatattgccacttctctttctgtaacaccggtttttcttcttttttttctttttgtttggtaatgaatattcctagatactggagtagtagtagtagtagtagtacctgcatgttgtatgttttggtgaattttcgttcgtcctgtcaactaacaacattaacagttcagtacaaggagttcgattaattcatgtaacaaccaacggagtgcaaatttcttcggacacattgcaaatttgtcttgacccatcagctttaaaaacgaagtgtatcggttcacaacatttcttcgccgataggtcaagtgtcagtgtgtcacggacttctcatgtactttgccttaaatttcaagcatgatctgaagtgaagtactgcatttataagatgggatcatgggacgttgtcccaataaaggactagctaatgcctagtatatgtgatcaaattaagtggagtactataggttgcaatagtaattgttacatatagcatgttttttaccgaacttttttccattttcttcttagggcttctttgaaaaaaataatcagtactattgtttgttccaaagaaaaacagattttttgccgtttgcaatatgttgtgatgagaaaaccatcaatgggagacactagggatgtttttgttacttgaacattgtaataagagtaaaattcttagttctgtcggtaaatacaatacccgttttgttggtaaatatcagttatgtaaaaaatgacaaatgtttgtgaatatataacaatacgagttattgccttacacttactactattactgaatataaaacattagtaccaactttcacggtacaatatatttacatgttgtgttgtatactgtaggaaactgcgctaaggcatgcaagtggcaggaatgaagggccattttggattggtaccaaaatgtgccttaccaattttattggtaccttgaatagtaatagtatgggtttgtattgaagccaaattattggtaatgtcaatgattaatttgtcactaatttagaaccttcttctctatatcatcaatatttggcatcatattggtagtaatccaaatatgtataataaatctctaccctaccaaaaaaaattgtagtaccaaaacatgtcaaaagtttgctactaccagtgttttggtaaggtagagaatcaaacagccccgaaaatatttttataaagaaaaaccaggagaagtatttagattgcactcggtcaaatttgtaacccaaaagctccaaaacgggggagtagtcgaatccccgtcggacctgatcgcctgcggccccacgcacgctctcgctccgctaatctcctctccaacggtcgcccacaatttaaaccggggctcgcatcgcacggcacggcacgctcccactcccactccgccgcccgctcggcttggctccgcttccgccgcgggcccgcgcgacgaaagcgatggccccaccacagagatcggccccagccggcgcgcgtctttgggagggaggccggcctccgtgagccggaggtaaggagaaaaaatgggaggcgaggtggttgccgtcccatgaaagctaccggcggtggtggtggcgggcgtggggcccgccgtgtcagagcgcatggtgggagcttcggatcttcttcttcctgtagcgacttgcgacgcgtggtgaactggtgaatggtggtctggacttgtgtgggtaaacaacaacagtagtgggtcaaggggccgagagcaatcgagcgtccagtagaaagcaatgaaaagcatctatacaaagaaaaggaaagaaaaatgtaaaggacatggtaaacaaggtgtccgacctggaaatgggcatttctctaatcatgtccaaagctgggattggttagtcctagtactgaaccaccgatgactttaacaatgagtagcaacataaccaggtgaatttgacacggcagaccgtaaaagaagattgctcttgaaaaaaactatgaggtcctgattggtagtagttggaacttggaagaaggcggaattttttttccccacctagtagaaccaaaaaattataaactgcttttgataatcgtccaacccgcatactctgttcatatgcgaagaaccgaggacagcgaaaacgtaaaaacctagggcaactccttgatttttttttctgttcatttttctttagatgtaacaacccccaaactaattaatagtgtgctacaagcctatacccataatgttgtttcctatgaatcatttgttggcatagcatcgtgcctaaaagtgcactactggcaatggtcgccgtcccttttaatttgttctcaatttccggcgttaggtgcagattatgggggtccatttcgtccgaaacttggagcgtgtcatatggaccgtgcgtcaccacgtcccgcctgggttgctgtcacgctatgaacaaatctgctaatgtacgtaggacacagaagataatatatcaattaatttcgcaagcttgtactttaccaaatccattttgtatcccgtggtcacgacaaaatctaaaatgcttcctcatttttggaaaataataaaagcatttttcgtcaacagtttaacaaactatttgaagaattttgcaggaattatttcgccaccgtttccggatgattgatatactctctgtccaatcacttagcttgcactgtaatataatgcgttgttgcaacattcaggggtaagcaataggacaggttaattatagtactgtggttagtactacccattaagagtaagtcttctatctgacagcaacaaatactctgcactctactactctaggactgttttgattgccaaattaaattgaccctggattatccagaagctaacacattacttagcttaataataattccacgggtacgagacacgtctcttgcactaaactgaagaaaagctcagtagtgctgagcgttgtgtagcacaaagtaagcagcaacaaccaccggccttacagctaaagcgaggaattcccttagctccaaatccaccgttctaacgccaaagcctttttattcagtgtcgatggatcaaagcttgacgaggaagagatctcgctccagaaagaaaattattggtaaggttgttgttaggtcgtagaggtgatcggtagttccctgtgatcatggcatgatccatcttgaatccttgcttgccatcaacaacagctactctacctgttatgtgttacttacatctgcagctagcttcatctggcaaagagagatacgagcacaaaaggaacaagctatatgtgcaacctaagaacgactaagaacgatctgcttacatctgcagactgcagctagcttcatctggtacagatatggcagaaaaggaaccagcataagaacaatctgctttatgcctgacaacacggtattctgagctctgatgaaatgtgggttcagaatcttcagctatatctgtctacaacctatggcaagccaggtcaaaatggaaaatgctggttcttcttccatgggtaacacaagaaacagagaggatcaatgcctcactggaagcgtccaaagcctagtccactttaagcagctacttgcaatgcagtgtcgggcagagggaaaatcatggggggaaaagcgtctgccccggcggccatgaaaatggcctgcctgcctgtactcaagttaaacgcaatcatcgtccttgctttcactggattgaataatggtccatgcttacttagcaacagtccagattagaaattttctactgaatcatgcactcgctaaccactttaggaatcctgccattttgtgattgctctcgtcttttccccgtacgccaacttggagagcaaataggaacaaaacatatggtcctgcgcctatcggtgcgttcttctcttcagcccaagcctacaaaactgaagtacatttcagtgacagtttctcaatttctgccccaattttgtttcgttttgggtgattaatttgcagggaattttaactgctatgaagtgggtagttaacagaacttaccgacagttccaattttcttctgaaaaatggatataaaaagtggagtaaaatggaaagggaaaagaagatggtccaaaggtggctccttttcgctgggtgtggagctggctggctctgagatgcacatgacatagggctcaagcaacactcaaaagaaacatatgccaatatccttccattgccttttccccctctaccctgatgagcaaggactgtacaactctctctgcccggtctgcttgagccattggaaacatctctgtgcagcaatcaagatggccaggtaggccttgaagagctttggggtgcatcattgtctcagcaccgtaaaggagaggaggagggcgattggtggcaggcagcttggcaatgcgattatccaaatgcacacatagcctcttgacaactcatttcacggcgaaagctgcctccaaagactcaacgatgtgttggcaccgagaaagatgttacgactactaatttagggaaattgcagcggctaagtaggagttgcacttacgtgtcatgttcttttttttcccctgaacatacaacatgaaactatcaaaatgcctatgcactgccgacactgcgatcctgcctgtacatttgaagctttgctcatcgtggagagctatgttggaatttggatcccttgcgtattctgctgggggaatcatggcctgtgcttgcatgtgatgttttcagagactaaaatctactagctcggttcgtatattcagaaagctcaaatgattgactgctaaagtttctcctttccaatttattttagagattttttttctaaatttttcaattcttgtatgaacatttcaagataaactattgatcatgcagcaatgttgtaatattaacttcgagacccgagagcatctttcattagataagataagcaaccaaaggaaatcattgcgggagcagcttgctgagtatatgtatctcaaaaggcaggggaaacgaaatgaaaatgcaatggaaagtgttcttggatgtatagattacttcactgattggcacgggttatgatcaaacagcgctacgataagctaatgcaaaattaaacatgaccaggctacctaatctaaggggatcttaatgtaagaatcagtgggcgatgccatcattgcacaggattgagagaatggcttccagctcactcggggtttccaatcagtaagtatatggccatgatttctcggggtctcgttctcgccgggtcgtctcgatatgatagtctgcttccttgcaatatgatttctagagaatcacgcgtgctaatccaaatggttttatcgtggcaaaattctactcacgcataaccggagagataaattctactcacgcagtggcccaattcacggccttctcaggaccgagagaacttggcccagatagcaatactgggaggaaaaagtacaacgaaggtccctcaacttgtcatccagtcacaaaatcgtcccccaaccaagaacaaatatccggcgtctcttaactaatcaaaataggttaaaataggtacttcgatgattttaacccggttttatcctatgtaacagctgagtcagcatccatatgtcaggatgccgcatcagcgcacactctctctttcccctcgtctcccttcctctctcctttttcccctgggcgttgtggatggcgacagcttcatcgacgcagcggggaggaggtcaggaggcctgtcgtggccggcggctggcgagggacgactgcggcggtcgtctgccttccctcctcctcctccgcgtgccgtgcggcgccattgccgtggtcgagagagcggagcgggggcggtgacggcgggccgagccgtcgggctggacaaggctgtagagctcaccgatgcggtcttccttacctcctcttcctcctccagctgcgccggcgccgccgcggatgccgccgctactccgctccgctccaccgcccgagtgctcgcctgccgccgccgctctgctccgccgcctgcccgcccgcccactgtagcgctcgcccgctgcgcgctcgcggccgctcactagcctgccgctgccgctctggttctccaactctgcatacatatacctctctgtctccttcatctagatgctcaaggcattcatgcccgtcgccgtctactccctcatcgtctccttccacaccgactccttccgccgcgcctccatgctcaacatgctcggcatctccgcgggcgtcgccgtcgccgtcgccgcctacggcgaggcgcggttcgacgcgttcggcgtcatgctacagctcaccgccgtcgccgccgaggccacgtggctcgtgctcatccagatactggtcacctccaatggcaagtcgctgaacccccatcacctcgctctactatatcgcgccgtgctgtctcgtgttctagacgctgccatggtacttcgtcgagctgcggatgccgccgccgctccgctccactccactgcccgctcgctcgccgccgctctgctccactggtcgcgcgctcgcccgctgccgctccactcccctccatcggctgccgcgtgctcacccgcctcctcgggtcgtcttcatcgacctcctgctgctcaccgtctcggcgcaggcgaaggcggcgccgccgtggctggccgcgaacgacgtcgtcaccgctgtcaccgccgccggccgccggctgccgacaccctcctctctcgtcggcctcctccccacactgactagcctgcgcaaagagatgagagagaggaggaagggagagaagaagaggaagagcaaggggtgtgacatggaaaccctgacatgtagggctcatatggtcgcacgctgactcaatcgtcgcgtcatgggtcccacgctgactcaaccgtcagatggttttataagttaagagatattctatatctggtattatggttgaggacgattacgtaactcaattacaagttgaggatcttcggtgtactttttttcatactgggaggaggcatgtgggattgtgggccatccacatggttgcgagttgcgacccacagcaatggcagcagtctgacaccattgtcggtggtcgaggtggcattaccgacagagcagaacagaagatgagaaagaggggaaaacgaacaaagatagcgatacatcaactcagggttagtacattgtcaagtctaagctttgtgtcgtacaaaaacacaaaacgctcacgaactccgcggcacacaggctgcgacgagacgacgactcaaagtgatcgccgggtttcccagcgaaacgcccattcctctaccacgctatagccagcgtcgcacacggaaacaaccgcacataacacattcgcgcgcgcgccagcgccatggtcaccgccgcaggctccccctcctcctcctcagcccgcaagccagcctcccgcccgcggctgccatgccgcgacatcctcgtccacatcgaggcctacctctcccgccgcgacggcgtcgacaacctcctcaaggtctccctctacgccgcccgcctcgccctcgccctcgccgccgggcagccgccgctgccccacgccgccaccgcccgcctcaggtccttcgagtccagcgtcggcctcagccgcaaggccttccgcctcggcaagttcgtccagtccatcaacgccctccgcgccgccgcctaccacccccacccccacgtgcacccgctcctcgtcctcctcgcgtacggcggccagggcgtctacaacttcctcgagcagttcgcgtggctggccaaggccggcctcctgcccgcgcgcctcctcccccgccgcctccatcgcatcggcgtctgggcgcagctgctggcgcacgtcggctccatcgcgatcaagctggaggaggtggcagagctggagtgtggcgtcgaggcgcggctcgaggaaggttgcggagaggagagcgaggtggtgagaacgctgagccggaagctgctgctcaagctgatgtcccttgtgcaggacatggtggattccgcgatgacggtaggggacgtgaccggccggaagggtttgctcggcagctcgacgctaatggcgtccgccggcttgctgtccgcgctgatcagcgttcacaagaactggaattcgtgctgaactgaaagcccaccaaaggtacatgttataaaacatgatgtaattgaacaataattaaatcttaaagtggtgagagtttgaattagtaaatcaaattactcctggactctggatgtcggggtataaattaatcaaaaggtggtgctggtgcatttgagcggatacaaaaactgggctttctccgccatggtgatcattcaattttttgctcatgcttctccttattaacaagtgtatatcaacaaagccgattaatatgtttcctcataattttttatttctttctggaactatagcctgtataaacttttttaagatatataaactgtttacactgtaaggctgctgtaatactaacttcaaaagcatctttcgttagataagcaaccaaaagtaaataatcgtggagctgcttaccaagtatataggagtatgtctcaaaaattaaagcagagggaaaatgaaaatgcaacggaaagtgttcttagatgtactagtatcccctgattttttagattacttcattaattggcacggcttgtgatcaaacaatgtatgctatcccaagctaatgcgaaattaaacacgatcatgctactaatccaaggagatattaacgcagtaagaatcaatgggcgatgccatcatgcattcttcaaagaaaagagtggcctccacatcctctgaagtctgaattccgaagccaggctttccggtcagtgccagtataaataaacatgatttatcgatatgataggctacttaatttcatgtgatatttactatgcatccaaaatcacaaatggtaggtgcgttgtgagcgtctatatttgtactgtgtttctagaaaaaatcacagatgattttgttgtgacagaattctatgtatacataacaagaaaatcccaacaaagtgggtcaggaaacactgggcttaaaagcaaaggtccagaaagatgataaagcggcccaagaaggtccaatgtaagagtttaaggcccatttgctaggctgacgcatgggacccatattgcggttcggcccaatgacacgtcacccttcgtcaagtccaagttccaaacccgtacgaaacgcccactcccctaccacgaccagcccgcaccgcacacgcaaccaccgcccaactcgcgcgcacccaacgacggcgccgccgctccgcctctctcttccacgcagcaaccggccgccatggccgccgccgccgccgccgcgggctcctccgattcccgcaagccagccgctcacccgccgccccgcgacttcctcgtccacgtcgaggcctacctctcccgccgcgacggcgtcgacaagctcctcaagatctcccgctacgccgcccgcctcgccctcgccgcgggcccgctgccccccgccgcctccgcccgcctcaagtcgttcgagtccagcgtcggcctcagccgcaaggccttccgcctcggcaagttcgtccagaacgtcaacgccctccgcgcccatccccatccgcccccggccgtcgcgctcctcgcctacggcggggagggcgtctactacttcctcgaacagttcgtgtggctggccaaggccggcctcctgcccgcgcacctcctcccacgcctccagcgactcagcgcctgggccgagctgctgggatacgttggttccatcacgattaagctggaagagatcggcaaactggagtcttccgtcaagatgcggctgaaggaaggttgcagggaggagagcgatgtggtgaggacgctacgggtgaagctgctgctcaagcggatgtccgttgtgcaggacgttgcggacgccgtgatggcgctaggggacgtgaccgacgggaagggtttgctcggcagctcgacgctcatggcgtccgccggcttactgtccgcgttgatcagcgctcacaagaattggaattcgtgctgaagcccaaaggtatatatatatgttgtaaaacacgatgagatgaaataataaagctcaaactggagcaaaattaaaacaataaacaaaagttgtccctggattatggatgttggggggtataaatcaaaagcgtggctttatcaccatggttgttattcaatgttttatttgtgcttctccttaaaaagggtaatggttctcatcaaaaccgaaaaccgattaatatgtttccatatacctttctcctttatgtaataaagagtttgtgttctttcaactataggtttaggtttatgtaaaaggtacaatttgtagttagaattaaaaaagagaaaagctaaagacactctggcggtgacttcttctcaatgtcttgtatacatagccatgccaatgaaaattactttgcactttgcagcactatattttcgtatatcaatttagtgattggtcagcaactcactataatatggcctgcatgcacaatgtacatgttagtagaaagatacttcaaaatattggatatttaaatcgtcaccgttttatccttttttctcctctctgttcatatcaaagagaccaaggaaaacttgccgagttgaacagcataaacaaaaactatgaacagcatgattaaagcctgatacaccatggaactgaactctgtagcataattatgtgaagtggatgaatacaagctgaaaccatgaatgaacttgacaataagatgaaatccaagcctgattatagttcaatacagttctagtatccagtccctcagtctgtgattctttgttttgcagaatcataaatcaatagtacatggaattgttaacttgatctagaaactttgcctaacatggatttgatacatttgctattatgcttgattgctacctactactaaattagtttaactcaacatgcaactatgcatagttggtaaccacctgcatcttttactagtataaaacgtaccaaactatctaattggcatgtattcatagattccctgagttacatagtgaacacatcaggattggtgagagtgttgcaactcttatgtggaatatactataataagggcaccgattgtctggtattgtgttgtgcttgtacttgctgttttttttttccagtatgtagtccacaacaatttgaatgagccatttcggattttcctttttatgaaaaccttctttgtttagttcattacttccaaattctaccaagagttgccctgcagagcttacaggcggtcaggtagttgcttcttatgttccttccaacagtattggccccctggtgtataaagttctactgtactttctgtgagcactgaagatcacttaaaattcactcttctattgaaccggtgatgatggagggctccggcactctactgaggtaagcagttgaaatctccagagggcagagatcactggtctgcactaacatatttgtgtctgttaagcaccattgacactcaaatgtctgagcaatcgttaagcatcttagattggtatttcagccacgttttggattaagaggctgcatatgaagaattgattgtcgagctaagaaaattgcatatatggcaacacaactctggttactttgattgtagtaatgtcagtttaattactcgctgttctggcattcagcaacggctgacaggctgagtaggtgctgtaatttaaattcatttaatcatttcttcaattgctcaaagaaaagagaagaagccacaatatagctattaatattaggattgaaacagcaggatggtattattaacctattagcagttgacataaaaatgtatcctatgattcgatgcagcaagttacttctatttctgtcgaatttgatttgttcaatgcctgctgaaaaaactcgatttctaatgcctgcttataatttgactggtaggaaagaaattattctgggtcgtgatgaattgccttttgggcgctgtttgacagtttgagacggcatgattttggcaaatcatagctgctgtgattccccttggtgtgccccttcactgaaatcacgaaatgccatagttgtctctaacctagatggaagaaactctcattaatcttttgcacccagaccacgacatgaaaacagatttctgttttaatagcaatacctgccaaggcgaccaatcatctgattcctactagtgctgcagcctgcaggctcgagtcctgccctgtccatggagcaggtaaagctactgcaactctgcgagtactcgggtcgggcacaaggcgatgccgtcagattccagcaagggaagggagaaaaaacgagggccggccgatgcgctccgaaacgaagcaatccgcgcgtctccttttccggctccccgacgagtcacgtacacgtcagtctccaccaccaccggcacggcacggcacgacactgccccccaccgctggcgcacccagcgcgcgcgcgggcacacggccgaaacccaccaaaaaaccgatggaaaaacacgccccgcccgaaacaccaatcatccgcacagctgcacaggcatagcagcacgtgagaaaaccgggctgcagcgtgtgtacgttcgccatcgataccgcggcgagcggggcgggggcgactagtccaactccagcaacgggccaaccaaccactagtagctagggagccggagccaggaggaagccaccagcccggccaagccagccagccacccctaccaacgcgtcccgtgcgaggagagagaggttgcaagcgaggataaagcgcccgcacctcgccgtactccgatccgatgcttcccccctccgtcccctcgtagcctccgcgttcccccgtccccgtcccggcgcgcgcacgctcgcccccctttccgttttcgagccgagctcctcgccgccgccttctctgacctgcgcgtggtcgtatatattaaaccgattcaaacccacggggtaaccactaggcgctggaaagggaaaccaccagataagctctggagctggtattggattagtgggtggtggtggtggtggtggtgcgaggccgtcgctgggcggtgctggttttctcgcgcggctggtgcgatcggagaggtgggtgtgtgcttgtttcggcgtgtgatttgggcggagggatccggcgatctggttctgattcgttgttttttttcttcctcttggtgtgtagggatggggaagggaggggaaggggcggttcccgtgggggagagcggcgggcggcggcggaggaggccgggcgaggacggaggcgacgacgacgacgaggagtatgtggtggaggaggatgaggaggaagagtgcgacgaggatctgtctgcctcgagcgccggcgagggaggagagggcacagacgaggaatacgaagagggtgatgaggacgaagaggaggatgagaccccgcggccgaggcagcctgtcaagagccgcgagaatgggcggaaggggaaggcagacccacccgttgcgcgatctcgtcgacgtaagtacgaggatgacgatgactactcggaagaagaagacgatcgggtcgacgagtacggcgaggatcttgaggaggaggaagaggatcttgaggaggaggaagaggaggacgatgaggcgccacgatccaagcgcatgaagaaacgtggtggccgcaacgtggaggggaagcttcctctggagcgatcaaatcgccggaggtatgaggaggacatggactttgaccctgacatggatgaggaggaagaggaggaggatgttgatttcgatcctgaagtggaggacgaggaggaagaagattttgaggatgaggaagatgatgaattggaagcgactaaggtgagggttaagaatatggggcggcgaaagtctactttgaatcagcgacgagggaagatgaagagcagctctaaggtggccagtcggaaggtgggttcagtcaaggcaaggaacgctgcgtctataagacggaggcagaaaaaacgttcaatgcttgatcgttatgaggatgacgacttcattgtggaggacgaggttacggctgattggcaaccaaggaaaaaggctagaattaggaagcagatggaggttgatcctccgacaccagtttttgaggctgagatatggcctactattgattcagacacgacagacttcgaatttgtaacatccgatgaggaagcagccattgctgagcctactagggttattaagaaggggaggaagaaaagggtatttgtgtcagattcatcctcagattctgaattcgttgtatcagataaggaattggggaatttgaaggagtctgagcctccagagtctctgaaagtgctgccttcatcacccaggaagatttctgttacaggtaatggggagcacaaggggaaggagaaaaaggaaccacaggaggctggaagggcaacgtgcgggatttgcctttctgaagaacagagagtgactgtgcagggtgtgctggattgctgttcacactatttttgctttgcatgcatcatgcaatggtctaaggttgagtcaaggtgtccgttgtgtaaacggcggttcacaacaatcacaaagtcgtcaaaggaggatactggtttggaactgacaaattctgtaattagggttgaagaacgtgatcaggtaacctttccttgctgcggttgtcatataatatcaaatccgacagctaaatttgttaacttcatttctgatttatatgggcagtctattcaaaataatattcatgaatatgtttactgtcattctgctgtacacgtttcatttattcttataaatactcttatcctttcattatttttatgtgacttctcactgttactgcgtttgttcatttccatgttagaactagttgccttaggggacaaatgttatttggagaactaattttcggaactatttttcatttaccatttacaaatcataggcaatgttattttttgcattagctttcctggtacttcagctatatacagtttgcaaagccttccccgtcttaatggtctttgcagagaaaagttattcttgctaatctggtggagattttccatcatcatactatgctgtcaatataaagacaaatctttattgctcttacgatcaagtatagaaagctatttgatggatgagatggcataggatatctgaggtccaacttgtggccagatgatggggaggctcttgacaacgccttcttttgttccaaaaatggagggaaagggcaaacttcatgtttggtttatttttgtttgttgatttctaaaatgccagagatctagtgttttatataagagtttgttatgtacagtgcaataatattataatcttggaacatctgaacatgtaacatcctgcacagttggcgttgttggagtgttcaatgtaaaccacattaattccctggtttgattatgttcttggacatcatatgctgtctcttgatttttgcacaggtttatcagcctacggaagaggaaataagacgttgg

SEQ ID NO: 14536 - DNA, 5967 bp, Oryza sativa
taaatattaaacgtagactattaataaaactcatccataatcttggactaattcgtgagatgaatctattgagcctaattaatccatgattagcctatgtgatgctacagtaaacattctctaattatggattaattaggcttaaaaaatttgtctcacaaattagctttcatttatataattagttttgtaagtagtctatatttaatactctaaattagtgtctaaatatagagactaaagttaagtccctgatccaaacaccaccagatcaagcataatgtccctttctatgagaaaattcaatgaacaagaaatataacaaaaactagtaggagcatgagttaggtgctgccctcctcccgacacgcaaaacgaaatatatattattacataattaattaattaataactattttttcctaaaaaataaattaatatgattttttaaaaacaactttcatatagaatttttctacaaagcgtgtgcgccctggtaaaaaaaacaaagtgtgcgcgcggaaaataaaagagggaaaactaggagaagaacatagccttagtggtgagtacagctggtgaacccagatcactgcttgaaaagcttttttctttttgctacagtctataaatcgaaaatagattatcaaagtagcaaaaataattaaggttatatttttacattttaattcttagttgtccaaaaggaagtctaggtaatgaaagcaatgaaaaaattaacaaattaattctaaaattcaaatcccaaaaaatgcaaatttgctcatgacctccgagtttttgacacaacgggctgtaaaaacacaactagcatgcttttatccattaacctaagggctgttctaacaaccacaggttgaaaatggctaattagtggcatgtaaaatgaaaaacctaattaattgagtatttttcaaaattaaattatgaattataatttattttattttttaaaacgattttttataaaaagttttaacataaaacatatcgtctagcagtttaaaaggtacgctaaaaaatagagagagtagcgaaacaaatcttcactttacaacattccccaagtccaaacgatcatgcaaacaaaatcgcctgaaacattttgtggcggtgattactcaacttaaggtgaacaagagagaacaaaatcacaaccctattagaaacagagcgaatagttttcgctgcttcagagaaaagcgaatacaaatatctttcggtttggataattttcagatagctcggatacagatacgaatacggatatttcctcccggatacgaatacagatatggtatcagggtttccgccggatacggataataactcggatatccgactaacaatgctattcggatatccgcagaagccatgagacataccccaaatctttataactctatgactttcaatatacatttttagattttaatagaagttcatctcttaatactagtccacactattaatattatttaattttttaaataaatatttataaattatactacattttaaataaaatgaactaattatatatgttgatatttgtttatattagaaattgatttgatttttcgtgttccgagaaaaaattgtttccgtattcgtgtccgatcatattcgatttttattcgtattcgaagtaatctgtatttgtttctattttgagttgtccgtattcgtatttaaagaaatataaaaacaaatatgatatgagcattatacttccgtattcattccgttttcgtcctaaaaggaactagggttgggtgagacgaggccgtgaaggagaggtccagtcgtcggtgaaacggcgtagccgcgtaggcttttctttctacggtcgcgcggcgtggctttgttggtggtaggacagctcaccttttccctgcggtgagttggcctcggctggcaaacatgggctttgggtcgccgctgcttaattagactttgcgtagttgttgtctacttgcccgttgaatacgcggatggttttcttgtaagatcggtgctcttgaatcttaactgaactcgatccttcttcatgcatgcacagcgtgttgcatagtcgccgaaaattgctagattatgctctaagtttccgaaaaggcctcattgggcattgaaccatgattatgtagctgggcacaacgcttagtggaccagtctctggccttgaactactaggcagtgctttgtagctagactaactgggccaaagattcctggtgagtattagaaaaagaaagtctatattacaatctgagtttcctcgcaatcgaaaaatcatgtatacaacctccctcaattatcaataccaattcttcattttaccttcctatgcagttcacactggtatcatctggcacctacgtggcacttgggttgcattacaatcaataaaataaataaataaatagtaaattttagaaaactacaactttagtgacaaaactatcagtttgttgcaacattagcgacatgttttagtttactgtaacaatagcgtgagaaattattacaaaactgcaacttttatattatatgctgctacagttgtcacctatatgtactgtagcagcatataacgtaaaagttacagttttgtgataatttcccacgctattgttacaacaaactgataattttgtcactaaagttgcagttttctgaaatttactcataaataaataatgccatgagacctatatgtaaaagaccatgtttatcttcttcctcctcgtctttcccttctctcatttcatgccatagttgggattttggtcttgtggggctcggctaaggtcttttttccatggaactccaagactgcataatgaatttcctccaagcaatgctcttctcctccaacaaatgtgttgctccctccgtttcatattataagtcgtttgactatttcctaatcaaaatttgttaagtttgattaagtttatagaaaaatttagcaacatccagaatatcaaattagttttataaatctagcattgaatatacttgataatatgtttgttttgtgttgaaaatactattatatttttctataaacttggtcaaataagtttgattaggaaaaaagtcaaacgacttataaattatagtaatatgaaatggagggagtaacatttattgcactaagaggtaagctcaactcccttcaaaaaaaaaagaaaaagtaaagctactatactgtagtcattctgtctaaagctcagatatatgttggacagtaaaattgtaaaacatgtcactgcaatgtattagatggtatgcaccacagctacaacagacatgattctgcatggtcacttacaggaatgaatgaagtggtatgtacaatccaacgagcacttccagaacttaagcaaaaggcaagacttcaggaccatcacctctgcagcaaaaacatgtttccaggtttccaggatgatcagcagcacaagtttggctagcagtgtcactgtatgacacgatagctgacataaatcaatatcaatgtacaagaacatgaacatgaacttcatggagcgtggacccgtggaagagaattccaaccaaagcaaaagctgtacttgttagaatactggagaataataaacgaaggacattggaaagaacctttatcaaaagataaaagcgttcaaagagagaaattatgcacccgcttttgatcaaccaattctctttcttttctcttcattatatatattatgaacaatacacaaagaattagcaagaactcaacatagcctgataggccaaataaaaaaaaaggttaatggcctcacacaccagttgttgagatcacaactcaccacactgagacaatcaattgggtttattgtcactcattgctgtactcgagaaaaacctcgcaatctctcatgacaaacactgaaagaaagccaagaaaaaaaaatgcacatgatcattgtagtagtccctactttgtaccagcatgtctaccatttgatgagagccttctgctatcgctaccacttaaaggttgccgtccagatctatttccattggaggtttttctcgaagcagatggtatttgagaatggagtggtgtcctgatgagtaaatacatggaagcatggaatatcttaatcagcctttcatggagtaaaatgatatatcttatgcgaatagtttagtatgttatagtttagattatatatttttctttttaaataaatattagtatcaaccaaatataaaagaaccaaaagttaatgggattaatatttaatagatatgtacttccagtacacatttttcatactaattaaatttcagagaattagcaactctgtgactagccttagcagaccacaatcttgaaattcacagcaatcactattatgcatgaggtgaactatatctttaaataacaacataaagataattttccatccatgcactattagtcataacccacaattcacaattagtgtagtcccaagtaatacgctaatatccaagtccatatgactgtttattcaagttcagttcatcatagttaaattatttatatctgctttataccatgagtattgtgggtgctaaaacagtgtaggatgattttacttcaacaaaaacgggacaagggagttattagccctgttattcttaaaaaataatgtttgttgtaaaaaaaagttgttaatgtaaaaaaaatggttacctggtatctgagctctctcttagcttcgtttgtggtttcttgatctttgaaccattctcgctaattgaactattgatgctttggacattgaactgccatagtgcatctgattctgaggaatcacttgttgcaatgtcaatgtcatcagaatcatcagtatttgtggaataaaatcttggtctttgctgctcaaactcatttccgtccttttttcttgagttatttctcaggtattgcttatctcttgtacctgaatggtacctttggtaaaagaagtcaggtaaagctgcactgtcgccttcccaatcacctactgagttattgttgttcactacaaccttatcgatccattccccaccaatagtcactctttcttctcccatttgaaaatttgcccttgaaatgctatctggccatgatggggaatcatttgacgctaataagtcctggagatcaaagcttggtttcttctgtcttaatgttggattggctctaacctgtataaaaaccagatcaaacatgatgggacaaaaacgttaacaacagcatggccgctgaaaggacagttgtattatcataatttgctaatatcacttgtgtaacttgtaaatgtcaaacaaatatgaatcgtagaaaggtttatagaagaaataatgcaaggcattagtacctctatgtttccaacgtcctccattggttgtctgaagttagtttggctagacaccaactcacaactaccctgtcgcctatttgaaaagccaggtgaaggcatcttcatgttaaatgcctcagggtcacggttaatgttttgctctgatcctgaatctttcattgctaatgatgatttgagtcgagcaatctggatagagatagaatatatgcataccttaaacaacaaatgcagtgagaaaatatgatacaaagcatagtagcagaaacaaacctgctccttaagttctttaacttctccagactctttgttcaaccgagcagcgccaagttcaacagtggatacacgctcggcaaacttcaatgtgcttatgctttctcctaaagcatcactttctgggcttatatgaacaaacatcaaggttttggcctgacctcctgtagacgcattgttaaaattcgaggaaatataaattatactcagcagtcagtgacagcacattaagaaattgcaagaaggttaaatcttaccaagagaatcttgcaggagttgtgttaattta

SEQ ID NO: 14537 - DNA, 597 bp, Oryza sativa
gccgtgttctccacgccgatgccgcgcatgaagaacccgttgccgatcgcctccatggtggccgtgtccttggtggtgatgttgagcatgaagctcttgttccccgtgatgatggtcttggtggcgccgtcgccgatcatcaccaggttcgtcacgttgcgcgccaccgacacgtactccttgtacgtcccggccttcacgtacatcacgtacgtccccgtgctcttgaccggcaccttggccagcgcctcattgatggtcttgaagtcgccgctgccgtccgccgccaccgtcacgtccggcttgaactccttggagcccggggtcgcctccagcagccggcgcttcgcgttggacatccacacgggcacgccgtcgtcgccgagcagccggcggctgaatccggtgatgtccaggttcgccagcgtgtcggcgaactggtccacgatggcgaggatgttctccgtcagctcctgcgagctcttgagcgccttgcgcatcttctccgacgcctccgtcgacgtagagttctcgaacccgtcgaggcacgtctcctggtacgtcagcgccgagctgagccacgtcttgacgtcgtcc

SEQ ID NO: 14538 - DNA, 539 bp, Oryza sativa
tgtacgaggcgctcaactccggggacgcgcgcagggcgcaggagctgctcgcgccggacctcgagtggtggttccatggcccgccggcgcaccagcacatgatgcgcctcctcaccggcgccgaccacggcgagtcaaggttcctcttctcccctcgctccgtcgacgccttcggctccaccgtcatcgccgagggcaccgacgacacccgccagctctactgggtgcacgcctggaccgtcggccccgatggggtaatcacccagctcagggagtacttcaacaccgacctcaccgtcacccgcctctccgcctccgccgccaagaccaccgccgccatttcttcctccaactccaccacgcctccttttcggcgccgccgccgccgccgtccaagcccaagtgcctgtggcagagccgccgcgccgaccgcgcgcacaagtcgctgccgggcctcgtcctcgccatctaagaacgaactcaaaagacatcaagaactcaaggcgcaaaaagcttccctaaattaatcacatataaaa

SEQ ID NO: 14539 - DNA, 33762 bp, Oryza sativa
agatgcatgccatcaaaactagcagtggtagtagtctagcagagatcagatcaccatttgtttggtatttttcctctgaccaattcgggatgactgacctcaagccagagtgttccatggagctaacagcctctggtcagttaattactattatgcacaattacacatgggtgcacccccatggtcgcgtttaagttacttcacgttggagaaaactgatttggcctagaaccttacgccattggtgtgaaattgcaccatggtgcatgtctgatgaatctgtttaaatccattgaaatacattgaaagaattctatcagaaaccccgctacaaaaataggaaataatgtcctaaagatgggctttcagggaaaagcttgcaaagagtttagtgtaactttttttgtataaaagaaagtatttttggctaagaaggcgaagagcatctctgtcatcatcggcgacaacccaacatctcacactagcttcactttggaccatgttctaacacaaacttgcttttatggaacgaacaaattagagaggtaaagggaaaagaaactctctagcaatcagaccaacattatggataaggcttttcactgagtaggatccgtgctagcatcatcaatttggaatcaaaataatctaccaatccagacacatttgaaagctgcatgattacccaacttcacgcagtaatgatgatttctccgcagcatctgtgccacgagtgaagagtgacaagcttaaaggctcaatataaacctctgaagttgcatgatcaagttacaacttagctggcccggttgaccccatcgattttgctacatgtataaaggttaagaaaaaaaattatttcgacacacaattgcaaaatcccatgaagtatgattaattttgggtatgtttaaagcacccttggagagatatgaaccgtccatttaatttaatataacacaccacaattagttctagtacatctgataaaatggtaggtttggaaaaaaaataaaatgcatggtaaataagtaatttattccatctgtagagtaaatcgactgaattttagctaactacatgtgtgtttcttcgtccgtaatgcacgcttgttccctaatgccatgcatatatctttcctgatttgttggcttattatttgtttttaatttgaggaacgcatataacaagtagccatgaaactactccgcttctttcttcctctttccttcttcgatccgatcgaacatgatttatataagttaatttacagtctaattaaatcaattggtgatcctcagataacatggttgcatgcaaaattcagtttccacatgcattattaaggatgtttacggaagctggcattatttagcatcacaatattgagagagagataccggcaacctcaccggcggcgctcatcgaccgagtcgcaagtctacgacggatggacaagataaccttcgcgggattggatttagaaaagtaatttcaacatacccctattactactattttaacaaaatatccaaaataaccctataaatcaacgggacatgttaattccactgccttactaacactaagtaatttattattattgtcaaagtactgtaaaagcaccctaattattaatgatatatgtactgttgcagtaatttgggaacaggccggggaaaaacggagagtgtcaggtaccgtaaaatctcgattgttggtatcctcttaaactgcacgtaggggcggagctacagactacagtgacaggggtgcacaggaacccggtcgaaaaatcaattacctgtagttatctcatgttcaccacttgacaccccctcagagctcctgcgtgtacccccaaccatcaggccgagcagcaagccaaagagaagcttgcattcttgtagctaattaagtattctcgtggctgcatcatactcctatatgctctcagctctgttatatcacaggacacaggtctacaaattggccatgcatggagtgtagccgtcaatttcatccagcatttcttaacctctctttttgcatttacaatcactatcaaacaaatggaatatccttacccaccacactaccaaaggtctcatcagccattgattgtagtaagcatagtcaggcatgttgcatcccttataattttctcacgatcattctgatttattgcaagcaaattaagttaacaactttgcatgttaattagggtctcaatgggatgatattggttgctcttatcaaaattgagggttacttttcaattaagcattttagatgataaattaattggaggaaagcttgggtttagttgaggcccttaacgcttgagatgcaatgtcaagtaagttgcttgactttgcaagaatcaaactatggtatagcatacaggacaatttcatagcttttaaaatatgatgtatttacattaggaaattctgtagtttatgtagtataatataataaagcattatttttctgtttctttaagccaatgggttggactaagtacttatccaattctgggaaccttctttgcttttgattttattctcaacatgttcgttgcactatactaatcgatgttttcattgtgttctccattttggtaagcactttttgtcactgcatttttctttctgcacagactctttctcacattgaatttgctgatgctaaaatgtaatggatatactactatttactacaacactgctagaagaaaacatataccactaaactatatgaagctatggtgtactccctccgtcccaaaaaaaaaaaagacaaaccctgggttttcatatccaatttgaccgtccatcttatttgaaaaaattatgaaaaaaattaaaaagataagttacgcataaagtattaatcatgttttatctagggatggcaatgggttgggtcgggcacgggtagagcaaaaccatgcccgacccgatgcccaacattgcccgccgaaaccctacccattagagttagcgggcaaaactccatgcccgtactcatgcccggcgggcgcgggtatgtctggcgggtacccaatggatctcacatgaataataacttaaaagatatgtaatttaaccaagaaaaataaaatcaataatttaccaaattattggttatcaacgataatttgaattacatcacaacttagtatcagttagcatcacgaatgaaccaagagaaatggtataagaattaaaaaatgagtcaaaattagataatacatatgtatcgggtcgggcatggattacccacgggtaaaaaataaaacccgcctattacccataatatcttcgggtctcgggcgggagtgtccatgggtaaaaagtcacacccacacccgtacccatcgggtcgggtatccacggatacccggagggtatccacggatacccggacccatgggtaaaattgccatccctagttttatcatctaacaacaatgaaaatactaattataaaagaatttcatataagacggacagtcaaacattggacacggaaatctagggtttggcttttttttgggacggagggagtgtagtactaccttcgtcccaaaataagtgcagccataggtatccgtgtccaacgtttgaccgtccgtcttatttgaaaaatttataaaaaaaaattaaaaaaatagtcacacataaagcactattcatcttttacatttaataacaataaaaatattaataataaaaagttttcaaataagaaaaatgtcaaaagttggacataaacaatgtaaaattacacttattttgggatggagaaagtacggatgcacccctctatgttgctctagctcttttttttaagtggaaatgaatttaactttgaaagccggtatttgaaaaaaaacactcaaaatagaactggggaaacaaacatgcaacacgctcctaacgatgcttgtttctacaacgacaaattcaggttactagtagaatatttgccaattggaaaatatcatcccaattggtcgtacgtatcctacctaccacgcaggaggcaccgtggcaccgaacagaaaagtgacgctgctgctcacttgcttgcaccggtcgagcacaaagtttctccatttttgtaagactcgcaccaaagtttctcaaaagctataacgtgcaagggaacacgacgtcacaccgcaccaaagcaacgctacgccgccggtggcgacaaagccaccgagtccgagaccaagaccgacgtgacatatcccaacgtcgccttgatgatctccccgttctttccgcggtcaagtcggaaaagagtcgcgaattacgcagagggatcttgaccgcgatcggccatgtgtagatcgatccgacacaacacaaggtcgaaaggtttcgtgagaaaaggttgccgggaatcaaccggaggagcgatcggtttttggacgtttggtccttgcaatgccggtggtcagaggttaccaagctccagtcaacacacatgacgcagggcatctcgcgagcgcacgaaagcgaagggagaatttagaatttaggacgggctcgtgggatggggaaactggcatcgtactacagtttttgaggcagggtgatcagatttgctggcttttggtctctctctctctctctcccgatacggtgacatgttttgctatatagcctataggtatattttattctaacttttttgtatttgtaccgttgctaacattagggtgaaaatttttagcgtgtcacattggatatacggatgcacatttaaaatattaaatatatactaataacaaaataaattacagattccgcctgtaaactatgagacgaatttattaagcctaattaatttatcattagcaaatatttactgtagcaccacattgtcagaccatggagcaattaagctcacaatttacacgcaatctgtgtaattagtttttttcctatattcaatgtgacagggtaaaaacttttgccagaggatctaaacaggctcgaagttgaattgaagttgtcctacaattggaattagtatgtaaaaacaacacaattaattactaacagattaaaacaaatagatgcctttggatcgaaggttttttgaattgcagaaaacaggtattgagtactataggaaattttaccgttcatccctttggaacaaaggtattgagccccccatttttttttaatttcctttgcttatacccaaggctcttatataagctatagtgtcaaatgacgataacttcacagctcattagtaagattccatgacttgacgactttaattacccgttgcaaacttgcttatgttgttccttcaaaatacgtgcttagggcatggccaacggtggcagcctacgttacctacatatgggatacggatacacgatacggtgatacgggatatgatatttttcggaaaataaagatacggggatacgtttgtatatatataataaaaatacagaaaattataaattgaattggggaaactatagtattagtgtagccgattggtgattacaatgtagcaatcatctctaattcccttttgtagctaattcacgttgattaagcccaaactaccagcttccaataattcaaacaaaaaaaatcaacacatacacgtttataactaaaagactaaataactgatgaatctgcaggaacattagcagccgaactaccgctggattgctagatgtgctagggactgaacttccagttccaaaacccattgcatcttttaaaacaaaacatagttattgttgtgcccagaaaataaggacattgcagtcttgcggattcattcaagaaaaaagctgaagagcgttgtaaatctgaaaggctaaaagatgggatttatcttttattacctcgtatggggaacaagaaaagaagagctcggttgtgatggagcgctttgctcagcatcagaggcgttgtgttggtggcagcggccctaacccctggcagggcatgacggcggtcggcggagatgctgcctgcgtctggcagcagcggccctaccagtacggggaggttctacaagctgaccccgaggaactggaagttgggggtgactatttccctgttggggccggaacacccgggcctgcgggggtgggttggatttttggacccatgggtgagcctccaaaacaaaccgaactatccccactccactccaaaccctacactccccgcacgcgcctgtgcgcggtgcaccgccgcgcactgccgccgccgccgccacaaccgcgcgccgtcaccgccgcgtgccgtcactgccgttcgctgccaccgccgagcgccgtcaccgccgttcgccgccacagtcgccggactcactcaagaaggtgactcatctttcatgtttcttgaagtggcgttctctctctgcttggtcgagctccgctgatatatgttcttgctgtgggcagggaggtggcagatctgcggttgcgtgacctccatcttggatctcggtgagctggggggactgttcttggaagtggttcttgggagcatcctggtatggtaccttggctatttttgtgctttttctttgtttcaatttttagataatgtgggttggttcgattggagatgctgaagagtggtgggtttctgttgggtttaatgccgcagctggtgtcccatcttagttgtctcatgtgatacatactctgctggattgtagtatgtgtgccatcagacatcaggattagtcacaataattaggtcttaactcttgaaaggtaaagacttatgaagctattgccaaattagcagtaccaatgtctcatctaaccttgagaagtcatctagatctctggtatactgcaatgctactgaaaaagaaaaaaaaaagatgttggagatttgaacaaattggaattacacaaattgattgctagcaatgttctattattcgcaattaattctgtcagatggttgtttataatatatcagtgcaattgcaccctttcccaagtcccaacctctaagtcatgtttattaagcatgcagcttttttgctgcttaatggtgactgttgagcgcatctagaaaatccagcacttaaacttttaagctgttggtcaaaggataaaacattttgaatgtcagttcattcagttccatataactactaatctgttgatttaggtggctgtctttcactgtagtattaagtagctaactattttatgtgttgacatgacatgaggcctgtctttcttgttcaaagatgtgatttgatattcattatgttattagtggagtttcaaaaggtgaaaaaaaagtgcacaagaatatttatgcacggttctttgaaaagaaacatgtccagcccccaaatgctagatgcatgattacggtgtataacaggttgctgttgggtatgcttatcatttcactagtttttagcacaagtagtaaatgtaaatattaattctgcacaagtagcaaatgtagatattaattttctattcttgtcaaacataggtttattaaacatgtctatgcaaaattctgaaagttcatctgccaatagttctagtcatgagctgccttcacaaacacgtaagagagcaaaagtgtgggaacattttgagcaggagcttgtcatgatagatggtcttccaaaagcacaatgcaaatattgtggcttaatgttgtcagcgactagaaaatcaggaactagccatctcataaaccatatttgcgaatcttgtccactagttgatggtgaagttagaaataggtttatatcaacagttaggaaacaacccgtggaaaattttatgtttgatcctaaaaagactgaagagttgatgataaaatatttcatccatgctgagataccattccataaaattgaggatccctacttggatgattggatggcatccatgcagccaacttttaaacttgtgggtcgtcaatcaatccgcgacaagatttacaactattacaataggctgaaacaagaattgcatgctgaattagagaatcttgattcgcgtgtatgcctaacatcggacatgtggacctcaaatcaaaacctaggatacatggttgtcacagcccactatgttgatgctgaattcaaaatgaaaaagaaaattataagtttgaagcctgtgaagtatccacacactagctttgcaattgaagaagccatgatgaggtgtttgactgagtggggcttgagtagcaaactgttcaccttaactttagacaatgctagtaacaacaccgctgcttgtcaagaattagtgaaaactctcaaggatgagttggttttggaaggcaaacattttcatgtgaggtgttgtgcacacatcctcaatttgttggttcaagatgggatgagggtgattcgtgcagcaatagataagatctgtgagatcctaaagtacattgagcattcaccctcacgcattcaagcgtttaattcaattgcttctagtaaaagtcttcctccaaaatctggtttcactcttgatgtaccaacccgttggaactcgaccttcaagatgattagagaaatattgccttacaaggctatcctcaatagctatgcctctgaaaattgtgaacttctaccaactaatgaagaatggttgcatgctgaatcaatttgtgaatttcttaaggcttttgaagaggctactagaggtgtatcagctcataggacaccaactgcacacacattcttgccccatgttctttgtatccgtcatgctttgagtgatcctgattggcaaaccagcgatcttttaaaacgattggctgctcctatgcacaccaagtttgcaaaatattgggatgaaaaattggcaaacaacttcaatttggcacttgtcattaccactgtgttagatccaagaaggaaaagagactatttggatttcttttatgagaaggtgtctccccatggttctaatgttgaaagtaaagtggactctattatagaggagatgaaatcatactttcatgtatatgaaggaattgcaagaagaaggggtgtatcctacatgtcacagtctagtgagagagttagtgttgtaggctcacctgttttgggaaaaagaaagctagagcatgaattcaccctcttcaagtcaaaccgaaaggttgcacatactcagaagtcagagattgatacatatttagaagaagtatgtgaggatgatagtgaggattttgatgttttggcatggtggaagaaaaattccaaaaagtttcctgtgttggcaattatggctcgagactttcttgcaattccacttagcaccgtgccctcagagtccgctttcagcagtggaggaaggattcttggagacacaagaagctcattgacaccagagatgctcgaggcacttgtttgtgcaaaagattggctacatagagccaaaaaacaaggggattaaaggtataatatctcacgccttgtatttcgtctcagactttgtggtctgtgccatacaaatagtaattgtagatgtgttttcattttatattgtttgattagtcacaaaatctagattaatttgtctgagtgcccaccagtattactaatatttgtgccaaattttctttgatctaggttcgtactgagtactgaccatatgatgttttgtgaagaaggtttggtatgatggctgttttttttttacaatggtggggtccctgtgctcagtaacttaatgttgttttttgttcatcagttggtgaaatgttaggcggaatttgtaacaccttgcaatgccttttatatctattagttgtatccttacttgtatatattcttatttgagcagctagagcatgttcaggagatagatgagagcattgtgtatgtgaaggataagcaaggaaggtggcctctctcttctcccagaggggcaaaaaaggccccaaccttgttttcttcctctctttttttttccatttcttgaaagtccttgtggttgtatatagtagtatagatatttagttgaatagtggggatggatggattcattcttcattcttactagtgtgtccactaactcatgctagtcatatcttatagaaataataatattcaacttgtaatcattcaatgttatttctgaaatataaatttctgatggcttctttctcttccagattatctacaactgcatatggatcaaggcatagatgatgttttggtagtttttgttgaagatataaaccttattatggcccttattattgctgtagtagtgagcaattgacttaattgtaattatatgacatcattagtcttctggtattcatttcagtgctggatcagctaacaaacaatgcgatgcgtatcattctgagtatttttttttgtttcattttcttgtttttgcccaattttcagtgtttcagcaagcaatgatgttcttttaatatatctgttttgaattaattgtctgcacgtgtgtctacactgctgctctctatactgtagctgagatccatggctaaagaagtaacgaggcctcctggctccaagctctctgtagtgtagctgggatccatggattgaatccattccagtgaagtgggctgaacccattttagtgtaatggtttggggtgggttggactgaaatctgatgcggggtgggttggtttggattttggaggagaggaaatggggtgggttggtttggcatgccattccatgaggaggtgggctggggtggattcaaattggatctcaacccactggcaggcttaggtgagtggtggtgaggccccacaaaatttcgggtgtggggacagggatggaaagctcagggcctgtttggtatagctccaactcctaaatttagctccaggagttgggtctggagtggagttgtagaactgcctaaacccagcttcacaactctagttcattttgtgagagagctccacccaactccactcctaattttggtggagctaaaactgtttggctgagctccagctccagtaggggtggagctggagctggagctgtgccaaacatgccctcaattgaagcagtaggtggaatcatatataaagtaaaccaaaccctaagtcctttcttctactctttcacaaccacaagcccctaagaaatcaatcctatccttatttgtcacataggaaaaaaaggttgctgggagctaggacgccaacatctgcttctctgcctcggctcatctccactagctggcgccccacaccatgccaccctcccaccttcctcatcactgcgtcacctcgaagtcacccgcctcatcccttcatcaccagcacaagccgcctcactagtcgtcgctcgttgccacatcacctcgacgccacgccattggctcgtcgccacccagcagccactgcctcaactctggtggtgctggccggccaccgctaccttgacgctcgcatcctacttgtctcgacgtcacgctatcaacccaccaccatcccgcgtgtcttgctcctctcgccatcagagggagactagttccatgcaagatagcagggccctagaggtgtcgccgccacgggctgattttcacccactcagtcatccggggccgggggttggtcaacccgaagggaaaagtgagcagggatgttcttatcctccccactaaacgatggagctaggtaggaggggggttcctttagcatgtatgcacccctcaatctaaattcagacacttatatcagtctaaatttaatcaaaagtatattaaaacaagcgagtgatatcactctccattttgttctaactccaattgccacccctaatcgggagacacaccgtggctggtggcgtgccaccgtagagtacagtgcgtgccgcatccaaatccggactggcgcattacccaaccatggaatgcagcggtggtcgcgtccccaagcagaggagaccgcgtccccgaacccaaccaccgctgcgacccaaacaaaaggctgcagggcccaacccctagctacggctcagagatgcctggccccagccctactccctcgccccagcacatgtgttgacgcccaggctcaggctcagcacacacccaaatacccaatggccatggatagattcatcatccaaacatagataatgagagtgcttagctgttgcaagtggcagacagggaggggctagtcaatggcgactgctttgctttgcacccagcggaaaagcagtttttcactagtgcagcggatggcagctccctactagtactcggctgggtgggagggacccaaaagctgcaagatctgggaggcgttttagggtggctgtcgaccttgtagctaagctagcttgctgtccggttaattgattgatctaccagctaggtcgtgtggatgttgtagtggagctgtactccagttgtgtttgtctttgtccctcatgaaccagcgccaattggacgacctgcacttggttgatacgagtacaatagtaatgataacaacaatatgattaacctgaaaaacaatccaggatttgcctgtctataactaaggatttgtcaatcatcgccttcaggctgcaggaagaatccaactgattaataagtgattttatattctacttacgtggattgctgacatgacatgtatcccagccgtctatacatccaggtctaagcagaacaaacacttcgtcaaaggagagttattcgactccgtacagcaatttggtcctgtacggttgccgtacacgtccgtttggacctgccacgacaaaccccgaaacgaactgtacagaccacaactttcaagcggttgagaaataacgcgaccaagcaaggaacgggaaaaaccccaaacggcaagacagtgtcatggcagaataaaggtggaatgaaattgaacgacgatgcgacaccattcacagtttcacagccaattgggataagtatctaattgtgcaatatgtaatggatcaacaatgctactaaagtttgactggatggcattttttataaatcaagccatgtgaacctaccaacttggcagtgtggatcaataacttatttgcaaggaaatgaaggaatgatgaagctgaatgttgaaggaagacctaacatgtggcaaaaacaagcagatgttgatggggggaaagaaagaactatagctgcactgcacaacatcatgatcatcaacgaaaaaaggaatttagcacacacatgaagcaaccccaagagatttacatatactcctccctaatctatctgatgtaacttaacatgctattatttgtttgtccacatcacataacagcaccaagcatgaaagaacttcatcactattacacgacaaagcttgaaaactctcaactcactcgttagctaactaggcataccagaggttgtgttcggctggaatcaaaagccaactccggtggcattgaggggcctatgccggtccttccagaagcaggcatcgggcgccagccgtgccgaggatcgcatcggctcggatttgcagcgcttcagaacaaacggtgcatatgttgcagcgccagtaaccagtggcagctctatcttgaacttctgctccgcagcttctttgagtggtgatttctgcacaaccggaggtggcatagacaccaagtttgctgatgcaggcgctacactctcttctgtgttcttagcatcactggttccttcagcattgtctgtatccttgagctcctccgctggagcggcattgcaaccagccttttgttggcggcggttgcggcggttctggccctggtaagacttccagtggacgaagtccgtgctgcagacccatgtctccttggagacctccatagagagcttaggctcatacatcatcaagaggaggcaatctggcaattcaccacttttctttcttctctgcttctgttcttcgaccacatcttgtgcctcaacacctccgacttctaccttctcacccttctcatcaacttgtgtctcttgtgttgttccttcttcctgtccatccaatgttgcttcttcctttccgtcgtcatgagattcaagagtttcctctgcactgtttggggcagcatgaacagcgcaatctttttccgactctggctcagatgaaattttctggccctttctggatcccatcagcaccttaggctctgcaacaagatgttcctgctcaatagagaagctccatctgcggccatccctgtcgatggagaaactagctctccttgagtccttcaagctcgagaagcttgaccgacgtgcttctgtctcggctgagaagctgtgccgccgcccaaccctgtcactgcccgatgaggccctactactgctacctacccgtctgcggctgctcaaccgtcgcagtttcctgtcctccttcagtgctgtcgatggggagcagcaattgcttgacctcctgcccttcatctcttgctcctctttctcaggtcctggaacagaaacttcttcctgagcttccgccacagtctccaccatctccagcaacggcaattggatatccctccctgtagcttctcctgacaaagctacctccaaaactgagtccttccgaacaattggtgcttcctctggctcaatcttctcttcatcctctctgcagtcaccgtactcgctcgcttcttcaccaagatctccgcattcagaggtctccactgcttccgtctccagtggatctacttgtcctgcttcacaaccatcatgtagggaaccatcacactcacggcatccagcttctttagtggaaaccgctgaatcacgagcttgctctttgcattccttatctgtgtcagcaccatcttcgtcttcctcatcctcttcctcctcttcgtcgtcgtcgttttcgttttcatccttgacattgtcaacctgactgacatttgccgctgcaggggagccccagaagcgagtggctaatgcagccatacgaacagggtccgacctgcagcgcatcagcagcagcgcgtttcgcggcgggatgcagacgctgaccctcccttcctcctccttcccaaccaccaagatctcgtccttcttctccacttccacctccccgactaccaccgtgctctcctcctcctccacgtcccacccttgcatcacgagaccgacctctgaagcctttacatcctcggccggcacgacggctgctcccttgccgatctcatcgtcttcctcctcctggatcgccaagaggcacctggccacggcggctccgcagagccagctcccgctggcaggcgggcgccgacgcttcttgtcggcggcagagagagagccgcgctcgccggcgccggcggcgcgagacggcgagcagagcgaccggccaccgcaggagccgaatgtcttgagcgcctcgcagatgttgactgggatctggtacacccagccctggttcttccccgcaggaccgtcccggtcgtctccggcgcggcggaagctggcctccgcgctaccgccgccgccgacacccccgcgcctggaccgcgagcgcagcgcggcggcggaggcgtgcttgggcttgcgctttcctcccttgacgcggacctggccgatgcaggtgaccttgggcgacgaggctcggctggctcgaacccgccccggccgcggcggccgccggaggaccccgaggggaacatgggggactgcccacctttcaggctcccgctgttgcggaggcgacggctgagggaggggtggagcggcggaaccggcgcgctgtcggcgccagcaacggcaccggctccgccgccggtgcggccggggctgagaagcttggaggagctggaagggcgcagggtggcgggcgcgccagaggatgcggaggcggtggaggggcgggaggtgaagcagatgaagagctcagtgccaccgccgccgccgccgccgccccggtccgagtgcttcttgcggcgcatgagggggggaggggatgtgaggcgtgtgacctcgctgtttttttctcctctctgtatttatgagaggagtgaggcgttgctgctgtggctggctgcgctagcgtgttagatgcggtggaggggaataaattagggtttgttggtggtggcgctggcagcggagagttggagaccggagaggagaggcgaggtgtgcgctgtgcgggaggaggagaggggaggtggtggaagatacagataatggtggtggtctcgggtgggtctgggtctggatggccatgggactgtgggaggcaggagcagcgcccgcgccacgctgggtttgtcctcctccggcttggcgatggaaagttaaaaggaaaaataatatatatacctatttttaacctttttaaaattaggcatcgttacattatcaagttttggtaattatagattaaatatgatattgtcaaattctttagacatgaccaatatatcgtaataaactaaacaccgccttaaattttgtcgattttaccaaacaatggtataatttaaaatggcatgaatctgaataggcccaaaatgtttttcccattttgtttcttttttctttttgtttttctttggaggactgatttgcccatagttttcggattgagatcatatacattactaagtcaaaaagaagtggacctatccatgaataattttttttttgcatatgcatcatgtcgcctatccaaaataaaaggttgaaatgtatgaacaaaaagttttcaaaataagttgttatgtatcccgtcgtctattcaagctttacttcactgcctccgctctggagccatcatcgagttatcgaaaatgcttacgatcggacgaccgatccagcgcaaactatcggacacttggacgatggacgcaccgtacaactcttttttcagattatgagccaacatgcatattgtctctttttcaataccaaaacctttctctcacataagatagcacacatactactcttgccctctctcccctacacatgcatgcattttttttaataagctttaaatgtttttttccaataatcatctatcaaatttgtgattcgattacaccattaattcattttaattaaatctgtataataagatatcacatgactatattctgatcgaaatattttatttttatttttttttgcaataaatgttttttaagtttttcacattattttatttatatatttcaataagtattcgattatcctacgcctcggtcgccgagggaggggaaaaatcggtcgctcccccctccccccatgacgcgcgtgcgcacgtgcgccctgggccccacgatgtgtcactgactacctactacgtgtctccaccacatactccgttgcaacaaattacccatatattttggaaactctctattaagggaattcgttttattttttttccaaaaaaaatgtttcacctagtgtactcacaatgtttcactatgtatatatctaatattgcagagaaccgaaatattcttttgcaacaaatcacccacatattttggaaaccctctattaagggaattcgtttcattttttgttccacaaaaaatgtttcacctagtgtactcacaatgtttcactatgtatagatctaatgttgcagtgaactgaaacattctttcgctatttgctgaaacattgttttcatgtaaggtgaaagaacgtccgatttaaacgattgaaacattttcgatctacttagtgaaacaatctcgatatacttagtggaacattgtgcaacatttcaaaagaaaatcaataataagcttaaaaaaattcgttggaatatatccacgtgtggtcttgttttaaagatttaattgcgataaatatagtgatataatcggatcatgcatcggataaatattttaggataaaaaatagtttagagttagtagattttcatactgcatgagggaagagagagcaactgtgatagtgtgtatgcatgactgcatgctgcagagagagcagagacctataactagagacagctagaaagcgcatttgcatgcggcatagaccatagagacagaaagactagtgcatgggcgtccgatttttcgctattcctcggacgtccgacgcgtagttatctcctcgagttatgacatcatattttgagttttgtagcatatatccataattatcatcttccccgacgtgacgttgatttcaaacctacctgacggccattgctattataccaagctgcagtcaggggatttggaacatgaaaaacatatcgcgtgatcgattgccccaggcgatcagtttccctccccccacgcagtttcccttgttagcaccgctttactttcctattttagtaagtttatacatctaaaatttgtgcacctaaagtttatacgtctgaagtttatatacctaaagtttatagatccaaagtttataagtcaaaagtttacatacccaattcaaatttgaatttgaattcaaatattttttatatatagtatttctatgcataaagtttatatgtactaagtttacggtataaagtctatacttatctatacataagtatagagtctatgaacataaataagagtattaaaaaaatttttctaacttatgttttcttattttttaaaaaatttatggtgtagtaggaagagaagaagagagggggaaggggagaggatgcgggctttcccgatcgcgcgccctcggcgcggcgcgggcgatcgatcgcgcattaggaagaccggaacaataatattttctcttctcgcatctcttcgatttgttctatatctttggaatgtaataatagcgtttgcaacatagattaaaacaaaaatagtctgcaaaatgtctaaaaatagttacgctaaatgagattatcttaatccatccaaaaaccaaattgaaccctcactattttgcttcaaaacctgatttgaccaaaacccaaccattcgccaacccaaaacccaaccgtctccctctgctcatcatactatgccgctaatccacaccataggtccacgttttctttttttttttttagtatttgttgcaatctgactagccactagcccactatacatcttcaaccagcgacaaacattattgagttcttctacatcatgttgctgacaaaagatccacgctcccatccgccctaacaccttgaaaatttcgattctaaaatatgaaagcgaaaatttgaaataattaaaaactttttccaaaatttcgtcatgctaatatttattaaatttcctttttcttttcctggttgtgccggtgcaaaaaaaaataataaataattccaaaggataatttaaaaaggaataaaattcaaacacattaaaataaccatgagtataaattaacatagattaagaaaatactttgcaataaaatcaaacaataactagttactaaaaccttcttttaactaaatcttttaagaaataagcttttcagcaaaagtataatttcgatccttcattggactggcctagcccaacaagacccaaaccctaatccttttaaactctataagtttaaattagttcccttaacttgttcctttttcctttcaaaaaagtacaccgaaggtcccttaacttgtcattgagctacaaaattgtcccccagtcgtaaaactagattatttgacatccctaacgtacaaaaccattcactttaagttcttcggtggttttaacaccgatttcgtccgacttggcggctgagtcagcataggacccacgtgggccccacatgtcaggatgccacgtcaacaccctttctcttccccctcctctcccttcctcctcctcctcctcctcctctctctctctctctctcacttttctcctctctaggcaagcaggccggtaggtggggaagaggtcgccgggacaagccaggagaggaggaggtggcgggcgatgaggcgatgatggcggtggctgcgacgcgggaggggaggctgccgtgccgaggtcagagtgtccctttctcctctctttctctctctctctctcactcttctcgtttggacagggcagctgacgggtggggaagaggctgattgtcagcgatgcaagataggaggtttggcggccgacgacgtgggggaggcggcagcagcgaggtgggagaaggggagggcgtcggtggcaagagcactggcggggagagtgaggacaatggggatgcaccgctgccatcgtccatgggcgcggatccccttgtgtatgccatcgaggtaggctactgccgctgccaccataggctagttggcgaggaggaggatgggaggggtcctcaggcaatcgtgtggctggccgccgtcggccaccatgctcctctccccaccttccaccaccgcactcaccggtgcaggcgctggctccagatccacgagctccctgtgggacgaagatggtgatgatgtgctcccaccgttctctttgctgtcccccgtgctcccgccgccgtcgctttcccctcctcccacgttgccggccgctggacctctttcccacctgccggctgacttgcccagagaggagaagagagagagagagagggagagagagagagagaaagagagagagagagagaggaggaggaggaggaggaggaagggagaggaggggaagagaaagagtgctaacgtggtatccttgcatgtggggcccacgtgggtcccacactgactcagccaccatgttggagaaaaccagggtgaaaatgtcacaccctgaagttctttccccaagcctaaattgaatttataaatcaccttgagaaaataccggagtcaaagcaagagaaaccctaatatattaatgctaataataatcggaattggcatgtgggatttttcttgagttctacatgtcgaaatatgctaacaagatttttattggaattttcagagctctagaaataattttaaccaattaaaaaggagcacaagcattatttaattccctggaaattcttttcctcctttttctctttttttcttttttcctctttttcttttcggaatgggccgccggcccattctctcctctctctccttcccgctgggccgaccgaaggccgaggcccagctgagccggccacccgagccctcctctctcccggggtcgccgacaggtggggcccacctgtcgggtcctcccccaacctccagccgccgccaccgcgccctgcaaccgccgccgcgtccatgctcccgcctcctccgggccacgtcagccacgcccgcgcatgctcccgcgtctcccgcacccactctccctctctcccgcccgcgcccgcgctcgagacagtcaggattcgattttcgaaacccgcctctctctcctctcccacttcccccacgtcggctggcgattcccgcctctcccggccacgtccgagctccctctcccctatttaagcatccccactctcccctctttctttttccccatttcgccaagctctcccgtgccctctaacgccctagtgccgtcgccctcctctccgccgccgccgccgccgccgctccggtcgccgctagccgccgtgccaagccacgccgttgacgccgtcgcgttcgccgtcgtgcgggccatctcgtccacccctcctccgttggaatccgccgccggaacccactccgcatcgtgcgtcggtgagcatcgccatggccgccgccttcggccagcgtcctcgccctctcccttttgcctctctccctctgttccctaggtggttccggacctcgtcccgccgtcgccatcgccctccgtcgctcaccgtcgtcgatcgtcgtcggtgaggcccctcctccccttctccctctctcccgcgccgcttagccgccgcgccgccgcctagccgcttagccgccgctatcgccgcccgcatcgccgcgacgccgtcgctctctgccgccggccggttgccgccggtcgccgcctcgcgtcgccactgcacgcgcgccgcgccgctgcgtgccatggccgccgggccggcttgagccgtgcccgcgcgcgccggccgcgagccgcatccgccgtccaatctaccggatggtagatcgaggccgtttgttcggccgcccatgtggctgccgcgtggccgccgcgtcggcgccacatcagcgccacgtggtgcgccgttcccattcccggtccgtggacccagtccactgcggaccgccacccgtgtcactgccatgtggggcccgcatgtcggcgccgcccatctctctccccgggatatatttattgcgcaataattcaattaaggatttttctgtttatagtaaaaacacagtgaatattctaaaattcatatttaattcatccgagctccgtttgagcccattcaagtatcagtaaatcaagaagtagaatccattaaaaatggttctgttctctgttttagtagtcttatagcctgtttgtattgtttgctttgtatgtcgcttagattccggctctcccgacgctccggtgtactttgagatagtcgccgaggttcctccagcagcagagcaaggcaagtcatgcttgtcacttgaacatgttgatcctatattgcaaacggtctattgttttccttcaaatactgcattgttttgcaataatactatgggatgtttacctactgttacagccatgctatttttggtaccttgctgctatttttggtaccttgctcctttgatagcttgggttataaacatgactagagattggattagggattgcttagccatgcttagttcaactagcacataatggggaaaatcatattaatgtatagactgtaggctctaatgttaatgttggattagtgccaccgcttcggtgttggttaattaaaataaatcacatggtgggctgtgggtgcatggttttgttggtcgcgcccatggcgtataaggaccggttcgcgggatgccctggaagaacttatcgtacttaccacaagccagcgtgggcaacggctgggcttgtagtgtagctttcctctagttaacgcatctaggcaagggtgggcgtgatggagcggggcgggccctgcgacggcctctgtcgcttctggattcacctaggcacgagaggggactgcccgttgcccgctggggacgggggtgaaacctgaggtgtggtgtgcttggctagagggggttatgcgaagggtcctgtcatggcctctttccggtatgtcgtggtggcatgtcggtgcacggaaacgtgtcgtggggctgtgtcttgtgggtacagttgtacacctctgatcagagtaaaactattcgaatagccgtgcccgcggttatgggcggtcaaccagattcaccgtgattagtctcaccctagtgtagtctgatggaaccgattagttcaggtggttggttgggcctgttgcaacgtggtgtagtgttgaacagtggatggttaatattgattaattattacaattattttaccgctttcaactactctttataaatgctcgtgttatgcaaaagcacctctcttgctatcctttggtaatatcctgcatcatacccccgttccggtatgacttgctgagtacagtgggtagtactcagtcttgctctattttccccaacccaagagttggagtatgcgttagatggtggtttctccgaggagtaggcttcgtccgtgccgtcgaggatgcctgtggagtggtgttcccgctgccgttcaagtcaaggcttagctccagttatcttttgtttttccgctgcatttatgtaagacttttataatgtttgtaagacgtggatctgtatgtcaactttgtcgtttgtgtaccccggccggtcctggacggggattttaatgcacattctgcttggaattctattcgggaatttcttggcgtgacagaaaaccactaaaggacctaaagtgaacggttctaaaagtagtgggatgtcatatatatatggtttttgattaggggacgattttgtaactcgatgacaagttgagcgaacttcggtgtactttttcctagccctgtcccaattattttctccttccgacctagcccactgctcaccagccgaaccctcctgcagccctagccagcttgctcaatgggtcgggcaaactgagccgagccgttggcctcggcttgttccccttcaccttgatggcgacctgccgccgcccaatccaccagagtccaggctggcctgtccgccaacaagctcatcgacagaatccattgtacctgccgctcctcgccacaattagaaatcgcagcgcattaaaaaccggcacctttgaggctacataggtatccattcatcaaaatggcatcccacgagtgtgcgctctggcgggaaaaaacactataggtgttctttctagtattttcggcatctatagtgccatctttttttatgttatgttgtagtgacagctacatgaatgtattttgtcctttcttggcctatttggtctatgtggacagtgattgggccagtacgcctatcaaaacctacttttgctttctccctacgctctagccacccctaaaggcttataatcttaccgtgccatgactctttcacagtttcactgtcctgtaaccttcgacagccctttgtcatcttgcacacttcaccatagcccacaggcatggctttgcatactcccgccactcttcgctagtgctcaattgcttctactattatggccaaggccttgtgaccttcgtgttagagtatatggataagatcgtattgtatccggtttgttatggtaggataggattagtttccatctctatctctttgagtttacttaagatacaatccatgtactcctatatatatcggcccctgaggctcgatacaatgtgcgatctgaggacgtggtcaacctccataaaatccacgtcctgccgtcgccaacctcgtccacgtcggccatcccccgtcggttccccgtagcctgcctccgtgccatgcacctcgccgtcgttgcccgagatcaccgcacaggaccacgacgtggtcaacctccataaaatccacgtcctgccgtcgccaacctcgtccacgtcggccatcccccgtcggttccccacagcctgcctccgtgccatgcacctcgccgtcgctgcccgagatccccgcacaggaccacctccacccgctgtcggcgccatctccatcaagttccaccgtcgtcgccatggtcgttgcggcatcgtcggcgcggcacagggtacggggggacccatccctgccggctcctcctccgcggcggccgccgccgcctagggagctcgtggccgccgccgccacctacgcccgcaggccaccggttcaccatcgacaccccttccgttgacgccccctcacgggatctggaggtcgtcgtcgttgcaattgatgctatctggccaagcaatggcctcgccatcgtcacctctccgcccgaggaccgccatcctctgcatcccaggtcgtctccgcccattcctcgtcgtcctcctccggccaccgacactaccatctcctcctcggactactcctgacgtgagctcgcatcagcctcgaccatccactggttgtcgccgctgtggtgggccacctcccggcgtcccctgttagccaacacacctggagtccctgcgctgtcaccggactgtgaggtcctctcctccatcgacctagagaccggcctgccgaactcctctctctctctgtttctctcgttgagagcagggaaaggtggggatgaggttgtttgactaaaggtctatggacttggtgtatggaccatcgaggtggaccagctgcacaggtgctgctagcctgctaccgtggactactgctgctgctgtaccttttctttttctcccgatcagagatcgggtttgtgttgcctaccgcctcatcaacatctacgtgactccgacatcggcatttactttgtcgtcctaccccacgcatcatcggcttgaggacccgttcaagcgctcggctacgacgataccttgccgccgatcatctttgactacgcgtctgcgctatcaaacttcgggttgccggcttgccgctgcgtcaccccctcgggccacagtgtcgccgcgcctggtccacctccactagttgttggaatgctgagaggcgccctcctcagcgtggcctcaccaccagtggagttctcgccgctgcattgacatcgagccacacctatgtcgccccttcgggtcatagcgttgtcgctcttgtcgtcttcatcgtcgactgcgtatcgacatcctcgttgtctgcactggtcatcttcagccgttgggttcttctttgtctacttcgagaatcactgctgcatctccgggatgccactgttgccattctaggctggtggttcagccgcccctacttcggctaccaacatcgtcgtccaggtcattggtcccactccatcgccttctacttcgtccgtcatgattcattgccagtgtcgctgtatcttcctcgactacacttcgctcttctctggcaactgcgtgttgctccggcaattattcctctacgccgttctcgcgccgcaaccgtcttggaggccttctctactagtcctctccgacattggcgtatgattcatggtggtcccctatctcgcctgtgcggtattggcaacactggtgcgcacgttcgtcccaagttgtcccggggtctggcaaaccctgtgtgatgtctcgtccttcacggttcgattacatcggctcttcagcatcatcatcctcaatgactgccacgatcgtgtcaccttcatcttcttcagcgcgtcctcgctcacgactactctacagcgccccaagcacgccttgccgctcggctacctcgacatcagcttccccacttcggctacattgaccacggctactctacgcacggcttcatcgaccacggctccctcgcatccttcgcttcagctacatcggcaatagaaaaaagggctatccaagtgtccgcattgctcacgcttgggctagggggggaggggttgttagagtacatagataatatcgtattatatccgatttgatatggtaggataggattagtttccatctctatctctctaagtttacttaagatccaattcatgcactcctatatatatcggcccttggggctcaatgcaatgtgtcaatatttgctgcattcctctctccctatactatccaacactgcctccaacatgagatgtttcctatttattttaatttggaaacatttattggatagtatttttctttgtctagattaaatattttcgaagtctatttgtgtgaccgatttctgaggtctattctctctctttcatacaaattttggttcagtccattccctcctaaatgtatctaaagtcgacaaatatatcctgtcatagtgttctttgggttttatatctattttcctttgtactttccatttatttgtttttgtttcattgtatgtatgtttgtgcttcagagcttcaagaagcagattttgttcatggatttgaggaggctagttgggcttacttttatgtagcacatactttttgttcaaattatttcgtacttataaaactagatatccatatgattttagatcacttatttattggttataccctgaatcatggtaaccattggttcatctatcatgatcacgtctgatcaacatgggctaggtgagagtagctcgtcctgttgaatcatatctcatgaacgatgaagtagattctcatgtcaagaagtactagtatatgttaccagcattatatttctgaaaggtttgatcacgatttgcaggagaaacagactgaaacaaatgaacaggaatgggccaagggaattttgtcacgcccagaaattcacgaacgagaatttcaagcagaatgtgtaataaaaacccctgtctaggaccagccagggtacacaattgacaaagttgatacacatatccacgtcttacaaaaatatgaataaatcttacatatgcaatggaatttaaataatcgagctaactagccaattgagctctcaggtaagcgtagcatctcgaaatccacaacatcctcgatgacagcaacatacctacccctccaagtaatcaccatccgtataatactctgcttctgaggattaggggaaataaagcaagactgagtactacctgtttacacccaaatttggcacttagggataaaataggagaaattgccaaagtttggaagtctgccggttttcctctgtggggccggtctgaccgccgtgtgtgggccggtcagaccggctgtatgtggccggtctgaccggcagagtcctagtccaggtctgtttcgccgggtctcgaagtttccttactcgggaaggcatgtttcgggtttcctttggattctatcccgagttggacgtgaagagggcctgtagagggcaagaccaacctctatataagggacatggccggttcaattgtaactaacaaatctacaatcaatcaatcgaatcgtttttcatattgcttttagttttctcttagtttgtccatctttgtcgatttgcgccgtaaatcatccgttgtcgctacgagagtgcgacacctctttgtaggttgtcctgaaaaccttccgttttacccatgagacgggtagttatctagaatcggctccgctagccggtttatttatcaaaaaccatcttggtttagcttttgctagatcgaggtggttggtgactctaggatcatcgcaaggcgttaggtgctgcgatcgtgcttgtcaacttgtcataaaaagttaccaacacgatttttggtgactccactagggaaatctgctcaacgtcatctcaacttcgacttcgccatgacgaagcccccgtcatccaaggcggaggtggaaccgtccaatgtgataccaattacattggaggagctcgatagggaagcgcgcaagtccatggaggagtaccttaaggaggtcacacatgaggcattgatgagggcgtgcactaggactcgtcaaagtgtgatcgtcaagcctggaccgcgcattaagcctaatttcaatgtggtaagttctaaagaggtatcacaatctatctaacaacaaattgcatctacaatagattcatctatagctacattgaatactaagttaaatgcatctattgagaatcatgttgaaggatttttgaggactaaattcagccctctcatggccgattttatgttcaaagataaagcctctaccagtgctagccaagcccctatagatcaaataagtagtaaaaccgatggggcgaagacacaacaaaccggtgaggggtggacggcgcatatagccggtctgatcgggctagatggccggtcagaccgcgacttcgccgccggtcagactggccagatggccggtcagaccgggtattaccccagcggtcagaccggtcctcatattggtctgaccgtgcctctggacgccggtcagaccggcgcaatcatcccaatacagggggtagatccaatgacaaacaatgcgtatttgtatcatcttagaacatttgatccccctgtatctaaaggcactactagttcccaaatccccccccacatgttcccaatgcttacaatgatgtttccagggggtatcctcccgatactaggcaaggccaatataattatattgcgccgcaaccacaacctattaggccaccaaatccaccaccaaaccaacataggcctgataatatggaggaattgattagtgggatcattatggataaattcgggattgaagctaggaatcgtgctaaggtttaccaaaagccgtatcctgaccaccatatcctcgtggttatagagttcccggatttaccaagtttagtggtgaggatagtaggaccacatgggagcatgtaggtcaattcttagtgcaatgtggagaggctagtagttccgatacttttaaattgcgcttgttttctttatctttgtccggtactgcttttacatggtttacttctttaccggcaaattctattcatacttcggctcaattagaacaaagatttcatgattagttctatactggtgaaactgagcttaggttatctgatttaacatcggttaagcaaaagtataatgaatctgtcattgattatgttaagagatttagggatgttagaaactgatgttatagcttgaatataactgatagagatttggctgatcttgcttttaatggtttaattgctcctattaaagaaagattagatggccaacaatttcttgatgttagtcaactcatgcaaaaggctctagctcaggaaagccgggttaaggatagtaaaatatttgttagaccatatgaggagaagcctaatgttaattcaattgattaccctgaggctagtgatagtgatggtgagagtgatcatgatatgtatgttgttgagtgttcatggacaaacaaaaataagccttttgtttgttctaatttaattctgactcctcggaaatatcggcaaagtgaggttaggtgtagttttgatgtggccaaatgtaacaacatttttgactatcttttgcaaggaaaacaaattagattacctaaaggccatgtcataccatctcaagaagaattgaagcgtcgagcttattgtaaatggcatgattctcattctcactctactaatgattgcaatgtgtttcgacgacaggttcaatcggccatagatgaaggacgattgaagtttaccgatggttccaagatgaagcttaatcatgatccttttccggtgaacacaattaattttgatgataagaaggtattgattcggccggctggagcaagccgaatctgctatggggaaaggagtgatcattggagagcctaggccaaagatgatggtgctaaagaatccggaggttggtgtctggaaggagaataggagtgaagcttctagttctaaagttcctaaaaagactaaggtgaccttcgatatgcttttggataaacatgagaagtaaggtggtgagaaggcttgtaataaaggaaaaagaccaagatcatctcctagggaatgatttggtcattcaccaagatggttggaatcatctacatatcatcgtcctcaagacatgtcatggggaccttacccaatgccgccgccgggttatcattatccttactacatgccatggggggcaacactgccaatgttcaatcacatgcctccaatgcaatacagccaaggatggggaggaccaaggaggctagttcatgagcgtttgtcttcaccaaacaatggccagttttatggtaagaaccgggccaatgaagaaaagagggaaggaaagcgcgttaaagtggagactaggacttcggaggtgattaccatcaaagtggggtctcatgatgcgccaataccttctggagatgaagttggagagtcttcaagcaacaaatccgaagccgggaccagctcatcacagtcggccggtctgaccgcagccctacagccggtctgaccgggccatctggccggtctgaccgtcggcctaacatcggtctgaccggtccatctggccggtctgaccgacgacccaatgtcggtttgaccggcgcttctggccggtttgaccaatggtctaagtccggtctgaccgggcttcagcgctggatcgataggagatttgcaaagagttgtgcggggggcttcatcatcttcgagtagactcaacagggggcattatttacctcctagaacagagccgaaacagaggtagattcctaaggatttaacggctactcaaatgaggaggttgcaacatcttcgggcccaagaattaagagaaagagaggtcaaagagcgaagggatagaaggttcaatgagttgcgaccaccgcctacaaagttgtggaggcgtaagtccatagacattgaagaatcggttgttgtagaggagaaggaagaacaatcggttgttaaagatgagtcatctccaaaggaagacatggatatcaacatggtatgtatgttacctatggagttttgcgctatggatgaagccgaagttgctcaattttcactaggtactaaagatgtggtttttgagaagcccgatgagtcaaaccgtcatatgaagcctctatatctcaaaggtcatattgatgggaagccggtctctaggatgctagtggatggaggtgccgccatgaatttgatgccatactcgttgttcgagaagttggggcgtggagatgatgagttgaagaagatcaatatgattctcaatggcttcaatggtgaaccaacggaagcgaagggtatcttttcggtggagcttaccgtgggaaacaaggcgctaccaaccgctttcttcatcgtcgatgtgcaaggtaactacaatgttattttgggtcattgttggatccatgccaattgttgtgtgccttataccttgcatcaatgtttaattcaatgggatggcgatgatgttgaaattgttcaagcggatacatcggctgaagttgcaatggccgatgctacttttgagtggcgtcatgggaatattcaatgcttgtcggggatggatctttctagctatgatttcattagtatctccaatggcaactttgtacctatttctgtaaagccggctagtttagcacggctaggccatataaatttatgtaatgagtaaagaagctaatttagagtggagggtgcaagaatatcgatctacagagaacgatattggtgaagctattgaagattttgatgaagtagagaagcttggtcaagggtttacatcggctgatccgttggaagaggttggcatatgtgatggaactaagccaaggccgacttttgtaaacaaaaatatgagagccgattataaggtgaaaataatcgagctacttaaggagtatgtggattgcttcgcatgggagtatcatgagatgccgggtcttagccgtgagcttgttgagcataggcttccaattaagccgggttttaggccttataaacaaccacctcgtcgtttaactcctttgctatatgaccgagtcaaagaggagattgatcggttattgaaggcggggtttattatgccatgtcgttatgtggagtgggtgtctagtatagtcccggtggagaagaaggggggtgggaagattagagtttgcatagactttagagatttgaataaagctactcccaaagatgaatatcctatgcctatagccaacatgatgatcaatgatgcattaggtcattatttctgatactagaagagccggtgcttgattttaaatctttgtgcgaaattggcaaaattgcagaccaggggcggtctgaccgtgattgcacggccggtctgaccggtgaccaggggcggtccgaccggccacatgccgccggtctgaccggccgtgcacggccggtctgaccggttctggacagagcgctggggggcacgccgcaattgattcaaaggctaaattaattgtaaattcggacatttgtgcccaagaaacagaagaagattggaggattcctttgattagatatttgaaagacactgcacttaaggttgattgaagaattcggcggcaagcgttcaaatatacattgcttgatggagatttatatcactaaaatatagatggagttctattgaagtgtttagatgatgatgaa

SEQ ID NO: 14540 - DNA, 8677 bp, Oryza sativa
tgagagggcaagtccaacccctatataagggacaaggccggttcattgtaaagatcaatctacaatcaatcaatcgaatcgttcttttcatattgctttcagttttctcttagtttgtccatctttgtcggtttgcgccgtaaaccgtacgccaccgctgcgagtgtgcgacacctctttgtaggtttgtcctgaaaaccttccgttttgcccacgagacgggtagttatctagaaatcagctccgctagccggtttagttatcaaaacccatctaggtttagctctttgctagatcgaggtggctggcgactctaggatcaccgcaagacttaaggtgatacgatcgtgcttgtcaacttgtcaaaaaagttgccaacacgatttttggcgactccgctggggaggagatccgttcatcgtcaactcaacttcgacttcgccatgacgaagccgccatccaagacggaggtggagccatctaatgtgatgctggtcacattggatggcttcgaaggagaagatcgtaaagctatggaggagtacatcaacgagctcacatgggaggcgttgatgagagcaactactaggactcgtcaaggcgtgatcatcaagcccgggccacatcccaagcttgctcccgacgtggtaagtaatgacgaggtatcacaatctatccaacaacaaattgcatctacaatagattcatctatggctaattttaaagatcgattaaatgtaatgtttaaggataaagttgatgggtttttaaggagtaggctcggttcttttatggatgattacacattaaaagataaagcctataccactgctgatcaacctcctataggtcaaacgggtagtaaaaccgacggaacggcgttcacggccggtccgaccgggcctgacagtcggtcagaccgcgacacaaccgtcggtccgaccggccaaatgaccggtcaaaccgggtattatcccatcggtccgaccggccagatggccggtcagaccgggtattatcccaccggtcagaccggccctcaggccggtccgaccgcgcaacatgacgccggtcagaccgggccctgggccaatcagaccagtgcaatcgtcccgatacagggaattgatccaatgattaatgctagttatttgtatcactttagaacatttgatcctcctgtatctactgccaccactagtcctcaaattcccccacatattcctaacatttataatgatgtttctaggggatatcctcccgatactaggcaaggccaatataatcatattgcgccacaaacgcaacctattaggccaccaaacccaccaccaaatccacaagggcctaataacatggaggatatgattagtgatattatgaggaatagattcgggatcgaaactaggaatcgtgctagagcttacaaaaagccatatccccattattatgacaatgtgctgtttcctagaaattatagagttcccgaatttgccaagtttagtggtgaggatggtaagaccacatgggaacatgtaggtcaatttttagcgcaatgtggtgaggctaatagtgatacttttaaattgcgcttgttttatttatctttatccggtaatgcttttacatggtttacttctttactggcaaattctattcatacttgggctcaattagaagaacaatttcatgattatttctatactggagaaactgagcttaggttatgtgatttaacatcggttaagcaaaagtataatgaatctgttgttgattatattaagagatttagagatgttacaaaccgatgttatactttgaatataactgatagagatttggccggacttgcttttaatggtttagttgctcctcttagagaaaaactagatggccaacaatttcttgatgttagtcaactcatgcaaagggctctggctcaagaaagccgggttaaggataataaaaaatttgatagaccattcgacaaaaagcctaatgtcaatatagttgattactctgatgctagtgatagtgaggaggagggtgatcatgatatttatgttgccgagtggtcatggactaacaaaaataaaccttttgtttggtctaacctaatgccaactctcgcaaagatcggcagagtgagggtaaatatagttttgatgtggccaagtgtgataaaatttttgattatcttttgcaagagaaataaacctatctctgtaaagccggctagtgtagcacggctaagccatataagtttgtataatgagtaaagaggctagtttagagttgttacaaaagagggtgcaagaatatcggtctacaaagaacaatattggagaaaccgttgaagattttgatgaagtagagaagcttggacaagggtttacatcggccgatccattagaagaagtagatataggtgatggaactaaaccaaggccgacttttgtaaacaaaaacatgaaagccgattataaggttaaggtaatcgagctacttaaagagtatgttgattgctttgcgtgggagtaccatgagatgccgggtcttagccgtgagcttgttgagcatcggcttccaattaaaccgggttttaggccttataaacaaccacctcgtcattttaaccctttactatatgaccgagtcaaagaggaaattgatcggttgttgaaagcggggtttattaggccatgtcgttatgcggagtgggtttctagcatagtcccggtggagaagaaggggagtggtaagattagagtttgcatagattttagagatttaaataaagccactcctaaagatgagtatcctatgcctatagccgacatgatgattaatgatgcctcgggtcataaggtgattagctttttagatggtaatgccggctacaatcaaatctttatgacggaagaggatatgtacaagacggcttttaggtgcccgaggtttgttggtttatttgagtgggttgtcatgacctttggtttgaagaatgccggtgcaacgtatcaaagggcaatgaatttgatcttccatgatttgctaggtattatcttagagatctacattgatgatattgttgtcaaatcggatgatatggaaggacatatagctgatttgagattagcttttgagaggatgcgccggtatggtttgaagatgaacccacttaaatgtgcttttggtgtgtcagcggggaagttcttaggattcatggtgcatgagagaggagttgagattgatcctaagaagatagaaaaaattcgtgatttcaaagcgccgacatgcaagaggttcaaaagttgctaggtaaagtgaattattcgaggaggtttatttctaacctagcgggtaaaatcgatgcttttgttcctatacttcgcttaaaaaaagaagccgattttacttggggggcaaaacaacaagaggcgttagaagagttgaagaggtatttatctactccacccgttgtgcgagcgcctaaagccggaaagccttttcggttatatattgcctccgaagacaaagtcattggtgccgttttgacgcaagaggaagatggcaaggaatatatcattacatatttgagccgccgtcttttggatgccgaaacgaggtatgtttttatagagagactttgtctatgcttatactatgcttgtaccaaattgaggcattatttgttatctagtacatgcatagttacttgtcaagccgatgttattaaacacatgttgcaaaggccaattctaagtgggagaattggcaagtgggcatatgctttgatagaatatgatttgacttatgaaccattgaaaactataaaaggccaaattgtatgtgattttatagtagaccatcatatagatgttgcttatgagggagaggtttgcttagttgaagtcataccatggaagatttattttgatggttcttcttgcaaagaaggtcaaggcataggggtagttttgttttcgcctaatggcatgtgttatgaggcatcggttcgtttggaatattattgcacaaataatcaagccgaatacaatgctttattgttcggcttacaagttatggagatggttggagctaaatatgtggaggcctttggtgattcggaattggtggtgcaacaagtcgccgggatctacaaatgcttggatggatcactaaataggtacctcgattcatgtttagatattattgccaattttgataattttgctattagacatattgctaggcgtgataattctagagcaaatgacttggcatagcaagcatctggatataatgtgaagaagggattatttatgatattagaagagccggtgcttgattttaaatctttgtgcgaaattggcaaaattggagaccaggggcggtctgaccggcattgcacggccggtctgaccggtgaccaggggcggtctgaccggccgcatgccgtcggtctgaccggcgaccccgagcagtctgaccggctctgtgtggccggtctgaccggtattgagcagagcgctggggggcacgcttcaatcgatttggaggccgaattatgtgagaattcggacatttgtgcccaggatatagaagaggattggagaattcctttgattcaatatctaaaagatcccacacttaaggttgatcggaaaattcggcggcaagcattcaaatatacattgcttgatggagatttgtatcgccgaaacatagatggtgtcttgttgaagtgcttagatgaagatcaatctaaagtggctatgggagaggtgcatgaaggaatttgtggaactcatcaatcggcccacaagatgaattggttgcttagaagagcggggttctattggccgaggatgattgatgattgcttcaaatattataggggatgcgaggcttgtcaacggttcggcaatgttcaattggcgcccgccgccgtgttgaaccctataatcgaaccatggccgttccgaggatgagctttgaatttcatcggtcaaatttatccttcgtcatcaaaagggcataggttcgtgctagttgctacggattacttcaccaagtgggccgaagccgtgcctttgaagaatatgactcatacggaggtaattgactttattttgaagcatattgttcatagattcggtattccgcaaacgttaactacagatcaaggtgcttcttttatgtctaaggaagtgaagagttttaccaaatcttatggtattaaattgttgagttcttttccttactacgctcaggctaatggacaagccgagtcgagtaataaaacattgttaaagctagtaaaaaagaagattgaggaacacccgaagaggtggcataaagtgctttctgaagcattgtgggcacatagaatatctaaatatggttccactaaagaaactccttttgagttggtttatggtcaagaagccgttttaccggtggaggtaaatcttggctctcttcgttatatcaagcaagatgatttgtcaagtgaagattacaagacgttgatgggagacaaccttgatgaagtcatcgacaagcgcttggaggcattggaagagacagagaaagagaagaagagggtggccaaggcatacaacaagagggtgaaagcaaaattgtttcaagttggagacttggtttggaagacaattttgcctttgggtactcgatccaaggagttcggtaagtggtctcctagttgggagggtccttatcgagtgtgcagcattgttcgagggaacgcatactttttagagacacttcaaggggagcattttcagcgagcaatcaacgggaaatacttgaagaaatacttcccgagcgtttggcaagccgcttaagaggtactatggctggtaattggattatcgtcctaagagcaaaaacatgctctatgcttttagattcacgttgttcatcaaaaaggcaggggggcatgtgtttacacccaaatttagcacctaggattaaaataggaaagattgccaaaatttggaaatctaccggtttcctccgagtaggccggtctgaccgccatgtgttgggtggtcagaccgccggttgtaagccggtcataccgacggtgtgtggccggtctgaccggcgggtccgagtccgaccctatttcgtcgggtctcgaggtttccttgctcgggaaggcatgtttagggtttcctttggtttctaccccgagttggacgtggaggagggcctgtagagggcaagaccaacccctatataagtgacaaggccgggttcattgtaaagatcaatctacaatcaatcaatcgaatcgttcttttcatattacttttagttttctcttagtttgtccatctttgtcggtttgcgccgtaaaccgtccgccgccgctgcgaaagtgcgacacctctttgtaggtttgtcttgaaaaccttccgttttgcccacgagacgggtagttatctagaaatcggctccgctagccggtttagttattaaaacccatctaggtttagctctttgctagatcgaggtggttgacgactctaggatcaccgcaagacttaaggtgctacgatcgtgcttgtcaacttatcaaaaaagttgccaacaagtatatgattgcgacatttgtacggtgacaacaaaatgcttaagcgattgaagtgctcaaaaatctcgtttcaaaaaaaaaatgctcaacaaacacctaccatatctgcctaattcaaaatttccctacatatctaaatcttaatttgaatattcaattttacccatgatagaaaactaaatttaaagcggggtttggatcctgggactaaattgtcacatcgggtgtttggatattaattagaagtattaaatatagactaataataaaactaattgcataaatgaaagctaattcgtgagataatttttaagcctaattaatacataattagcacatgtttactgtagcattaatccataatagattcgtcttgtgaattagtacatggttatggaataggttttataattagcctatatctaatacttttagttagtgtctaaatatctgatgtgacagggatcttaattttagtccctgatccaaactgggcataaatcctgttcaaatgaaatccactcaaatttcaaattccattcgaattcagattctaaaaaccaacctactactctctcctctacaactaccaaagaggcaaagcgaaaggctcaagaaagcggagtccacccatccatctcctccaaccccaagatccccacccaaatccacctccggcggcggcggcgatggccggcggcgagtacaccccggccgacgctgaggcggacctcctcctcccgccgccggcggggtcggagccggacgagccggcggcgcggccggcgccggcggacacgctgggcgtcgcctacgccatcttcttcaccctcggcaccggcttcctcctcccgtggaacgcctacatcaccgccgtcgactacttctcctacctctacccgggcgcccccgtcgaccgcgtcttctccgtctcctacatgctcgcctgcttcctcccgctcgtcctcatcgtgctctgcttcccgaaatccagcgccccggcgaggatcaacaccgggatgtcgctcttcacggtggcgctcctcgtcgtccccgtcatggacgccgtctacgtcaggggggtccccgggctgtacggcgcgttcgacgtcaccgttgctgctacggtgctttgcggcgtcgccgacgcgctcgtgcagggtggggtcatcgggttcgccggcgagctccccgcgcggtacatgcaggctgtcgtcgctggaactgcaacatcaggtagtgctccgatttcttggatttggatagttctcctgaaatttttaacacatcatgttcacaaatcagtcattcggttcggttgacatttagagctgtcgaatgaattcatggcgattttaattttctgagcagaatccagtgaaagtggtcaattgtcttggtccagttgagttctctgatggttggattgttaccccttaaacttgttaacacgtccgttcacaaatcagtctctccgtttgacatttagacctgtcaaattcatggcggttttctgaaaattttctctggtactaatttagtcaaaatggtcagttgtcggttgtcaattggacaattgcaaatgtgtgagctgagaaattcgatcaggattatccattgtgccagtctattgttatgcataaacaaggtgatttgaagttagtgatcaagaaacaactactggccatctctttaaatccatcaaattaaagttagagtgacacgccaatggagtacttgcaaactttacacattcaagtgaagaaattgcaaatgcaggcatttcgagaaccaaaaggcaatgtggaaacataccagcaccttaccaatccgcgtacttgttgcaattcagattggtttgacaattgttgcaatacactgtaacattgtttcttatattgaattttgcaggtgtacttgtctcagtattgagggtaattaccaaaggagtatacccgcaagatgccaatgggttaaggaaaagcgcaatcctatacttcgttgttagcattgttgtcatgatcatctgcatagtgtgctacaatgtggcga

SEQ ID NO: 14541 - DNA, 10126 bp, Oryza sativa
tgctttgctgttttacactaaaccgttgtaagtatgtagtactgtgtatatactgctgctggttcaattcatatggtaattaaggaagataattaggtttaatctaatgagacatggttgcatcagtcggtggagccgggtagccaccccccccccccccaaaaaaagtttccaactagtcttttttagctctttaacacgtttttaaaattgctaagtagtgtgtttcatgtaagagtctcactctcttatttatcgcgcacgctttctaaactactaaatgatgtattttttaaaaaaaattatatcaaaaagttgctgtagaaaatcatattaattcattttttaagtttttaggtaatacttaattaaccatatcttaatatgttgcctgttttatacgcagcgaagagattcgtaacccctaaaaaaacacatcctaatgaattaggtggtgtttagatctagggacttaactttagtctatatatttagacactaatttagattattaaatatagactacttataaaactaattacataaatgaaaactaattcacgagacaaattttttaagcctaattaatccataattagagaatgtttactgtagtatcacataggctaatcatggattaattagactcaatatattcttctcgcgaattagtccaagattatggatgggttttattaatagtctatgtttaatatttataattagtgtacaaacatccgatgtgataggaacttaaaagttttagtcccatctaaacagggtcttactccaatataatagaagggtagccctacccacttggttcaagaaggttggccccaggccatccgaccttgaacttgactgattgggatgtcatggcccacggtgggggaaaaaagtttgatcagcttttgcattcttcgaaattgttttttttttatattttttctctattgtttgagagttgagactagttcaagctaatgagccgagccacgctagagcgaaaatcaactttccttcaaaattaaattatttttatgttgaaagaaaaattacagatcaatcgtctagctgcacaagtgcacatcctagggcggtggaggcgtagagctcactgagaatagacgattcacaaaccatcccaatcttgaagtagtacttcctccgtttcatattataagtcattttatttttttaaaaaaattaaatgatgattaagtttgttgaaaaatataacaatatttttaatacaaaacaaatatattattaaaatatattcaatgttagaattagtggaactaatttggtgttttggatgttgctaaatttttctataaatttgatcaaacctaacaaaatttgatttgaaaaaattttttgaacgactcgcacaagacggtgcgaagttctattgatagagcaggaaaaaattacaagattacaacccaggagggttgtaaccaggaaaaaggaaaaaactataccaccacccacacgccgacatcgctaacacacaagcccaggagaaggctaacaccggaccggccgccgctaagcgtgaccgaccgccactagaccaacaaaggaacacagacgagaacgccccctagggaaatccacgtttgaggcaccgatgctccaccaccacacaagctttgccgacatgtgagacccctgcaccggcgtcccccgctggccagccttcgtgcgccgaagaccaccacacccaccggcagctcctcctcacacctaggtcgcctcctccaccgccgaccgcgcctttttgccccaagccagcctcctccaccggacgcgcctctcgagccgatccggcctccctccatcggctgcgcctctcgcgccaagccggcctcagctgccatcggctgcgcttctctgcaccaagccggtctccgacccctccaccaaacgatgccgcgccgaccagatgcagccgtctcccacgccctcggctagttgatttgaaaaaatgacgacttataatatggagatggactatctaagaaattaagaagcacagacagacaaacaggggcggagataaagatgggcaccttgggctttggccgtagacttgcctcaaaattgtactgaaatcttatcaaaatatactgaaaattgaagtgtctaggattaaatacattactctgccctaggggttgcaaatctctggctctgcccctgaggccctgaccggcaagatgttcatccccctcttttggctacttttcatctggtttgaattgtaccaatttttaatactcttttctttagtttaatcaaatggagaaaagttgctttattctttggtttcttttatatgctagatgtgcttcacctaattaaagctagttaattatcatgcataaccgcacagatggctccacttttttctctacactggcactaatactttgccctaaacaagcatcaatgattaatactggcatttgtgctcccagttgtacttaatcatacagatcaaaagccagcttagggtactctcctctctgaatcaaaactacatgttgagctgatttgagttgtcccaggtatatacctgctcaaatactctaaaataatgtataataatatgctgatacagctagctagcgaatccatgtcttgtgattagtagtaatgttttaaagatagtatcttaattttcaatcatcaggctgcttcatccatatatattgagcaagatatcaacacggctagccatcggttgtcactgagcagatgaaacaccccgtttcttgcatgaatattgaactaattcctgtgaaattctctgtttgcaaacagggcttgttattttcatggccaaggaacaagatcagctcatcaaggtatgtaccgtaacagagcaaagctacctgataatacattttaaaaacgcttacctagtaataataagcatcaaattgattttcatgtaatcttatgaagttactgttgacttgttcatgcagagagttgagctgaaggtgagtgtcaactgctgcgacggatgccggagcaaggtgctcaaagccctcaaccttaaaggtactaccttcgtttcagattacaagacgttttaactttgatcaaagtcaatatgcttcaattttaactaagtttatataataataataataatattttaaaccaaagacaaatttattatgaaaatatattcaattatcgatttaataaaactaatttggtattataaatattactatatttgtttataaacttagttaaatttaaagtagtttgattttaatcaaagttacaacgttttataagccgaaacggaggaagtatctatcaaatggcattaactgtcttctcggccattgatcttggctgccatggttgattcttgaagctttgtgtttttgacgctttaattgtgggtgatggcatgcatgcaggcgtgctgaggacggaggtccacccgacggccggcagggtggcggtcgtcggcgacgtggacgccggtcgcctcgtcaagaggctcgccaaggtcggcaagatcgccgaggtgatcgtcgtcgcgcagccgtcgccggaggtggagaggaggaggcgcgacgtcggcggcagcaagaaggaggcgtcgccggacaacgggaagatgggcggcggcacggcgccgaaacacggcggcgccgacgacgacaagcgcggcgagacgaatggcggcgcagggagcggggctagctcagctcgaatccatggcggtggcgacgacgacgtgaaggcggccatgtgctgctaccaccgggcggagccgccggccatggccgtgcccgtgctgcagccaccgtactatgcggcgaacttcacaatgccgccgccgcagccgccggcggcggcgtacggttttggtggctgctaccacgggactccttcgccggcgatggcgctgtgccgccgcggccgtattccggtggtccggccgcagccgacccggttcgccgacgagtgctgcatgtacggcgacgacgacatcgccggctgccacgtcatgtgaagatcaccagtgtgcatcgaattttttttttctttaatcttctttctggttctactaatggagaacactagcctaattttatttatttaattgttttttttatgaattttcagcaaaaactaaaagtcttaatgtataccatcgaaaaaagtaattagtgttacagatccagctcttagtctctcaaatactaatgtccagttttggtctggacgaggagctagtgcatcgaaactttttctttaattctttgtcgttcttctactaatggagaacactagcctaatttaattaatttattttttttatgtattttctgcccaaaataaagtatttctgtataccatcggaaaagtaattagttacaatacagatccagctctaaatctctcaaatactatgaacttaatcataattgttagacttgttttacaatatatcttaccatcttaataacctacagtgatcaaaaaaccctttcagaaggtactgaaactacaaagcaaagaaaggtgcaacagctcaataaccaaatcactttcgatagaggcatcagttttcatttggtgataatacagtaacttggaagtcttggaaacaaactttcgcatatgccacagaaacaatgtgatgacccatgtatttttaccaaattgatcataccaatagtccaatactggtaggatagagaaatacaaagatgtacatatgtgtaactagctgtctgatattatttgaaatagcttcaagttatgatcataagaacagacaactttgtgatctcacaagacagttccactgggaaattgttacatcaacctttacatatcacaggagataaaatgacattttaagatgaagcagcagtagcttcaacaggtgcaggctcagcatcccagaacgaggtcttcttgcccgtctttgaaacggtctgaagaacggcatctggtgtaacatttcccttgacagtgaccttctgctccttgatgtctacgtcaaaggactccactcctgaagcaaccacaagtccaactcagatgtttagatcgatgcgctaaatattgcagtgacacttacaagaatacatatgcaagtataaataatcatttgtgcttccatgatctaatgcagaatattggaagtcattagggctgattgcagaggttgggtttgaaagatagccttagcattattcaagcaactgccttggaccaaaatgtgccaaagatgaagcacatgtagttttcctttttaccaaccattctttcaatttgattaaaaattaattgaatttataaatagcatgcaggagagaaattcgaaattatatgtttgcccactatactctatagttgtggataatttcaaatagcaatcattaacaacagagctcaaaattttatttataataccagcaaaacaagcaaatacagctataaattctcatttgaatactaaagttgttgcctaacttgtttgcgtctgcactccggataccttaatttccttttgtctatggacattgccacttacacaagtggtgagtgtcatggtagtgacagaaaggtacataattgccaaagtatgagtccaaaatacaatcgaaagcaatattacaaaacaatatctttatgcctagaaatcagacgcaggtacaatttgaaactagaaattgcacaagatttcacccaatcaaaattatccagtgttcgtcaaaagcatacagttaagggaatttttaaagaggagataccaattgcagagatataccaggattggttcagattcagcattggcataagttaagtccaatgttgcattgcacgcgttacattgtaaaaattgctcgcaaaaaggaaaaagttctcaacaaacagaacgctgaggacagagctaaactaaccttgcatctttcccagtacccgcttaacagctccaacacaaccttcacaggacatcccaaccctgagcacaacagtctgcacaatagacaaaaatagcaaggatcagctaagtcctcattcgtcctcaatcacatcttcgcacacgccacatggtactcggaatacatcataattcccaatcaagatttactgtaaccgacaacaattaaatgaatttatgcttcattctggaagggaactagtaataatcagatggggacaatcatgctctatcattgaactcacagaccataaccaacaagatggctcatttaaggtaggtacaacaactatccaatcgggcctactccgcaatctgtactcgtttcaacaagaacgtacacaaatcaaaatcatcaagctagtttcgacccccaccatgaagttctaaaacttgtccatcagttggtgtttgaactactgaaactctgaaaggtataccgccctcctagcaagatttcgcccaaaacatcatccccaagtcataccctggcctgcaagcacgatgaaggaaagccaagacaagcacgcgcaagaacaagcaagctgatcgatcagcgcgccggccaatcatcagatcataatcagatccctaattaaccccacacgcaagctaaaagaacacgcttcttcccccatattcaaacaactcgacgccaaaaaaaaaaaagaggaatcctcctctcttggcctccccatctacccctatcgatcaaccctctcctctctctctctctctctctctctctctctctctctctctctctctctctcttctctctccaggaccgcaggaagggaccgcgcccctaacaccaaacgaataaacaaggagttctgtcgcggggccgtacctcagccatggcggtcgacgcggcggcgaggcgaggcggagaaggcggcgagcggtggtggggggaactccggtggcgtctcgtctccgggcgggttgggcgggggctaaataggtaaatagacggaggcaaggcggtggcgtcgttgaacgggcgagaggaaggtgagaggagaggtgacgacgtgctttgatttttttttctttttttcttttcgaacgtgggatgacctggtctgcgcgtatgacatgtggggccacgggtgacgtgtgggtaggtgatgaggaggaggaggaggaggggggctggttctagattttccttttctttactgtacggtgctgacttagccggtcaacgcgacgaacggctccggggacgtcgtgattcgtgccgtccgtcaccgcgttgcccgccccacgtcggcccgctgccgctccaaaatactccctccctccaccaaaacaagaaggatcaacccctccaaattgatgtgtccacgtgcatggtcctagccctaggagaggtcacatctgtgtttcctcctaggttgattcttcttggacagaggaagtaggcttgttgtcgaaatctaaacttaaaaacttaatttatagctaattttaatggtttttagtagctttttcaatattggtttttaagtcgctaaagtaaatatgtaaaaattttacttataaattattattttttcactaatacttctttcgtcccgaaaaaccgaatctagtactggatgtgacatatatctagatttgttgtactaggatgccggtgctagattggttttttatgggacagggggagtatgttgttatggttaaatagtcggttgtagggcaaccaataagaactcaaatggtgaatagtctggcaggaagagtagaaagtcctactccgtgtgatcctaacatatttagaattttagctaaaatttgattgtattttgtaagatggaaacaaccatatttatccctctcaaatatgttctaatttgtagcactcttaaatatattaaaattcgtagctagaattttttttcgaagaattagtttttactttctgcttccttgatatggctgccactatttttcaccccaccgcaattttggacagctagtaatttttaaaccatcgacaaaatgccaaacttcttgaacgataaagccaatgccaggtgccagcatgtgaaagtgaacggaggtagtactaacatataaatgattccttttacaactaattttaggcagaaaacatgaaccagtacgaaaagcacgagccgtgtcaacaacccgtgataaccaaccaggcaaagccagcctttgctctttgccatctatgcagttccagaatgatgaacaaacaattgcccaagttgcgaaaatgcaagcataattcaaatgaaatgagatttgacctctcatcagtagacaagagatgcaatgccatacaatcaactacaccatgacatgacaaaacggaatgtttcaagtatcacaggagatcagcttctgactgcataaatttctcaagtctaaatcaccattctagataaagggggagcattagaaattgtacagaacaagcaggactccctacaacggatacacattcatatatacgttgctgagtacaagaaggattgctagttccacattcagtcaatgaatgttgttctgttcatacatctctccatatttaggtgtattaaactcccgtttttgtcaaaactccaaccagtttacagaagtactcccaagtcctaccaccaaagtgttatgagctcctgtgagataacaattcacattgtcagataataatacagaaagaaaaatggtctgaacccttgtagaatcaaagacatatgcccaacatagttgatttatcacataacataaaccttcggatttgctatttcactggcagcttcaatttgacttggcattagcctctccagtttcatttttttttctctgaaggaataagccaggttatacacctagcccaaacatttaggtccatttgagcaaaataaaggtatgaaagaggcgagggaccaagcataattatatgcgccctggttatctagcgctttcaaaattgggggtggaattatgtggctaaagcttttttccttttctaacagaaaaattccagtgactaccatcccatcaggccatcacttctcaaccctagtcagctatctcatgaccaagtttctactgaaatggtattaagtctcttaggggactcgattcgattacagcaaaccagaacactaatccacaaataacaatagcatattgaacaatgcaccagtggtggtggagggtggtggctgttgtcaatagagatgattctggtggttttcacacgcttatttgccaaacaacagaattattatttaatacaaagcaagcaccgaggatcttaacatccactttaacaagttaacagtattccgaatacaagtgaagaagcttgattgattatccagtaaggaagcacttcaaaaggtaaaaccataaaagatcccccacataaacaatatcttaattaacaaaataaaatggattacgattgttgcaactaggttagcatttcagctcagtcaaatatttccttatactctatacagatcagcaagtgctcatggattgaatattacggtcttggactgtgtaggatatcaaatcaaaagaccaaaccgataacaataatgacagcaagtatggaattcttacccaccaaaagaagcagcaagcagatcggttatgcttagctcatcctaatccgccatgctggaatcaccaccatcaggagcatcaatttcatcttcgttcttcaggttcccacagacattgcactcaaacacatgggacggctcaccgtttggcaagggcggaagtggcgcaagcatgccatagcattcaccatggttacacagataccttacaaagaagtatgagtgcgggaaatcatcatcgctatcgctaccaccataccccttcttctgctccatcccatcatcaccaccttctccaccattaccatcctcttcctcctcttccgatggtgtcatcctcatcgccgccatcgctatcatcatcttgcttccacttgctctccacctgacaccgctcacactcgcatcggaacccatagtcctccagcaacctctgctgccgatccttgtactgccaattggccgcgaagtagctgaggcacacctccctcccctcggtgatgtcgtgaag

SEQ ID NO: 14542 - DNA, 1297 bp, Oryza sativa
atttttccttctgccatcagaaaataccatatcctatattttgttgaatatttctctgatgcatttcatatcctttttattttcagattgctgctttcattgctgaacctgtgatgggtgctggcggtgttatccctcctccaaagacatactttgagaaggtaaccagaatcacatgttagccccacagtccatacaaccttgatgcattttctgaattcaagaaacgtttattgcatgttgattgttgaacatattacatccatcatatcctcagttcagtttgtagtatttgccagatttttagctgactactgaagagaagttatttattctatgtccttaggattatattatttcaattaaacttggatgtaaaacagagaccttctgtgtttatcatttcccggtcagcccatgcactgttctgggaatgcataaaaaatgcattgatatttagatagaattttgttactataccgtctctaagatttcttacattttaaacaacttccaacacttacgtaaaaaacaagttgcaacaagaaggtagccctgattttcttttatgtagcttcattattattttcatggtgctgatgccaattatttgttctttccacataaaatatttagattattgtgctgcctctaataattttctgtgggtttgttctctaccaacagattcaagcagtcctcaagaagtatgacatcttattaatagcagatgaggtactcgaaagtttctctattagaaagaaagtctgaatggtagaatatttactttatgggaaaattagtacatcatcatccatttgtaggtcattacagcatttggtagattgggaaccatgtttggatgtgatatgtatgacattaaaccagatcttgtctcaatagccaaggtgagttcaggcttcaataacagcagagtgcttatctgataagacaagaactctcctctctcttttatttgtttgatgaaactgatagagattcgtttttctcatttcttttctcccatcaggctctatcttctgcctacatgccaattggagctattcttgttagtccggaaataacagatgtaatttattcacagagcaacaagctcggtaaagacaattccatgggatgaatttattttttgtgttgcttctgaattgacaagcaaaatcctgtttgttacaggttcttttgctcatggatttacatactcggggcatccagtttcctgtgctgtcgccatagaagcattgaagatttataagtaaaacacacttttcataataac

SEQ ID NO: 14543 - DNA, 8049 bp, Oryza sativa
gggcccactgatttttgtttttgtttttgctgattaggctgccacgtgtatggctgtatgccatgtaggctgaaaacctctccagattgagttagggggatgattcatccggattgaagagtttaggctgtctaatatccggtattggagtttagagggtaattcgaacgaccgtaacagttaaggagggtaattcgtactttttcaaatatttaattcatccctgtaaacagaatcatcatccatcaacctccgtccgcatttcatccgagaagattgagcattcttcttctgatgcaacaacattggagatataaacagtgctttgtagtcgtttctgcccccacaaatatcagtgtattcataatactccggtactccctttgaagatttcgttctaagttaaacgtatttgaatttgacttaatttatcaaaaaaatatttagccatattttctaataccaaacaaatatattataaaaaaattcgattgtagatttaattaaattagtttggtgttgtagatattgatatattctttatataaactaggaaggtagcccgcgcattcgcacgggcatgcttgttatttcttttcgaaaacaggtctaacaaaatgaatttaaattaaagttatgtatttcccttcttaattgaatgctcattgtttattttttcttaaaaaatcttaagaaactttaatttctcataaatatagttttctaccatcctgctgtctttaatttattgattttgtattgataccttagaagcttatacatgcaagttgtggaatttagtaaattcgtttaattatcagtgacattcatttattgatgtgtcaaagcgaaatatggcttgtatgtagagaagcataaaaaaattaaaaaagaataaaatatcgttaggacataaaatgagttttttcccctatagccaagggagtagattgattcaatactacctttgcggattaagtgcttcactaaaatagttctctctataaaagtttcaatgctatcttgtgggttaagtactccactaaaatagttgtgtaaaaacattacaaaagttgtttctaaaggtgacccatgagtctgagccaagctcgtcacataggagggtgcacatttgaggaacatgtgaaaagaatgcccatggagatcatttgtttatgagtgcgatgaatacaattgttcattcaattaaaaagttggataagtggcttaaagttgacattttacattgattgattatgaaagtaatggtacatacaaatctttgtgcccgtataactatttgccaacgatcaatagaacttgatagttactttcggtgttccttttagtatgtagcaaattggctacatattttacaacttactgtatctttggtgagatgcacctgctatttttttctatatgttggctagattgtttcattgttattaatcgataccttgggtgcatgtgacactatatatatttcaaacaaaaaagccttctcgggtctaaattgattttgcagtgtgggagacaattcatttgttccgtgcactgtggtatgattgttgtcatgatttaaatatttttgctctaaaatttatgattaaacattagaaatttacgtgatccaaacgatcactgtttgtgattttatgttagctaacgtgcattgggcatttagtgacaatatttatattgcataatcttaaatgtgaagcctaccatgcttaccctattttatcttttttgtttgaaagaattagccatttatacaatcatggtagtttgaatactaaatagtttttatcttttaagtttctaaaataattggtagataaagctcttagctcggtcatctgtgatatacacctgtactcccaagctaatttggcccctatcacacatgtagtcacaagctaatttggcccccatgctgatggtgttcccattaatgtcgatgggggcaaaactgtgaccgataaggagtcttaagcgtttctaggatgttcacgtggtggcttgagagttcttttaggaggtttaatggacttttagtatataatagataaatataattatattattttgacttaccatagttttagaatgcggggaataattttttttaacaccactcatagttaagtttattttacttttaccgttgttgatctaatttaattattgtgaatacgttgataaaaatatatatgggtattttttcatattttttatatttatctaaatgacacatataaaagtcagaaattataaccaaaatgtgacttttttgaaagttgaaatataatgaatatgatctttaaccatatatttagtcataaattatctaacgatataaacagataaaaaatatcaatttagatttgtggtttctaaccaacattgcataaaaataggaataagagagggaacagataaagagaaaaagagggaccgcggataacataccgtacttacgactccatgcgcactaaaatttttaattacatgaaaagatatgtacttattatgagtattgtgcatatctaatgtgatgaaaagatatgttcgagagcgatgaattctagactaccaagagcgatgaattctaccaccatgcagaaagatgcggtgttttttttttctttttcatggagataattacaaataatccacaactttgcacgacaaaggcgcatgcacattattctggtgctcataacaatcatatgcgtatactgatagaatatgcaacaacagtagagctaattaagtcgttttaccggacagggagtcagcaatgcctttggcaacgcaatacgccacggactgtacggtgatcatggggttgatgcccactgcggtgggcagcacgctgtcattgcacacatacagctgctccgcctcccagctctcgccatgggcgtcgacggtgccgttgcccaccgtggtgcccatccggcagcaacccatgtggtgcatcgagcagaagaggccccacgtctcttttagagattgatctaatggttaaaaatattgggtccactggattaaatgaaattcaatagtttttgcctttttctaagagattttaagaatttctctaatttatcagagtgccacgtggtggcttaggagcatttatagggtatacgtggcagcttagaagcgtttctagaaagtttcatggacttttaatgtataatattatgtaccaaaacatggtcaatatggatcaaacaaaaaaaatcaaatatgttaaaaaatatttagccatctaattattgattttttttaactttttagctagaaaactgagagaggaagtgaggaaagcggagacttatcatctgttaggtcatatgcgtaattcatcaaaactacacttgtcatagatgatcttacttctttgatggattatccctacagacatatctcaaacattctacgttttgatccgttcattagtatgagagctatcataaatgatttgtcatggatggcttcgcttaagcgtgtcataaattgaatgtgtagattggcttaaaaaagtaattatttatttatgtcaccaagatcattcatatataaattaaagttccacgtaaaaatagatctaataatttttatagtaacaaattatggtgcataaccttaataaaaaaaataaaaaagaaagagaatactgagtgggaggagcagatgtggtggttcgtacgttttatacgtacctgtagctctaagataaaagggtgatcggatcggtggatttaatataatggttagtattaccgggtcaactgttttaacttaaaaataaacggttagatatttttctttttttctcagaaattattagagcgtcacgtggcggtttagaagcttttgtaggaatcccacgtggcggtttgagagtgtttgtagaaagtttaatcgacctttagtatataatatataataatatatttattttttggctagacgattcctcaaatttacattgcacgggctataatattgatactataggattcctcgacttatgagtgtttatagagtgccatgctaaatcatattggttgcttgcgttgtgaacaaaagttactcgatctaccttggtgcaagtgaacttaggggtcatccgatggcttagctgagcccttaattagttgatgtcgtttcatatcagaaacgaaacaacttggaagtttgaacgggatttttcttaaataaaaaacagcaaaagtagtttgcagatcaaagtttgaaccaaatcttaattgataaattgcaccggagcagtatatgtttggggactcaagagtttggatggatccacatcgatggactcatggcactcacggctgtttttgtggcgcagatcttctggtgcagggcgatcaccagtgaaagaggtcgacgtatatgtagtcgttgtttcgtcgcgcgtgcagaacgtaaggctcacgtagcacgttcttttttctatatataaatctaagcgattatcagggacaacagatcacggagggattactgtttctttttcataaatatgatccaacggtgtaaaataatgggtccaccagtttaagtgaaaaccgaaggctagatgttttgttttttattagaatttctagggatttctctaatttattagagcgccacttggcggtttaggagcgtttgtaggaagtttcatggacttttagtatataaagatttgacttaaaactaaaacatcttatattttcgactggatgaagtaacgctaaaaaattttcaggaaaattgatgcatcattgtactcgctaatccttgcaaccactgattcgttattcaatacaagcaactttatttctttagacaaggaatagctccaaaaatgaacccagccacgatcttgggtcacattcagcttgttcacatgcaccctgacgtttcctgcggggtgcacgtatcaatttgcccttcgttccccgcacaccggagccatcactttcaagaacggacggataatttccaccacgtcctcctctccacatccttttcatctcccacctcctcactcctcgtcagttcgtcacttgcttccaagaaccccgtgacaaggcgggaaggaatccgaatcgcagcgagatgatttgccgcagtctcctccttctcagatctaatgcggcctccaaggtgatgttgattaaattctgcatttcttggaggtttttactgcacctgcgtcactgcttgtaacaagaagtggaacggttttgatgtttccgtcttcttgttttttttgaatatttggaggtagtattgtatattttttgcactgtggaattgatttttgatccctataaaggctcaagaacaacagggtgttgctgttagtaagcactaagcagggttgggtgggtctgtttgattcgttttgcagccttagaaaggtgcagtcttttgttaatcgagaattggttaataattggagcagtcgtgtgtttgtgatttcatttattcttttttaatttgcctgctgcagatgttatgtttagtcagatttaagatgtttatgcttttttgagcaattatagagcaactctctaaaccctgctttcctgatcatttcgttgtgctgttatcagcaacttgccttcattctttgttttgtttaaaaaaaaaaccttgaatgtacagatttaagcagtaatggttttgctcaagattagagttttcttcaaaacagttgctctgagagtagctcgagtagtttgaagcgattttgaactcttaacattattctaaagtcagcatttcttacagctcatgtacctaaattctgcattcatctatttcctcacataggcaagcaacatagtaaaacatgtagctgccactggatgtttgccaaaatattcctcagaggcaccagccagatatttcagctctgaaccgtctcttcaggtcgactcgacagaagaaaatgggtatgttttatgtgcagaattatcacataattatgtgtatagacatatctagtctaaatttcttgttatctaccactgatgctgcaacattttttacctgtatcaggttcaaggggcatggcatgctggccccattcactgctggatggcagagcaccgatttgcatcctctggttattgacagatctgaggttctgcaatttggaattgtcttaaaatttttttccattgattctcagattatagcacaagatttagaacatgtagctttccatgttgacttctcttcataatgtggtggtttctagctttatcttatatcatattcaacgaattgcagggttcttacgtttatgatatcaatgggaagaagtacatagatgctcttgcaggattgtggtctacggcattgggtatgtgcaccagttcaagctgtattttcagatttttgtggtataccaaaaagttgttcctactttctagtaaaactcgtttcccgcatatgtaacaaatgtagtattgcatatatactaaactttgctattgtcctttgtatattgtcttgttttctttgcgtaattccctttgctttcaggtggtaatgagcctcgattgatcaaagctgcaactgatcaattgaacaaattacccttctaccactccttttggaaccgtactaccaaaccctcattggtaccttttttatctcactatctttacaggaatatagttaaaaccgtaggttgttgatgttatatttctaacagtgtgcttgttattttacttgataattcctagtttcaccatcttccaaataggaataaaatttgatgctacaattgattacatcacatttagtagttcccttgtttctgttaaaaattggtggtttctgaatcttgatgattatactgctaatttcaggatcttgctaatgaaattctcagcatgttcactgcaagggaaatgggaaaaatattctttacaaatagtggttcagaagcaaatgattctcaggtacaataattagtcaaaacaaataactatcattatttggagtttatactatacctgctctcattatgaacttttctgttcaagtttggttagtaaaaaattgcaaaaataaatgttgtgccacagaatataaaaacattgtggggttttatttactgaaaataaatagtgtatggtcccccagttgtgatattccacaaagtacaaaggtcagtcgtgatattcagaggattatggtggagtagaagtatggaagtattcagtattataacagtgttattctttacaggtaaagctagtttggtattataacaatgcattgggaagacctaacaagaagaaatttatcgcacgctcaaaatcgtacgattcattttactttacactttagccttttctcctaatgcaatagacgatttgttgatatgatttattttcatttatgattataattctcaattcattttgtcctgcatgtcagttgtatatttttacttgcagttctgtatataagtctttcacatgtcaataccagatgatggtgtcagtttatattatcatgctttttgtaatatttttgcgtcaaacttaacaacagatgaaatactctaagaattatttctaaatcaccgtccttgtatccaccagcattacctttcaatatcatttaagctccttaccttgattatttaagttctcgagccatttggatgttatacattcccagctattttatatttttacagatatcatggatcaacattagtgtcagccagtctatcagggtgagtaaatcatactccataacatcaatatttccttctgttagtccttaaatctatcaaataatattcatactagttacgaggtaattctataatcctaagtaatgctttcttctcttggtatatttagaataacttgctaattcctgcattgtttacagtcttcctgctcttcaccaaaagtttgatctgccagctccttttgttctgcacacagattgccctcctactgcgcttccatcttcctggtactcttgttg

SEQ ID NO: 14544 - DNA, 12439 bp, Oryza sativa
  unsure (1)..(12439): unsure at all n locations
taagtgtagcatcaccctgcccctactccacgaggtcgtgccttcgcgcctcgagcgacgatgtaggcagcgacactagttgggacagcagcagcaaggaacgagggtctcgagccgagagaaagggagaagagaagaggagaggaggcgctggtgcggtttgctggtgagctaagcggcgggtgcctcccatcctcacaacaaacttgatactacttgatatctagtaggtaccacgtttggtatctataggtactaggtttgatatctaagtattatttatgataccatagctaccagccatagaatctacgggtaccacctacagatgatatatggtgcagtgtacctacacaccccagcaaggaacatgattgctctagatccaaaagatccattggccgcacccctctagcaccatcgacacaaaacctacacaaatattttaattaagtagttgaattaaacctccctaaccgtatatgtattggagcagtgtattactagaaatgcaaaatggtgttcactattataaatttcagaggtctatgtgacttggctaaatttagatttatttcggagacttcgaaagagcaaaagctacactttatcgctcttttggaaacaggcaaaaataatttttcaaacgcgtgtttaaaaaacttatgtggaggaggtgaattcttttaggagtgaatttgaaggttcttgacatttcgagtattgttgagggagagttctatgttaagtttcatgtctggaacaagtcagatggcttccaatggattcttgtggcagtctatgcggctgctcaagaggaattcaaggaagcttttcttgttgggttggtgaatgcttgtagcaagatgtcattacctattcttattggaagggattttaatataataagaaaccctaatgagaagaacaatgataggtataatgacaagtggcccttcttgtttaatgctgtcatagataacttaaacttgagagaaattgaactttctgggcataagttcacttggcaaatgggttaccagtaccgacttacgagaagttggatagaattttgatgagcaagaattgggaacagaaatatcctttggttacagcaagagctctgaacagagaattgtctgaccatacaccgttattactagattcgggtactaaggcccaaaataagcaacctctattcaagttcgagcttggatggatgctaagagacggtttttatgatctagtagcggaagtttggaaaaaagaagatagagggttgactagtattgtgaggtggcaaaacaaaatccgtagggtacgtcagtttttgagaggttgggcaaaaatgagagtggcaagtataaaaaaaaaaaagctaggctgtaaaaagggtggaggcacttgataagaaaccagaagtgcaggtgctctcaagtcaggagttagacattaagaattatgtgaaaaataggctggcaaccttgctaagagaagaggaaatcaagtggtatcaaagagcaaaaactaaacggatcgtggaaggagatagaaatacaaagtactaccacatgattgctaatggaaagcatagaaaaacaaaaattttccaattggaacaagaagaaggaataattaagggtgatgagcagttaaaacagtatatcgctaattattataggaagctctttggaccatctgaggaaaataatttctccctcagtgagtcctagattgaggatattcctgaagtcacgctcttggaaaatgaagtcctgaccaaggatttcttcgaggaggaagtgaaacaaagccctccttcagatggagcataacaaggctccagggccggatggtttcccggcagaattctttccaggtgttctgggaggttataaaaaatgatctaatggccatgtttagagacttccataaaggagaactaccgttacatagtctaaattttgatataatcacccttttacctaaacaaaatgaagcgcgaatgattcaacagtatagaccaatttgcttactaaatgtaagttttaaagtctttacaaaggtcatggccaacagagtagctctagtagctcaaaaggtcgtgaggccttcgcaatctgcgtttctaccagggaggaacattatggaaggaatagtaatcttgcatgaaacgctacatgaaatgcataggaaaaggatgagtggggccgtgctaaaactggatttcgaaaaggcatacgacaaagtagattggaagtttttgcaacaagctttaagaatgaaaggttttgcgcctcaatggtgtagctggattgatttgattgtgagaggaggaagtgtagcagttaaggtcaatgatgacgttgggaacttctttcaaacaaaaaaaggcttgagaaaggggacccgttgtcaccaattctttttaatttagtcgctgatatgctagccattttgattcagagatcaaatgaacaaggaaacttccatggagtaattccacatctaattgataatgggctctcaattttgcaatacgctgatgacacaatccttttcatggaacataatctagaagaagccaaaaacctgaaattagtgctaagtgccttcgaaaggttgtcaggtttgaagattaattttcataaaagtgagttgttctgttgaggcaaggcaaaagaggttgaaaaggaatattgtttgttatttggatgtgaaaccggagtatatcctttcaaatatctagggattcccatgcaccatagaaagatatccaataaggattggttgtttttagaggaaaaaatccagaagaagctaagtagttggaaagggaaacatctttcagttggagggagactggttttaatcaattccgttttaagtggcatagccatgttcctgttatcctttttcgagattcctaaaggtattctcaagaaattggactattatagatccagatttttctggcaatttgacgaacataagaaaaaatataggttggctaagtggaacatattatgcaaacctaaagagtgtggaggcttggggatacaaaatttggaattacaaaacaaatgtcttcttagtaaatggctttataggcttctaaatgaggatggggtttggcagaaacttttgagaaggaaatacttggcaaaaaaacattcactcaagtgtagaagcaacctggggattcccaatttttgtcagggctcatggtgtctaagaacgcctttgtgtcatgtggatctttaaaggttcataatgggacccaagtgacattttgggaggatcgttggtgtggaaacaattccttggcaaatgattctcctaggttgtataacctggtgagaaataaaaatgcttctgtggcaacagtcctggggaaaataccacttaatgtatcttttagaagggctatttgggggataacttaaaagcttgtttggaggtagtagcaagagtaataccggttaatctcacagaacaaaatgattcttttgtttgggaagtgcataaaaaaggtttttttctctgttagctcgatgtacaaggctattatatatcgtgacattgtgccaaggaaagaggcgttttggaagttaagagtaccgttgaagatcaaaatctttctatggtacctaagaaagggggtcattctaaccaaggataatttggctaagagaggatgggttggtaacactacgtgttgcttttgtaattctagtgaaacaatacaacatcttttctttgattgtcccctagctagatttgtgtggaatgcgttgtttataacttttggaatccagccgcctactaatgtcgctagttgttgggtaattggccttatggtgttcatcctaggcttagagctcactttccttttggtgttgcggctttatgttgggcaatgtggctttgcagaaatgatgtggtcttcaatggatccaaagctaactcttttgtgcaggtaattttcagggggactttctgggcgttggaatggtccttgcttcttaaagaggaagagggccaacatgtgaaagatgggtgcaaaaagctggaaacgacaatgttggacttcttttcaaagtttggttggaaccaaaggagaagattggaagcttgaggcattgctttgatctatttcgttccccgtgtttttgtcttgttgtttttgctctgagcaagttgaatttgggttgtttggaaatttggagtctaagtactcttttatttgaaccgttggtttttctctcgccgtgtgtaaggagatgaatgttgagtctaagaactcttgtaagtttggttggctgtgtacatccgtttggatgtagagcccggtttaatccattatctaaaaaaaattataaatttcaaaattgtgtttatttgattttttttaaaaaaatcatctaatatattttttctacgtaatgtttagtagtttttgaagcctatcgatattctagatcgataataataataaaaaataacatacgagatataaaagtgaatgagtaaggggataagagtttagataggttcaggccttctcgatgatatgtaattctctacttatttgagggatcgtatccgtcggatgttgtattgatataacaatcgagttgtgctttggatggtttcttgcccaccttatacaagttgtgggggcatgattacacagaggaaaacctagctatgcatgatatcagttttctaatccattacatgatagaatcaaaccaaaactatgggctatgccgtaggatacaaggtaacattatgcccaagtcctagtttattacataattacgtatctaggccacctccgatctctaattggatatgcaggccgagtgggtatggggtactcatgatttctaatcaactcgagaaataaatcgctgcaaaaacgataaacatacctttgctctcaacgatgaagccaccgacgcaaagatgagccacaaccaacgctcccaagcactgccgccgaaggttttggctctcccaagcaccaccgctgccctccctccttcggctagatctaggagggaaagggtgggagggaggagagggccacccatcttccgccgtcgtcatatccttccccctcctgtcggatctgggagggagagagataggaggggagaagctagcggtcgtggaggggaggtgcagtcagggaggagctgacctgccgcctcccctcctcatcgctaccgccgacaccctcccccaccgctgggctcgtgtgctctgagaggagagggagacgggtgctctgaggagaggggtggggggggggagggagaggataagtattggagttgttgtggtagaattatacggggaagaatagacttggggacttagatttttttagtgagttgtttggctctttttcaggcagcgcttctagtggttcgcccgcgaaaatccaatttttgcaagtggacgacttaagagatatatccacttgcaaaaataagaacattatcgcaggtgatcgttttaagtcatccatctgtgaaaattgatcttcgcaggcggcctaaccgttaatcctccatccaacggctgcaagaggggggcggatgctgtaatcttgccacgtggaggggctatttgcatggaaatccacccaaatttcgatatttagagattgcacggagtacctatcgctgtcagattcattgatgcaactcgatacgcatgttcattttttgtgttcaaagatgaacggattaatcacttctgtagcttctgtgttgatgtgctaggactaattatgtggagatgatagggctgtaataattctgttttagtagtgatttagttggattgagaaattatgctatatatcacgaaggttcatttttcggctggtcagtttcttgttaattgcgagtataaacttccttttcagattgacctactcccactacgccagatcctcacacctttgacgacatatctgtgacgggcataagtgctggtcagtgatgaaggtcacctttgatgggtcctaccggatgccgtcatctggcccgtcacaggtgactagttacctatgacggatcacaaccggatggcccgtcagaggtgaggtttactcacctcaaacgggtttaagccctaacccgtttgaggtgagttgtgccactatatatacccgaagccaagccggatctgatatttcttctcccaggagataaggccggcttctccacttctctcgattcttctccacttctccattctctcttcctctctttctctccactaacatctctcgatactcctctccactaacttcactacagctgccggggaaggaggggaggcgcgacggcccggtggcatgctggtccggcaagggcggcggcggcctcgcctccttccgatacggcaggggcgggaggggaggcgtggcggtccaatggcggcgaggcgagtagagggcaggagggtagtccnccgcctccaaccgcgggccagccgccgcttttgccactgcccgcgggtcggccgccgcctacgcctccatctctgcccgcacctccgcctacaactccacgggcccaagcaagccgaaggcttctccaccacgagccgttcttctcgagggccggccttcgccatatccgttctggagcttgcaggcgccgttcggatctagagctcgtgggcggatccgagccccaaccgctggatctggcggtgatgaattccagatccactcgagctccgccgccagatcccttccccttcagatccattgcctcccgatggagtttatcctttctgttctctgcctagatgaatatgattgtgattatttttgtgattttttttgtgcccaaatgattgaaaatgtgaagtgattttgttctttggccacataaatgtgattgtgatgatttttgtgattctattttgtgtccaaatgattgtgaatgtgattatttttgtgatttgtgaatgcctaatgaaggcttgcgtctagctatgcttataatattttatttttttgacgcatttttttaggtttgtgacggatctcaattgagacccctcatagataaggatcaccatcaacgagttaatatttttacccgtcacaggtgaaggttaaatgtgacggattttacttgctgtccttcaaaggtatcttttaccattgacgggttaccccgtcacagatgactcaatatcatcagtgaccactgatatgtgaccagcgcttaatccgtcacaggtaagggtatgagcccatcagaggtgacctgattgagcgtagtgtctgataacacactagtaaatactagtacattgttatcaagtttgtgatcaaaacagatcaggttaaatgatgctctgcgtctgagtttgtgagttttgcatgatatcgcccaaggatctgaattctgaagggtgaaccgatctttactaatctcatcgcatctcatctcaataattaaattaaatgaacgataaatgtttattctttctcttattaagccacgtatatgctagatagattaggtgaaccgttagatttattgcctcatcagatggcaaatgctttggctgatcagccatttaagcaaaataagctaacttgcattgaagtttggctgaattggagatagctgtggctaatcagccaaagtatttggccaaccgatgaggctgttaataagaacggttggatatatgcagagaaaaatgcatattggaagattcaggagacttccttgagagaaggtctgggactgtgagtaaaaaaatatcatgagtaactttgatcagattaaaaggaaatggccagaagatgacccttaaacagtctcgatgttcatgaaagcgagaaaaagaaaaatggagcagatgtaaaaagagtaacattggcatagataccctaggtaaattagaataatccaaacaattctaataaataccatcattctcaaatggttcagaaatttacttttttaaaaaataggatgttcaaaacttaccacaaaagaaaatcaagcatgtttataaaatttgatcccaagtgagttagatttaaaacaaatcccactaacacaataaattctacatttttttctttaacatgctaatataagatttacaataaatttcacacgctaggcataattatggtcaattatttgttatcacagtaatattttccaatatatagctaaaaagattgtaactaaacttctggtcaaaattcgttcaacaaattgcttttagaatatttgtatactttacatatcataacatttaatagggagggatgtcattgtcgcgcgaaagcgcgaatctactggctagtattttgtgaagggagtaattccttctgtgattcacagtaaaattgtggagaaatattctttcccgtgcaatcacatatttcatctacatgtttgtttcatactttcagttaggatgcaacaagaattacatggctatgtggccaaatgcatgaatcatgaatccaattcacatctcattgtacagttgtcatgatcaactctaggactacatatcttatgaacaacacatcttagatcatacatagtaaccaagcttataaaatgcatgggtacatagatacatgcgtgtaggatatgtaacacactagttatgatatttagtaatttttattatatgttaatatttatatgatagctagttagtaatttttattatatgttaatatttatatgatgttagaggaaactgaacatgaactcctagaggatggttgattaactttacttgtatcaactcgaattattgagagcttacccaaattcatccatgcaaactagatacgttaggataggaggaggttttatattcatattgcggattagataaataatttatgaaataagattactcaaagttatacattaaggggtatttactagtagaagcatatgaaagagaattaaaaaaagaagcatatgaaagagaataaaaaaaaggagggtgtgatctgctttatatcagagtagtgcatgttgcatggagaagtcaaagtgagagggctttgcgctcgagcataacccaccgcgtatagctgcccgccgttggtcaccgatagaccagaaccagagggtggtggtgtcgttgccatcaacgtcgccggcaagtaaatcgatcgcgcggtcgatctaataattagttgctttctggtgggctccagtcaacggagttatataaaaattggtaaccgacgcggaacagttttctgttgagataacaaggtataaatattttcaagaaccgtcacttttaacgttgtagagatcccatcgcgtcaaaaaaaatgcaaaacagtacccgattttaccgttaattttgccgattattttgtgtgggctctggaggatttttttttttctttttgttacccaatccccaatggattaatccgatccaagcaaatatttagatctcgaatttgctatatatctatcgtgcgatttaaacaagggtataaatatttctagaactgtcacgtaagacgagggaacgtcttctcgtccctgaacgaaataacttaacaaatcaacccttattttcttattttccttcaaataggaaaatccggcgccccatcccctagcatgcatgtcactttccgatgtgcatacaacctcccccatcattttctctctcttactttatactcaattagcaagttataaactactttttgtcataaattatatgtctaattcgtaatctgattgcactattgaattcgtaacaattaaatctttacgaagagatctcacaagactatatttttttaaaaaaaataatgtattataactgaaacatttttatattatgtatgaaacattaagttataaccacttaaacattaagctataaccactgaaacatcacaaaataatcgatgaaacaacctagaacaccatatgcaacattccaaatgacctagtgaaacatcagttgaacatcataaatatacatgtcgaataacatcacgtgcaacaatccctagtacaacatcacaaaagacctactgaaacatcacaaattaagtacatggtaaaacatcaaaataataccatgtgcaacatttcaaaatgacctagtgaaacattagccgaaacatcacaaaatacctctaaaaaaacactcaacatttcaaaatgacctagtgtaacatcattaaatacctattgcaacaaaaaaaaactttctaaaaaagttaccaaaatatagtcaagtgacgccttgttacgatgatttaattgcgatacaatggcatattcagattacgaattagataaataattcaagtgggatcttgtttgaagttttacattaagagtataagcatgtactagtagaagcatatgagatagaataaagaatgagagtatgagctcctttatgtcagagcagcgcatgttgcatggagaagtttggccctgtatatatcacaccctaaaatttttcaccctgtcacatcacatcgaacatttgaacacctgcataaagtattaaatttatgctaaaaaaataactaattgcacagattgcaaataatttgtgagacgaatattttaagcctaattgctccatgatttgacaatgtggtgctacagcaaagatttgctaatgacggattaattaggcttaataaatttgttttgcggtttactaacggattctataattatattacacgcaaaaactttacattcctggatctaaacacccccttatgtgacggatactgtgattattcttagtagtaggataaaaaaaacagacattagacagtttgaagagaggcgtgtgaacatcttttttttccgtttgatcgggcgccctgataaaagcattttcgaatatataaaggtaaaaaaatactactttatccttaaggttagttttcatgcatactgaggttgcccttatatcaaggccgataacataattttcaaattttcatattaaatatatgtgcggcatatggtctcctcgtctttgatttttctcgtgtcgtgtcatcatatataccactaccactagtccactacggaatcattccaaataaaaagaaaaatgcaagtttcttttactatttaggagtaggacagaaaatgctacaatcactttgtctgtcgcatccggcatccctcgtcaccaacaataggttgatgttgtctgagtcatttcaggtctcctttgtttgtcgtgtcctcagacacgctgaggtggacatgctcagtggagtacatggatgataaaatgcttaagtccacacaatcgttgtaaccaaaaaaaattcgtgtaatctcttgagcaaaaaacaactaaagcatggagtggtatactcatcgatgataagtgcctttttcttggatatttatatagtcacaccaatttcatatgtagaacttcaaaagactgataaacaagtacctcaaaagacggtggagggttttttttttctgctttgcgttgaactcggtaaggaggagaatttaatttgttataagcttattttccttcttacaagaataaattagtatgtgttttttcaaaagatatacaccattctaaatggattatttgtagattattcatgtcacgcttctaaacatatgatgttttttccaaaaaaaattttctacatcacctataaacataaggcaattgttctaatttatttgttaggttcataaatataaaatatttaaggaaaaagtatgaattaccccctaaactatcgtggtcggtcgaattaccccctaaactcgaaagccagacattctatgccctcaactcttcaacgcggacaaattaccccctgaacactgttttggatggttttgggatagactggctaacggggcattacaacatgaaaaaaagtattttagaaaataatgggcccacctgtcactctccataactcctctctctcttcaccttagtccccctccaattcgctccatctctctttatccctaacttaaaagagaagaaatggtgacggaaaaagctagggtgacgatgaagagtgggtccccctggggcactggtgactgagcgcggtcggcgatgaaggcgaaaacttagtcgcccagggcacccaatggtggagcatggtcggccagagactgtccttgacggggggcgctgtgggcatacccgccggggtgtggctgcgcgatggtggaggagaaagaccattcgccacattaccgggcgccgtggaagggggatgcggcggcgacggcaacataagggggaagccaccgcctcgcctgacgctttgtgcgctaacccctccgtcctacttgaggtgcgaccctgttggatcgacgaccgcagcgtcagatcgaggagaggc

SEQ ID NO: 14545 - DNA, 2363 bp, Oryza sativa
gcctccttttctcgggggcggattttgttttgtcgcgtatctctctccctctgctctgtgagtgcgtgcgtgggagataaaaagggtcgcgatgcggtttgatgggctttcttttcgtagatgggccaaacacatggtcccaagatggaccgggccgatttatgagcgcacaaaggaataagtccactttgactcccttaaaagtgacccgaatctaatccgtgactctcaaccgtaaaaccggataggacgactccccgaattattgaaaccagtacaatttgactccctcagcggttttggagtgtggttttgctgatgtggcgctgacgtggcgatattgacctagtctacgtctcacgtagcgcttacgtggcaatagaataaaaaaaatctatgggactcatatgatattcacacataaaaaatattatgggtcccactgattatgtgggacccacatgttatcctctatgttcctcttcctcctccctctctcccttctctctttctctctcttgggcaatctgtgggcaggggcggcgacgtcggcgggcgagggctggagcagcgtcgggctgcggctcatgctactaggtacgaaactggtcagattttagcgtcgcaacgaaccagcgttccaattagcaagggagtagctatatttatggcgccatatttttcataaaaaatagtcggcatgcatttacattgtaagtccctaaattacatatgtaattttagtgtatttacaatgtaagttctaaaattacatatgtaagttataaaattacatatgtagttttagtgtatttaccatgtgaattgcaaattacatatgtaagtagatataaatagaagagatgctagtgcaaattcaatgggaaactaatgtataacaggagcaacatgttcgtagtacagagagatcaaataactacagacttagcaaatcaaacgttcgttaagtcaatcattaacagtgcaacatgaatctacatgatatccaagggtcagattaaccgactgtgatcaagctaattttatgtcgccataaatatagcatgtccgaattagcaatcatttgatttgattggtcaggaggtgctactccatttttctacattaacatcgagacggtgatcatcaccaacatgaactactacccggttggctgttgccagctaccacttcgacctgagcggcacggcgttcggcgccatggccaagccggggctcaacgacaagctccgccactccggcattatcgacatccactttaggcgtgtgccgtgcaactacccggggctcaagataaactttcacatttaggaggggtccaacccggtgtacttcgccgtgctcgtcaagtacgaggacctcgacggcgacgtcgtgcaggtcgacctcatggagtccaaatcggcgtacgggggcgccatcggagtgtggacaccgatgagggagtcatggggctccgcattggcagtgacatcggcaagaccctttgtcaccaacaacgtcatcccagccatctggtctcgaatcgcgccatcactgcctccgtcaccccttccgggccgacctcgttccgcgctcgcccactgccgcgcctctcccgcctcggtctctccctctgcccgcgcctccccgacgccaccctcgccgcgctcaccgccgcaccgtccatctcgcagtcgacatctcctgctctcggggattcctgctgctgcgcttgtcgttgcatgcccgaatctgaatgatctcgacttctccaatgaccactatggctcgacctcaggaatgcggcggcggcggaggtggccaaggtgcgtcgcctgcagagggagagaccgaggatgacatgtgggcccccacatgtcagtaggacccacaatatttttttcgtgaataatagatgggtcatacagatttttttttttaattctaatgcaacgtaagcgccacatgggacctggactaggtcaacgtcgccacgtcagcgccacatcagcaaaatcaccctccaaaaccgctgagggagtcaaattgcactggtttcaatagttcggggagtcgtcctatccggttttacggttaagggtcaaggattaaattcggatcacttttaagggagtcaatgtggacttgttccgctcacaaaatgctaaaaaattcacaaatatttatcccttcaaaaaccaaattggctgtgttcggctgggctagctgctgctacaattgttgtgacttgctggagcctgctaatggcctaagacccgctccattcccaatccacaccacaacagtcagatcaaatagttcaaaccaacccaacccgcaaatctcctttcagaacccaa

SEQ ID NO: 14546 - DNA, 10948 bp, Oryza sativa
cagcttgttaatcgaccaggaacatgcaccgtctgtcgccgtacttccgggcgaggcctgcgcgcggcggcatgaacgctcgtaagcgtgaagcgtgggtgtacgtcgccaccgtcgccgccaccaaagctgctggagtgggtcgtccacgactatgagacctgatctagtctgtttagttgaaaccattcacaatccatgggttcaatctatggactgaatccatgttgtactcagaaaatcgtaaccatcaccaaaccaccccaaacctcttttctggtggatccaaaccaatcttcagtccaaccaaagcacacccagatacaaaaccaatccattcaacccattacttgctgcagttggctgccggtttgaacagccgcagccgcagctagtgcctccgaacaagtccattataagcaaaattaatttttcacattttcatgcaactttcctcgaatctctgccatgatttgcatgattttcacgtcgactagaaaaacaaaataatgagcccatacactcaagggttcacctttctgattgagcgtaggatctttgatccaagcgatatgataattttcgtcaaacttcaagaaacttctactctctccgtccgtgaatataagagattttgatattttgtttgcaccgtttgaccattcatcttttttttggaggttattcaaaaatttttgaaattattatttattttatttgtaacttactttattatccaaagtaatttaagcataatttttcattttttatatttatacaaatttttttaataagacaagtggtcaaacgttatattagaatagtgaatatcccttatactcacggatggagggagtatataatctatgtcgaatttgttatttcaaaattatattctcgaaaaccattcgaaatttccctccgaatcttctcccgttccaggtcgaaacctctaaattcgatccaattttgttaaaattttcacggtttcgaatcggttctcgcccaaacaaaaaccttcacatccacatccgcatccactcccagcctggccgaggaggcactgcgcggtgggccccacatggcagcgacgcccccctgaccccactccggaagacacgcgtccgctccacgagtcataggcgaggtctcctccctttttccgccgcgcgtcggccttttcctccttcctaacctagggctccgatttcgccaggtgttgcccatcgtgaccgtgccaccgccgccgacgtcgccaccgacaccgccgccgccaccgccaccggcacctggcggtaagcgagcggcgccaccctaaccctgaccccgtcgtccgtccggggtcgtcgggttcgttgttgattctattttatttatttttttatctcttctcttgcagttgtgtggggttttgggggggttttggcgatggagatggtgatcggtgcggttttgctttcctcgtgggggagggtttttttctttttttttattctgtggtttgcgatggattggtggtgatgttgatgttggaaggacgattttttgctcgttgatcgcgattccccgcgcactttgtgtttggatcaaacagaggcgggtctttgccctcgtactgttcgttcaccattcgctcgatcgacagaagaagaaaaaaagaagtgcagaaagcgatggatggaggaggggacaaggcagagacagagatagttctcatgtttcacttttaaaaaaaaagtattttcttttcctctagtggtgggaatccaattaatttcaatttcgatcgaaagtacacaaggatgatatgatcggtctttgtcaatcactaatcctgaacttagtcgtaaaagtatctgtttcgagaaatagaaaaaaaaagggactttctttcgtttgttcgttcaaaaataagatttcctttttcctggattaccgttcgtaaattcacatcgcttttgctttattcgaacaccaaactttcttaggttgaacagttattccatcaccttctctgcatatattgtagtgttaagaactcaagaggcatatgtgcaggttattaaatatgcctgttgaattacaattgcacagaacaaagcatatctgataaatctgttaaccagaatgagactatgagtgattttgtcacgtaggctaatgcaaaggtcatggattgtgcatggttctcatagtagctagtcaatccactagtttgttggaccagataatttatttatatcatgatgtggtgccctgtgcccacaccacatggctacatgtgattctgcacttcttcatgctccacaatgctgtatgagcacctgaatagctctgctctgcgccgctgcacgccatctgggaggcctacttttcatgcttttcactccgcaaaaactggcagatatgagtgatatgctgaattggtcttgggctgtacactttctctgacagtacaggtagagtttcatttgtttgtggattgcttgatgataaccaatggagggctcctgttgatccatggcagctgctatctttctttcattgatttctgccggataggactgagccttttctctgtgtgcattactgtagtattagtgtggcatagactgttattttacttatttggaaaaaaatggaggatggaacaatgaaatatattcagaaatatcactatttttgtataccgtacatttaatgctgtagcatcgttctgccttcatattatatatcgtagtttttgctcatttggtttcttgacttcatttatcactatatatcgaattatcactatcctgttgctctcgtagctggaagttgtaagcttggagtagttttatatagtaattcatgcaatacattgttggttagtctgtttacacattttccctcaatttctggaggtgcaacatttttcattctggatttgtgaagaaactggactttagtcgttttcactcacctgttatcatccttactgtattgtagttctaatgtttaaatttggacattgctgtattgttgaactgactagtttgttttccttctgtaaatgacagatcctacagcagttgcataggagtacatctttagaaatggacccacattcacacaagaaggcacatgaaggtctgattggtgacaaccctgacgcgtatgccgtgacgacataccaacctgtgctgatggtagaaccatcagccgctgctgccttccctccagctccccaggttgctccagcctatccagtgaacccaatgcagcttccagagcatcagcagcacgcaatccagcaagttcagcagctccagcagcagcagaaggagcagctccaggcgttctgggccgaccagatggccgaggttgaacagatgactgagttcaagctccccaacctcccgcttgcaaggatcaagaagatcatgaaggccgatgaggacgtcaagatgatcgcgggcgaggcaccggcgctcttcgccaaggcctgcgagatgttcatcctggacatgacgctgcggtcctggcagcacaccgaggagggcaggaggagacgctgcagaggagcgacgtcgagccggtgatcaagaagaccgacatcttcgatttcttggtggatatcatcactgatgataagatgaaggatgatggcatgggctctcaggctgcatccatggtttcgccatatacctcaggaggaatgggattttcctttgatctgtacccgaaccagcatcacctcgcatatatgtggcctccacaagagcagcaggagcagtggcctccacaggagcagcaggagcagaagcagaagcaggattctgatggtggtggacaagatgaatgagataaatcacattctgtgattacttattgtcgtagtgtggtttggttagcttgagtttggttggaaaaactttttttttccgtagactgtttttatgtttgttttgctgccttctggtagcgataggagggcgatccggtctgaaactgttggtagcattcatgatgaatttctcagtggttataatttatgaatcttagtaacagctgttgcaagaacaaatatttcctctggttagaattgttttttaatttccttttcttctttggtccggattaactgtatcgacgaaccattgaattatcatcggcgatatcttcctaataacgctggtttcgtttaattccgattaatggtttaggaaaaacaacagaaaagattaatggtttaagaaaaacaacaaaaacaatagtgctgaccaggttcaaaaacggggacagcattcgttttcgatttatcaagacagcgtttgctttgctttaaaaatgttggtttgcatacataggattcaacacaatatcaaaataaccaaagcatcaaggtcaatcggcaccatatcagaagcattctactatttgaaacccaacagtttacaagttcatactgataggttaagctgacagaggacatggattctacagcatcatttcagtatgaacttgaaataagcatttgaattatgcagtccttttctcttctcctttactggttaggctgacagaggacatggcatctacagcatcatttcatactgacaggggaaaaaaatgatgaatgaaccttactctagaactgatcatttacaagttcatctaggcctacacacagcagaatgtcacacctgctcactctcttgtcacacctgctcactctctgaatcagaaaccaaagaacaaaaaatgttcatatatagtatatctggcctacattgagaagactttcatggggaacattgaatatcacactgttctccctgcagatcttcctgaggaatgcaaacacataattcacagcaaccttcttgatgatccctgaatcagggcgcgcgtgaaccacagtgttccccaagatgtgcacgacaccagcgtccttgcaccggttcaggaactccaggttcaagaactccagttcatcgccgaacgtctggctcgagtaccttgtcaggctgttccctcttatgggtgacttggctggaacaatggagtcctgtgatgagtagctcaggtcaccagtggagcacattgtgttgctcccagcctttccagttagcagcagcgcattgcttgatccctgggtcttctcctccatcatggtgaagtcttcggagtccgaatagtcatccatcatgctctccagcctgacgaagagcaagagcctgtcaaggagcatcttctcgaagtcgtcatctctcttgtggatgtccttgtacccgtacctcgcgacacaacggaacatgtggaagttctttggcccgatcctcttcacgatgaacctttcttcggttgggactgtatatactgggaggtacttgacacaaacgaagacgacgaccgagtggatggcagggaggttggtgatgaaatgggagaagatatgaggcactccacttgccagctcggtgtacacgaagcctatcccaggcaccctgacgaggccgaggcttggtccgagtcctaaaatccaggccatggaaaccttgctgtgcatctcaaattcataccgcttcacggtgcagaaatgccacacatacatgatgatgaagcaggtagttgcaacaacaagtggaacccaaccaccttggtcaaccttgttaatgcaggctgtgaagtatgggagctccaccatcaacgagagcacgataaaaatgacaacaaggatccagtggcttttccatactaacagcattattgggaccatgagaaatgtcgtgaccagcataactatcaccactgcagttcctgttcaacgacatcataagaaaacaattagggtgacatctatggaatgcaaaatgcaacattaatgttcggtttgcagttatattttgagaacatcagttgtcaatttgcagtgtcctaaaaaaattgcatcgcgctgttttgataatgttctctatcagataatgctgacccactttacttcttatagaaagataagctcatttaaaacctgaagcatcatgcagtgtggtaagaaagtttatttaggatttaattattatccagctatcagttctcaattatattgcttcttttgtaccatagcaccagtcttttagaacctagacttggtagctgacaacacaccgcgcacatatcgtgacataaagctagaaaatacttatggaacaatgccaattttgttcggcttaaaatgaaaactatctgaagctatcccctattcagcagcagcgtaaaaaactgttgattgtctactttaagtgcattgaaagtatcagttacatgtttggagatggaaaagaaaagcttaccatatgcatttcctatctgactttggtttttgaatccagctgttactgcaatgcaaagaatcataagtacccagttgatgtcagggatgtaaatctgcccgagaaatttctttgaggtgtggacgacactgactcgaggaaaacagcccagtgcgagagcttgctttattatcgagtatgtagcagatatagtggcttgacttgcaactattgctgcaagagttgcaatgatgaatactggccagtatatggtatctgcagcaatcaggcatcacaccatgagtacataaatacatatagtgcatacagcactggtaaacaataagaatggtgggatatgcactttgccaagttgcacatgggatgcatttgcattttactttatgacagccaaatttgttagttcagaggggcagggacctggaatggagcgataaaaggcatcaactacatggtccttgttgctaataatgtacgcagcctgtccggtgtatgctaggagaaggcaagggaacaccactaacgtgaaagcaatctgcacagacattattagtttaccgacacaatttatcatgactgatttgtttgaagtgtttatacctgaatggccaagacagggaaatgacataagtcagcatataatgcttcagtccctgaagagagaaaatatataagtaattctgctgtatcttgtgatttatgaataatgcaattaatcaatgaaaggtacatgagaattgtgagtaacctgtgatgctaagcatgattcctccaagggaggtccagctctcagacttccctcgtcggaaataccgatagatatagactggattatatgcttttaggactgaactgttgtacttgtgtatgttcagtgccccaatagtcccaattaggataaaccaaaggagcactataggtgcaaagagccatccaactttatctgtaccatagtgttgcatgctgaataagccaattagtatgatcacagcaacgactacaaccacatctgccaggtattgaagcaataaacatcaaatgattttacaacaatgggagataacactacatagggaagaaagcttctcagtaaatcaaaggaagtgaacaatgcaacatagtggcccaagatcacaatatttgcgcacacaatatttaagataccgttgctggtttctttcattcactttggttaagttcacatccctgtatactagttacactatgttaagttcagttaagaattgaccagatttggccgtgtacatccttttgggtgtagaggccagattttaatccattttttttaaaaaaagagataattgaccagatttgacaacaccaatataaaaatacaaagagcagaattacctgtactcatcttctgattctgaactcttattccacctgatgcagagagaactgcagagcaaacaagtgtcacaatccaagttccaatcggttttaccaatgaaactactatgctgaatacctgatatagcaggagtaaggatcccatctccaatggctgtgcaggtaccaatgagaactagaataagaagacagttctttttatacacatgtccctctagccatctctttatttttgctgcaagtgaattctcttcataagtttgccgactatatgttgttaattcttcatctgtcttatgttggttgggaatagtgctgacctttgcatgccggcaaagtaaagaatagagagcgaatgtgccacctgtgaaaaaagtctaaaatttattatctaaaaaaatgtgcaaaatgcaaacaaactactcctatgtcaatttattgccaagtgactgtcagtaactgttctctgagcacaaaacggaatgaactcaggacatcaccttctacagatttcatgactagttcagtgctatctaccaatcattctggcatcactacgacaatgttctgttatttatgtgccaacctatcgaaatggtaaaattgcataatatttctatattctcatctcataccaaaatcttgttatatttgactaacatgagatatttcctaactgcatttttctattttttttcagatgataagtaaataaagaagcagcatatttggttaaacattggcagaatgtgatatctcaccttggccattatcatttgcccgcaagacaacaaaaacatacttcatcagaggaatgagggtgagggtgtaaatgatcaaggaaagagccccaataacatcctcatcatcatcgaccccatgagggaatatattgtagaagacatataatggagatgtacctaagtcaccgaagacaacaccaaggctctgaaacgcgagccgtaataacaaaatcgacgagaacttctgcatgaacaaaaacaaagcacattttagctccccatgagctaagaatatgatatttacgcattgccaaaatgacatagggagtacattatctttccacaccaacatcacttatgctgccagtgcctaacaatttgaggtgaaacgaataaagatactataaaatccgtatacagttcctgcatttggaaacctacagtaacagcacatccatcatacagtttcaaatcctttttatattgaaatggtccccaaaaccatgaggtcatacagaatcatccatgtcaaagaaacaatgtttttttttcttgttccaaatacaagcagacactaagctggaagcacgattgttacccagaaaaatatctagaaaaaaaatatccccatgagcaaggatcaatctctgaccttctctgtgtacatgttcttgagccggctagcctcctcatccatgggctgatcaaggttctgatccaaatcccatatgctcccatggttcgtcgtctcgctatccgaaatagacgccatgggtgggtctccttcaacctcgaatcctcacacgagggaactctccaagtggctgaaagcgacctttgctcgaaccagaaatggaagcttccagcttcccaaatggaactccagagcttctccaccgaagcaaagatcaaccacaactcgtagaactctctctcaccggaaaattccaacccgaatcctcaaatccaccaccaaaacctcttgtcactttggtctacgcaaaggctaatcttcgaagagataatccaagaacatgagcttgcataatccaaatcagaatgccacttcgaatcttgacacttaaactctttccaagatcgaactccctccctctttgatccccacaagaaccaaaaacgggagctttggtacaggagcgaagaaccaataatcacagctaaagaaaaataatctccaaatcagagcccagaaaatcggatttgggactgattgggcgagctacccggaaatatcaaccaagaaaacctcctctagaaccaagaaaaccaaccaaaatctcaatctttcctccccaaagcctccccaagatcaagctttgatgccacagtcgccaccaacagcacagccgccgaggtgggccgccgtccaattggcaaaagcgcagaaatcttgacagaagagagtgggaggatggggaaaaaaatgagaaatgatttatggtgcggagagagagagagagagagagagagagaggggggaagagaaggcaatatgcagagtcataaaagaagttgcaggaagagcatatgcctggactggatggtagtaggtggaggagcacacaaattggaattggaattgaaattaggccatctgaattgaaaattcaaacaaaaaaaagagtacctttttccaaccgaatttcttctgaaatcaaaagcggcagtcaagttttggtgctatggaaatgagaagtaaacgtttctctttggattcttgcccatgagtgtgtactgtctttcctcagctggcaagtccctggtcctgccactgctactattgtactagtaggagtaatcattttattatgttggtgattgtactgttgctaaatttgtttattccttcatctcagaagaaaaatgcctttgtttattgatgagatctagattttgttcttgactttgtttaagttattctgtttgttccccacagaactatctaggagtagtccctaacagtagtactaaggtttagagcagcatatgtgctatattatggccctgtttagttctaaagttttttttccaaacttccaactttccatcatatcaaatctttcatacacacacaacttttctatcacatcgtaccaatttcaaccaaacttccaaacttcagtgtgaactaaacacaaccaatatcatttccttacagataaaaatgttcagtaaaaattagatacgagatcatatcggtaataaaaggacaataggagtaagaatttatacattagagattttatctcaaatcatattggataattaaaactagatgctggaggccaagagttgattttccccattattaggctataatctttaactcaagattcctaacctctactcccttgttaccaatgcacacgttatagaaaagttattgtaaaagatcatattaatctatttttaaaatttttctaatctaatacttaattaatcatgtatgaatccgttgctccgttttacgtg

SEQ ID NO: 14547 - DNA, 10680 bp, Oryza sativa
aattatctcgttgcaaatattgactagatacaaaccaatacgcaagcatgcaacctatgcaaaaccgtcttcttggcacaaatggtaagccgattttgtctttgggtgcatacaagaaaaagtaaagtacaaaacagaaatgaagcattcatttgctcaactacaaaattcaagccagggggtacacaacctcaagacacgtacggttgagaacttgagacaaaggcagaacaaccacctcattggcatcatcgatgatcgatcgatagcgtgcgacacaaactcatgaaatgcagaaatgtgtgtgttgtattgttagaaaatgacatctccaccatcgattttaatttattagaaagatatacacgccatatactcttattaagtggttttacgagtgccgatattaactacaacagtatatatatagatcacaagactcatgaaaagcatcataaaatagggttaatatgtttttctgaaattaacacttatatatagcaattgataactcgggcatccgttgttatatcggagttttccttaatttacatgagaattaaaccgcttctaatttattaatattaattataaagatgcatataaataatttgttaatcgcgaatttgaagatgattctggcgttgttcgcggcgcctgtgtaccacgcagccgtcgtgtcacagccagctgcttctttacgcaaatgtgacagccgcagcagctgcctagtgcagccaaacggccaaacacatgccgtatgtgcaattttattttacttgatcaatcagaggcatgcaaagcatgtgtggtatatatatttgagtaaattaaccagctaacaaagaaattttcttaccgtatagtcattatcctcctctgatatattgttaactctagctataggtttctaggcttctagctaaacttgtcatattctttgtttcttgctagtaatggatatgctatttagatcctgtccacaatgcttgctgctgacttgttgagagttgattatggaactatatatatataatcttataccacactacattactactaacatttagtaacatatttaactgagtgacaacttttgatgatagtcaaatcgcattagaagaagaaagagatgccataaattaattgccactactgtagacaaggtacagcgtctctatccaagctgccaattaattttaagagaaaaccgaacgcatgcaggtgtgtgatcacgttttactcgatcggatttataattttctattctattactttaaccctctacatatggattggttaaccaaccgaagatctcgattaattaatagcatccataaagacaaaatctaaatagtatacataagcactatttaatcttaacgggtgcacactttgctacgtaagaaagtgccacttattatacaagtacatcaagataaatactctctccgaccgtttaacgagtgcacattgttctaatttatgatccgattacaccattatattcgttgtaataaaacatttataataagatctcacataattatgttctaatgagaaaatatatatgctataaattatttttatcatatatataaattactcttagatttgattaaattacttctgagatagttatgaaagtaacttcaataaaacctaaaagtaatctacataaatcataaaagtaactcaatacataataaaagtaagctgtcacgtcactaaaagtaaatccattgtggaggaaaaacacaagtctatcaaaaaactaaatttaatcatcatagattatagagctaactaaaacaacaataaaagtaaaaactcacaatattatgaatatctaaggagtaatttaattaaatctaaaagtaatttatatatatgataaaagtaatatatatatatatatatatatatataatatgtaatttattataaatacttaattacaataaataaaatggtataatcgggttgtagatccgataaataatttaaattaaaattgtatatgaagcttatagttattaggaatcttttctagtctttactattatatggatactttcacataggaaagtgatgcatgttatattttggtaactaattaagactaactagtgtacatgcacttcttagtggcgtccatctataaagctgtatggaaaggaggataaaattggagatgaaaaaagggggcaaatagtacttaaactgaaaggtattgtcttttttttcccctaaaaatactatttttagcttcactattcagtatcatagctaggaagatagtctttttaagaatgaagataatacaagctagacagcgaaatgtaaaaaaataagttccaacctaattcggcaacatatggacttagaatatatatatatatatatatatatatatatatatatatatatatataacgagtttaatgctctaagcatgatgctaattaaggtagcaacttagttcaatccgatccgggtaactttacattcaataaatgtgtagtgtgtagatatttatcttgctccccaacatataatctttattattgtgttgttacttttgtatggatatattagttgtttaataacacattgatgtttgaatcctattgtatctgtcactgctgatgtgcgtgtttcggataaaatgtaatgccaagtcatcaacggcgacatgttgcggaaaaaggttaacttgtttgactaaactaagataaagtgagagctcatatgaagcactatagacaaaaaagaagtttcaacatcttgtggatatttgcatgattgagcgaaaaaaatttcttaaaaatcatggtgtagtcttgaggctgtatcttgggaagttcatgaagacatgcaaccagaagtaaaatcaggggggcaaggatatgtatataatattgcaacgagaaaaacaataatataaacatgattaattaaaaatgagaagttatgcaggggagtgcctatctcaccttaaggaagtggctcttcgaccatccaataaacctttttttttggttctcaaaaaaaaataaaacccttttttttttttttgctatgggtagaaatcaaatttgtgggggcgttttgagatttataatagcacagcttgcagataaactccaagaaacagcaagtccatgaagagttgttctgatgcatatctcatgaaatatatatagctacttctgcgtgcaatttattcacctattttttatttcaatcaattacaaccttcgttcatttaattttaccccgctagctactccctcattcccaaaataagtactctctccatttcaatttataagacgttttgactttggttaaagtcaaactacttcgagtttgactaagtttgtagaagaaaataataatattttcaacccaatataaatttattatgaaaatatattcaattactgatttaatgaaatgaatttggcattataaatattactatatttgtctataaacttagtcaaacttgaagtagtttgactttgacctcaaaacgtcttatgacctgaaacggagggaatatttctagaaactcaaattttgtatacatttataagcatttcttagacattaatttaaatgcatattcctaatttctatttcctcgttttctgtgcgcacgctcctcaaatcgctaaatggtacattttttaaaaaaaatacataggaaaggtgctttaaaaatcatattaatcttttttaagtttgtcaaggttacggataaggtataccctctatccttggatatacggtgggtaccgatacagtatacccgcgcgtgtacgaatagtttccgtatacattaaagaaatctatcccgtgatagaaacggaatctacggatggaaggactcctactcggacgagactgggtctttaccatatcgtgaggagtccgatatctccaagtcctacttggagatcaactgacccgcggtataaaagggaccccctgggtaggacctaagacatcgaatctcaccgccaacacacccactacagcctgcgaagtcggagcttacaggagccaagtcgccgggagatctagtcggaccaactcgactatggtctcgtcggtattatcgagttcttctattccctttgtaatatgtggtttccatcatataatcacatatcaactggattagggctattacctgttaaggggcctgaaccagtataatccttgtcttttgtctgtttgatgtcgtactacgtaaatcctcgtatcaacggaccccagtaccctctatatccggtctacgggtatccaccgtcgacaaagtttttatagctaataattaattaattatgcactaataatccatcccgttttgcatgcatgggagagaagttcgcaactttctctggtaaacaaacccttaaatcttttttagggaaattaagaagcctaattcttgtactatgtattagacaaaaaaaaactttattccactatctaattaagaagtcagcggtcttgtgcccatgtatagaataaatttcacaaaatatctatattttggccaattaattagaaaattacaaatttaagtcacaccataataaaactacaaaatcaacactaaatttatcataaacttcattttagttaatgaatgtatcctaaaactacttattttaagtttagcattcgaggataaatcttagaaaaaaataattatggcaatacattaccaatcttggttaactaggatgattaaccaaaataaatctaaaaaatattgttatgacattcgaatgcatgattaactgtagaaaaactgttgcataggcagttaatcaactagaattcttattattacgaccatcaatttgactagaactatgtaatagtccgtacataatcatggcagacacataaatatatccgtgaaagatttgttggtagacgaaacatcatcaatggaatacccttcaaattagcacaggtattgtgatataaagtttaaaatttgtagtttagcaataatctatagttttgcgatacactgcttcactatgttgttttgagatattttctatgtttaatctgttcttttttgcaatttagtgacttaaatttacagttttatgatcattgtcaaaaggccgtatttagttccccctctaatttttttttcgtatacggacacacatttcaagtattaagcgtagactaataacaaaataaattacagattccgcctgcaaactgcgagacgaatttattaagcctaattaatccgtcgttagcaaatgtgtttactgtaacatcacattgtcaaatcatagcgtaattaggctcaaaagattcgtctcgcaatttacatgcaaaatgtgcaattggttttttcatctatatttaatacttaatgcatgtgtctaaatatttaatgtgacggaatttttgaaagtttgaagggaactaaacacaaccaaaatctctatgcaattgctatcaagtagttgggaactaaacacaaccaaaatctctatgcaattgctatcaagtagttggggtgtaaaggacggtcctgtctctgaaaatttgcttcctgacaataagacagttgggccctccccccacccccacacatccccactaacatattcttatagtttgttatttcgtaaagaaaaattgatgatagacaaaccagtctttctctgccctcattgactgctaaaccaacaaggatgacaggatatggaagtactccctagcatcccagaaaattgtaaaccctagtatcccaagaaaattttaaagagagaaacaaaataccacaatacctttaattaatgtgaaagttgtgtattgatgggtagatgagaggtattgaagtaatgaagttcctcattttatgaattggtggtagataagaatatagaagttgatttattttggaacaaattttaaactctagaagttggtttattttggcacggagggagtaattttgtaagggatggtgaagagatagggtacacatgatttccttcagtcgggtgtactctatctgtctcagaatttgtacgtgaatttggatattacctatagcctatgtttagattcatatatgaagttgatttcttctgagacagatggagtatatcatatatagagtaataaaaaacaagaatttttaaaacatatacctgcacaataatattggacccggctaaccttgttgccttgttggtccatctctgcggtgtttcaattatcttcttggtctggaccaggatttggccagtatgacgatgatatttaaataaaagtttaatatatcctagatacggtagcgctaaatcatatacaacagcacgctacgatatatcacgcgccctagacaaaaaatatgtgtagccatcgtattataaaaattcgtactgcagtaagcaatgagattttcagaagactagcttggttaattgagaaatttatcaatcttttcaccaggtatctatattgtctacttatttatcattgagaccagatcgagggtggatatgccaccggtgcatcactactttgctcctatcataattcatgcatgcttcaaacattattgaaatgagatcatcaatagttttttttaagttaatgcttaactaatcatgtgctaatccataattttgttttgcgggttgaaggaagggttcctaagggtgtgttcgggaggaggacctctcctctccggcacatattagcgtatgattaattaataattagcttaaagactttaaaaacatattaaaatgattttaaaaataatttctatatatatttttttgtgaaaagtacatcgttttagcagtttaaaatacgtacacgtgaaaaacgagagagttgaagttgggaacacaacctccccccaaacggacccagggtacaattagtctggctattagggcctcgaatgcatggtacaattagtcgctctcccattgttttattttctttagcaaatatttgttgagccgtgttatatttatttatcactaccatttttttttaatttttccttttcattgtaactcaacaactttattttttgtcttgtatgggaggatcggatggccacattttttttaaaaaaaagaaagaaagaaagaaagagccaaagaggtgtgtaccatatgcaggatcaagtagtgcatattggtcattgtctataataagtacgcaattagagttgttgcttacatataataattaagaaacaaagcagttgttgcttacatacgattagtagatcactccatttgaattagagtatgtgcaatttggtatgcaagagtataccccacaacaatctttgactagctagctaatagtacaacacaaaacatcaatcgttgatcccggcatatgtaaaacaaaacgatgaacaggtgttgatcaattatgcaaaaatcatgattaatttgagcaacaatcctttctcaaaataagataaacaaatgtatgcttatgctacgaatctgtccggatatttttgaccgacaactgatgccacaagactccaaaatgtgtacaaaaataaaaagatatgatgtatagtataaatatatcaaatgaagcaagagtgagagctgggagaatgataatcagaattacacacccatatatgggtcccaatattcagatggccttttgttttccttgtctggacagtaggcaccagtttgctttgcagtagcatccttgtactgtatacctactatttccgttttaatgtaataagcttgtgcacaaatttttttaagatgttttatttttggtcttgaagactaattgatttttatttcggtgtagtgcatgggtggacgaggttgtccaatttgtcggtattcctctgcatattctttcggttacaaccttgactatctatttaacatgtgagaatggtgtgaagctatcatgcatcttccccagtccccacgtttaatttcttttttttttcttttgcgatagggctgattatcaagttaaggctcctctgaaatgcagacctgagaaaatagaaaaatcataggattttaatataaatattagtgcagaatagatgattaatttctaaaacagaagaaaaaatataaaatataggaataaccgtttgattagactataaaaaatgcatgaaattgagaattgataaatacttaaagcaaactttccatagggttggatctcatgttaaattttctccaaaacttacatggattgagacattccataggaattttatatgatttaatagtgtccaatcctttgtttcaaaggtccatatttcaggggaattattatgtttttcattcaaatcaaagtgggccttaacatcaacattctatttttgggctcatttggaacacactagacactacttttgtacggacctttttttttttaacagaagttcatcgagaattaatctgtttatacacgatcaggtcttagtattgtaacagagctctcttgtatttggtgcatgcatcaggttagtcacttgtcatttcctatggattctagtttattttcagttccgttcttatacataatcctcctatgtattcgtgagaaaagctatgtaacatagatgagaattgtcacacgaaattaccatcttggtgaattttgttatttgttctctggaggcaggttcctatgttcctgcttttcagtcccctgcttcccagaatttgctaaaatgctaaatgcatgagccatgaaactcgattcgcatttcgccagcacagttcttgtggtgaagtctgatcctacttaacacgcattcgaccatgctcattataaaattataaataagtaactcaagatttataggatgcaacaaagaaactactgtcgatatcaatggtaggtcttagctactctcattccaaaatgttggaggaacctgagcaaatattggatacaggtaaaagcgatcacttctttttcaacttgaaatgattaaaagaagtgtatgtcctgatacggattctacccattttaactctcctagtggtacggattctacccatttttactctcctagtggaaatcgtagtagaagtaatcgtaattgtttttaactctcctagtgggaatcatagtagaagtaatcgtaattgtttgtgttttcagataaacaatgtgttggtacaacaaaggattgttcttcaatatgctggtcctccaggactgctttaagagcataatgaactaaggttgtcatcgtgaggatattccttatttagtacagactgtctatattagtcctatcaatttaattaagagatgtttgaggaactgaataacacgtattacttaccataatatggtgataacaagatgaaggaagattttagagaaagtaggagcatatggtagataacgatctagagatcgatcaagcaaacttgccggtccaacagttttgaacggataagtgtaagtataacattaatattgaacactactctatatacacacacacagagactctatgacttctgggatgtttttttttctcttacgatgaagcatatgaaacatatttagaaaaggataaaaaaaatcatggatctactagatatattgaatgcttacgcattgttgcagttgctccgcgtaacaaaaaggcacacaattaccacatgttaaaatatattgaacacattcaaagaaatcctctgatggctttgatacaggaaacttgttttacaaaattgcaaaaatatatccttttaattggcggctatcaaatagatcagaaaatgttacgagatttagattaattgaatttagtataagttcaaggcatattagagctctaactaatattgctgtgattggtttaataggtgttttcttttacggttcatattctggattgggttcatctctatagtaattggagggaccagattgtacatatgaaaaaatatgaacttagcgggtccttaccccttttatcggattagagcggaaaggacccgcggaattcttactcttataaccctatgaatctttttttttgaccggacctatgaatcttttttcttcctattaacattgatttgggattggacggtttagaaaacaaactatgttttgatacaggaaatcttgtttttacagtagaacattgatttgggattggacggtttggaaaacaaactatgtacgcagcattttccagctatgtatagttgattaattgggtgaggtggttaaatccaccttcacaagttttactcaattgtataaattttctcggctattaccatcctcacaaacaattatcaattcaagtagcatccattttggaatggtgtgcacaaataatgtttagaatttttaatggcatatcaaaataatatgcagggccacaaattgtatacataaattaagttgctcttttgcagtttgttacatgttgggagcaccaaccgtagttcacggcatggttaccatgattaattccaggactattataaaaaaattctctaagatacaaagtggccagcaagctttataaaatgagaaattctcagatgatgtgaatgtaatctacaggtttgtatacaaaagttaaatggaacattttttgggttttggtatctc

SEQ ID NO: 14548 - DNA, 32553 bp, Oryza sativa
ccccacccccccccccccccgtgtctgcctactcatcctattcttcagtggatggtgaacgacctgctaacaatcaattttatgtctggttagttgctaaatgaatcaattttatttctggattttgtgatgcttgtggccttagcagcaccagttgaaggagatgcaatgcgggatgagttggtggtgatgatggggctggcgcgggagttgacggccatgcagcgagctcgagcaatgacttgatgacatcatcgttgcaatgcttaatagcgtagctcaatggcggccctcgctcgcctaatatcacgcccagaaattcacgagtaattttcgaactaatttgtacattaaatccttgtccaggaatcagcccaggtacacaaactgacaatttaatatacagattcatcaaaataactaaaacgataaatacttacataaaaggcacttagtcctcatcacgaagaaaactgcaacggaaaacaaaatctagcgaagcttcagctccactcccacaggcagctcaactgggatctaagccaaaggtcttctccttctggatcctttttcttcaactgagatttgatgattattgcaaggtgagtaaatgacatactccgcaagccacacagcaagtatgcaagtgcataggaataccaaaggatggcataatatagggttcatttgcgaaagcagcatttagcaaagatttaagagtagtaaaactgtagaataattaatcatcaatattaatcaatcactgaacagcacacccaatgctgcacaggcccaaccaaacctgaacaaccaactccggtcgtacagatcaaacctccaaaccaggaattagccattccaaaccaggagccaaattaactttcacattattatcattgatgagtagtgtgggactaatcacgaaaaatattgttagacccgcccataaccacgggcacggctattcgaatagttttactctggccagaggtgtaccactgtacccacaagacataacctcaacatcatgtctaccatgcgtcgccatactggaaagtacccgaatagaggctgtgacaatactccacacaacacaactcaccacagtgcaccgttcctgtatcataatcaccccctcaataaccagaggcatggactccccagcgacccccacggacttttcgccgcttctcagtctggcaccccgtaatgaaccatgctatacaaaaggtaaagccgttgcccatgctgacttatggttggcatggtaaatgtttcacaatagtagcttgcgaaccagtccttaattgccatgagcacgaccatcaaaaccatgtgctcacaacccaccattaagtaggttttaattatcaattaattatcttaacacgattaaccatcgtgagctaccattaaatataaccataaataaatatagtatgattcatcccattaatgatctaatgtttctaagcatggctaagcaattatatatatagcatttagctgaaccaaaccaatatataaggttctaactaataaaattattacccataggaaaaaaaagtcatcttcggccataattaaatgggaaaggctcaccacccggtgacattcgaaaataatgcataagttgagataaaacattagctttaaacgggttcaacatgttcaaagggttgtttgggatctgtgtgacttgccttgcaaacaagcgtcttcaatacatcttcaggaacttctccaccgaacaaacgctgcttcgaaacgacaaaaactaaacctaaaacgcaaaacgagaaaaaacactaataaaaaccaaataaacagtacaattaaagttcataaatgggtagagcttgaatttagatgaattatgagacttgaacaaccttaatccgagttcgtatgaattagttatgaattaatgaagttttaatcaattaaaacctataaaagaaaacaacctaaacaatttatgacatcatatttaattaatgttgcactgaaaagggtagaagacgacatcagccctaggattagagaaaaagagctggtgatactgataaacgggacccacctgtcatagagacaggaggtagcttgatccaccatagactcagttcacagagagttccataagatggatgactaggattagattaaccagagttgaccatgatccaacggacgagatcaaatccgatctagggtttaggatagcggccacatggcaacacgtggcgctgacgtggacgccacaaggacagccacgtcgacacggcgccggcgagcactggatggcgacgaccacggcaaacagcggcacgacggtggacactgaggacaccaacgcgaagagaagatcagcacggtccttaccggcacttacacgatgacgggcgatgaaaacagcggccggcgacgagatggggaggatggtggcggcgactttacggcgaataccggcagagaaggggtggacggccttcggcttggcgctgcgatgcccacggaggaaacggcgaggttcggcgaccacaggagaagcggcaaagcttcgccggagatcaaaacatggcgacgattcggccttcgcggtgacggcgacttccagcggggtttggcgcaaaggaacgggtggccggggtagctctcacccttgcgaagccgatggaggtggcggcgcaagtcggcgatgaccagagaagtgacagacgacggctggagcgatggtctgcggcggagagagaagccgaacgtggggaggtggcttgggctagggaaaaattcgggaaaaagggaaaaacggaagaggaggccgaggggctgctatttatagccggaagaggaagagatcgactcgggaacagtggcagagccagctgttaaaacctgtggggtcaaactggtaaaattgtttaagttttctaatattgcaacgcaaatatcaataatttttgggctgttttgtaaaaacctgtggggtcagctgaccccccagattacacttacctccgccactgctcgggaacggatggaatcggcgacggattagttagggttcgccggaaaaacggagctcgaaacggcgtcgaattcacgcgatatataacgggattcaaaggggtttcttagggataaggtagaggagatcgaggggaatctgtttttgcaaccaattttgagaggggagcaacggatgcgacggattttgcggaggaagcggcggcgcacgcacacggctcgggctctgaacaggctcggcttggggagcaacaatagactttcctttctttcatgggctggtaggaggagggatccaaatcggacttcagccaagagaaagagggagagtgggctgctgcgggctaaggaaaggagagaggagagggaatgggctgaattcggtccagacaaaggagaggatttaaattactttttaatttaaataaatactgaaatgatctctcatttattaaaaatactttcaatgctcaaataaatccaagaaaaatactgaaaatacttggacacacaaagtacttaatgaaattttatctagctcaagttaatgttcaaatttttcatagattttattcacacacttactttaatcattaaataatttctaaaaattccattttaacaacgatttataattttgcgattttcagggtgtgacacctaaccagcttgacaggctcgatgtcggccgtgtcgtgagcctgtcgcatacaccggatgcccgaatcttattgttgcaatcggcggagaggccagagcgccggatcttgttatcacggatggagggaggcggcggagggagcagggagctcgttccccggtgagggcgcggtgcctgtggaggtgaggactgtggttagggcgcttaggtgtcgtgccgtcgaccgccgttcccccgctcgatctcgtcggcgtcggcgtcggcgctgccgtcctctcccgcctccttgccggccattgagctgcccgttgccgctctggaacccgccgtcagctctagcccgccgccgcgccacttcagccgtactccccgcgggcggccgaaggagagagaaagagaaagaaagagagaagggaggaagaagaaagagagagaggaggacatgtggggcgacatgtcagtgggccccatattttttatgtgtgtgagtgacaaatgggtcccacgtatatgtttttaattcaaatgtcacgcaagcgccacgtcaaccccatagactaggtcaacaccgccatggcagcgccacgtcaccaaaaccgcccttcaaaaccaccaagggagtcaaattgcaccggttttaatagttcgggggtcgagatatccggttttgcggtttaaagtcatggattagattgggttcacttttaagggagtgaaagtgaacttattcctttgtctaaacaccaaaccgcaccgaaatgggcgaatttcggaaaaattccagggttctgggattcaattacagaaaaatttcgggcctcaccgaaatgggcgaatttcggaaatttcggacaaaatttaaccgaatttgttgcaaaatttaaacaaacatttgtaaatttgaggcaatttgttaacaaacatcagcaaatataggtaaaatgtttaggcaatcatataagcatcagcacacaaggagaattacagcattggcacatcccaagcactagcgaagaatacacgcgttgcagctccggtcggagcatagcatcagcaatgctaggcagttgcattacccctattactcactgacgcagttgccttcaccgccggcgcctgtgttgcgcacacggccgccgccgatttggccacatgagagcatcaccaagaatgagtattgtggaccaggggagaagatggtggaggggggagatagatgcctaggattcaggtgttgcggaatggaggaggaggacggcgacgcactgctccgacgctggtggcggcttgcatctcgcagctccatctaacagctgccgccaagggaggggacaaggagtcaaggaggagaaaagtgaatgaattctagagtggactttgaacttttatacccaggaacgatatttgttggcttgtttggtgtttgggctggcctgaaaatttaaattaggccgaaataatttggccggtttagtattgtctcgggctgcaccgatatggacgaaattcaccgaatttcggcccactcggtccgaatcccagaacctaccaacaacccatttctccccatccagaccagctccatttaaagaaccaaaccatttggcacatcatcatcatcatcatcatcatcatcatcatcatcatcatcatcattattattattattattatcagtagagtaaatttcacaaaactacaagtattttgtataatctatcacaaaacaacatatttagaaacttgtttcacagaactatagatttaatatattagtttatcacagaactacacatttagtgtcttcatttatcacaaaactataaatttagtgtctccattatcacaaaactacaggttttaataatgctgaaacctgtagttttatgataaaacctatagttctatgataatggagactctaaacatgtacttttgtgataaatgaagatattaaatatgtagttctgtgaaacaagttcttaaatctatagttttgtgatatattgtgcaaagtacctatagttttgtgataaacgaagatattgaatctgtagttttatgaaataagttcttaaatctgtagttttgtgatagatcatgcaaagtatatgtagttttatgaaatttactcttattattattattattattattattattattattattattattattattattattattattattattattattattattattattattattattattattattattattattattattaatgaatagtgtggagctaatcaggaaaaacattgttagtcttgttcataaccgcgcacacggctattagaatatttttagtctagcgagaggtgtacaaatttacccacaagatttagcctcaacatcatattgaccatgcatagcgatactggaaaagtacccgaatggagactgtgacaagacacttcgcataacacaattcaaagcattgcaccttcccgaatcatagtcgccccactttaaaccaatgtatagactcccagcgaccccgtgggcttatctccgtcacttctcagtctagcagtccacaatgaaccatgctatacaatgcatccggttgttgtccacgctagctcatagttattatggttaacgtttcagaacagtagctcgtgaaccggttcttaattgtcatgagcacgactatcaaaaccatgtgctcataacccaccataatcaagttttagttggcaaatttattatttaagcaaacatgactgaccatcgtgagctcctattaattagatgacaataagtgatagtgaagcataagttatccccttaatgagctaatgtttctaagcatgactaagcatcatgatagctttagctaaaatcatataatgttctagctaatcatattattaacctatttacaaaggacaagtaatcaatgtcaaaggggcataacaaagcatataggtcaaccctccggtgacactcgaaaataattcaacagttgaatagaaacaatagctttaaacaagttcaacatgctgaaaggggtgttttagaatctgtgactttccttgctgttcttcataggcttccaaaccttcttcatcataaacggtctcttcggaacgtcggaagctaaagcaaatgaacaaaatcaacaaaacagtaccaagcataaacaatacatatggatatttttaacaaatagatcttgattttatatgaatttagagactgaaccacctaaatccatgttacggtgaattagttatgaattttctaagtttaataggatttaatccattaacagacaatgtttaagatttatgaagaattatttttaaaaaggaaaagggaattattgtgtcatcatggatcgggtccacattagaccgggtgcacagaagcggtccacgaacagctcagattagatcggcttgccacgcaagcagacgatgaggtgaactggttgggcgacgtggcgctgacatcatcgatgacatcatcgcctgcggcgactactcgggaccctgtggtcaccggcaatctagggcacggcgttgaaaacggaaggcgccgacatgacaagcgtgacggggaacccaccggtgtgcggcgcgacggcaaatggcgacagacagcgacggcgacaaggttggagcgacggcttggctcggatcatcggtggcggcggcgttccagcggtagtcaatggcgtcgggccggtgtatggggtgcgtctcctccttgcaatcccaaagaaggcaacgggaagcggaggcggcggcgcggtgacggcggcgctagggtttgcagtggcggcggcgctaggagcgacggcgacggacggggcttgggaggatcggtagagtgcgattagggctacctatttataggcacagagggagagattgagcccaacacgatcgcggtggcgccgggaaaacctagggttcggtttggagagataaggttgaatccgagctcgattccacgtcggattcaaagggataagagccgattcttggggtaaacgggagaggaggataaggggaagatttcccctcaccgaatcggactcggggcaaaaggtgacggcagatttaagagaaaatcgacggtgagattagacggtgccatgtggcagccaaggagcgtttgtaggaataccacatgacagcttaaaagcgtttatagaaagtttaatgaattttagtatatagtagatagtgtgctaaagttagtgtagagacgatatattatacacattaacccttagcttatatggataaaatataaaaattgaacatgtttttgccggtattttggtacgttgtccatgtatgagtcgatttttaagttcgtttgtttttttaaaatacatattcgtatttgagtcggtttttaagtttgttcgcttttggtgcttttggtaatacagaaggaatcgtataagaaatctcacagtgaatttcatcttaactaaactatataacaataataagattaaaataaacttcacccgttgtaaagtacgggtattttttctagtatggataaaattaaaggtggtaattacctcttctataaaatttgctccaagtcctctagtaagccggccgggctgcaggactgtagttagccttgatatgccataattgtgttttacgaattgttacaagctttggctgtttgcgtgaatatgtttctttcaacgggttcacgttccaatcttatctaataaaccgatttcagggttagaactctagttcttgattgggacaggtggcaccaatcttagaacaccgatcgaattcttggctggagaagcgcaccacgtatcccacccctccagcagcggtacgatagcatatcgacggtgaaaaagacgtcttgcggacttaaatgtatattgaaacttttaagaggtcttttttacaaaatgcgtgatctcatctagaacagcccggaagtagaccaaaatatcctctgagaaaaaaaagaatctaataaaaaaatcaacaagcggttagccccatcacgtggcctaattccatatatagttttgtcactacgcatagccatttgattaaaaatctggcaaaaaaaaaaaaactgcccccattgcaatctttgagtctttgttcgaattgaagataaatctggaattaatacaaatgaaaagatccgaaaatgtggtgcggattgtaaagaaaataaggataaaaataaaaaagccaatcctgcccacgagccgctgccatctcccctcccacaagacgctatcgtcaaccaccggattcgtccgtcactcaccgtgagatggtgctgtcctgctgagccgtcaaatccgaggaagtcgacgcggagcttcgctgcaggaggtgaaggtggagaatattagagagaaatgagcagctcaacatctgcctgcatgcctgtgggcagcggggagaaaagaagcaaaggaaaggaagaagaaaggtagaagaatgacagcgtcttctctctgtccgcccgtgaggccgtgacgacagaaaaaaaaagaggaaattaggaagagcggtgaaaaatgcatcaggaggactgagtagaggtggccaaacgggccgggccaaaacgggcggcccgaggcacggcggaacctgtagccggcacggcccggcacggcctgctacagtaacgggccgtgccggcacagcacgagtagccgtgccgtgcttgggccgccggccgagcccgcgggccggcacggcacggcacggctactgtagtaagtccgcatctcatccttccgcaagtccgtatctcatccctcccaactgacggcccagcccgctagccgcctccgcaagtccgttgagcacccctcctagctgatggcccagcccgccagccacctccgcaagtccgcatcgcatccctccgcgccatttcggttcctgggccaaccgtgccccgtccacggcccatttttcattcacgggcccgtactgacacggcgggccacacgcatgccgtgccggcacgggcacggcccggccatccacgggccgtgcttgggccggcggctcggcacgtgggtcgggacggcacggcccgtttcatgagccatgcctaacgggccgtgccgaaacgggccgtgccggacccgtgcccgtgccgtgccgggccgggccgcccgtttggccacctctaggactgaggggagcacagctgtccactggattgctcgatgcactggtcactgggcagaggataagactatactgttgatgagtatcaataaatacataaatagtaaagaaagttagtactaataaattactcattgctggtttagattggtaccatcttaaagcatattattttgtgccaaaatttataaatatgtggatgcatttagttttgttactaaatattagtgatgcatagggaattttggttacaacacatttagcctatcctactaaaacttaaaattattgccaatttatcaaattattaacattacaaaatttttgacaggttcgtttgggcactaatctaaacatgcctttaacttttaaattacaatgttttaatggatgcaaaatagttataattagcgtaaaaaatattttacaatatttatataacttaagcaaattgcggttaaagtttatacctaaacaacaaaaggtagtatcaaataaaaaagaaacagtggagtagtagggttgattgttacatccaatttggccacatcatctgcttattagtttatacaatgtattgcatctaaaacattatctccaatacattataattatttaattagcttattcatttttatcctatacatattactctccaatttgctaccttgaagtttgtaaagaggtttctccttgtataaaggcctgaagggtgactctttctctttctctttctcctctcctctccctcccacctcacccattttcttaaaacacacacagtacatgtatgcactcacaaagtgcacacaatcatctctatgaacctctatgaatacacacaagcacaccacaatcctatgaatacctctttgttgatggatatatcgctatcactgaaaaataattagctaaacccagtggactggttctaccacaaggaacttgccaagttgagctacgctcacctcgcctccacctcaccaattaatcttacgtggcaccttgcagcttatgcttggatgttttatagtacttgctctaaaaggtttgttacgtactccctctgccgcagaagaacatcaccttttgaccaatcaaactaaggtatacacatttaattggaattttagaaaaaaaaaggaatcgataaggacgtcagtggtatttctcctcactactaatttgtaggagaatcgttataaataaatttgtctggggtggaaggaatagaacaatagggattttgttttagttggtgagaaaagctctgtcattataaggtggcataggcattaagagactatgtgactaagtggacaaattaaataagatatattatgattgtttgagataagagagtaggtactcaattgctatattttgctatattgtaagacaacttttaaatgttagaaattgctatatttgaaatgaagggagaatgtttttttattaacgatcttttttacgtaaaaaacactacggtcgttatttaaaaatatctattttgcaaaacctatttacaaatggaccatggtttatttagctgaagatgaggcttgataattaatgctttaaaaataagtatatttcaaacaaagtacacttacataaaaactccttttaataactccagcataaatagatgaaaatatgataattttaaattaaataactccacatattgaattaagaatgtaatggaatcgagctaatcctactcaaaatctctcgaaatttctaagttgatatatttataaggatgggttaaaaaggacgcgccaaatggcgcgctaattttctagtgctttctgtttggaaatagtatttcttcttagctgtcagttgacggttactacgtccatgtgctatgataatcacagagtatgtattattaatttggttgctactagcagaatagaaggattgctaggtaaaaaaaaagtaaagtgcacggacggtccctaaacttacgtgggtgtgttacttaggtccctaaactctcaaaatgaatttttgggtccctcaacttgtctcgggtgtcatataagtctaaacgggttcaacccactctgtgtgttgatgtggcatgtcatgatggcgcctacgtgttagcagaaactatatgtcagccacatatagaaaaaaaaattaagaacatgttttttccctcctcttttttcatttatttttcaaaattaaaaatatcattttctcctctctctctctctcctcttttcttaaattttattttcttcatatgagtgacatgtggatcccactgacatgtaatcgtcaccgtggcatgtcacgtcatctcacagagcgggttgaagctcgtttggacctatatgacactcatgataagtttggagactcaaaaatacatttcgaaagtttagggatctagatgacacatccgtacaagtttaagaaccgcccgtgcaattcactcaaaaaaaaagaatagaaggattggttctctttattttgttaggtgccattggaattaagtttcctgatatcactgttaatcccgttcttatcagatgatatgtcaggatgacgagaattcctgtatatagcaatggttgatgagcaatgattacgttcaaactatttcagaattgattttgtggtaatttgaggtttgtagaaatcatacaagtaaagcaaaaagttctatctgttgttcctcctggttgaacagagattatggaatacttggtttccctttcaatgatcaacccacttaaccatgaatagttggcagtagtctgattgttcaatctcgaaaaagtgttcttctatctgatttaaaattctgagcaaatggtgaggaaaaaaatgttttttctcaaagggttaatataacaaaaaaaatgaatttctatattcttgtcacaacgtacggataatttgctagcatatactccctctgttttcaaatatttgacgccgttgaattttttaaacatgtctgaccgatcatcttttttcctatcatttgattcattgttaaatatacttttatgtatatatatagttttacatatttcacgaaagattttaaataagacgaacagttcatgtactaaaaaatcaacggtatcaaatatttagaaacggagggagtacataataataacccaagtcactttgcaccaaacctgacttttttggtaactgggagtttagatatggtaagattaagtggcaatttgatttttagtcttgtttggtaagggtatgtacaaccgtctttattagtggctttctctattaacatgcaaataaacttggtgatgtgcaagaaagggaaaaaagagaaaaatagttgttacgcacgataacggctcagagtcgactcttagtatttattagaaaatattttgttgcatggggttgaaagaaaggaaagaattgggaaaaaatatttttttcgtaaaatatatatcgagaggcctctcgatctggtcctatcgcgtgacgtatccagggacatcatgcacgggagaagtctactacatgcatgttttttaatagatatgtatgtcttttttctcttcaaacaaagttttctctcaaattacttatccgatctacaatccgattataccattgtgttcgttataattaaatcttcagaacaagatctgacatgattacattacgatgaaaaaaaattatagttgtaaattacttttattacatatataagttactgttatcatatacataaaagtatacttttagatttgactaaattacttcttagatatataaaagtaaattttataaagtctaaaagtaatttacatatattataaaaataacttaaaacaaaacggaagtaactttgtcacggcattaaaagtaaattcgttgtaggaataaaaatatgactttatctagaaattaaatttaatcagcataaatcaacacacgtaagtttaacaatttttaaaagtaacttcaatgttaattggaagtaacttttgtatggttaagaagtaactctctataaatctgtttaatcaccgattgtttttttcctttcatttttgcttttcatgtagaatgagaaaagaagataaaaccttcgatggattgtaaataacattgatggaataactaatgagaattagttaggtataagatgtaatagttacttcctgataacctttctaatatgtaataaattacttttaaattaataaaatatttgaatatattcaatatgaatcttgatttgttacatattttgagtggagtacaatgatgcaaatagatcttaaaaatgatatgtgatttaaaagatataagttattaaagagattaaaaatatatatactattgtatttttcaagttgaaaggagacactagatggatcacaaaccagctacccgtcacgtccaacgaaaaaaaggcatgtattagagttactttcattttattataagttattttataatatatgtaaattacttttaggctttgttgaatttacttttatatgtctaagaagtaatttagtgaaatataaaagtaatttagatatattataaaagtaatttataatttttcatcaaaatataattatgtgagatcttgttataaagatttaattgttacaaacacaacggtgtaatcggatagtagatcggatgagtagtgtaagagaaaattttatttgaagtatagatggatagggtctctcatagatggagtgatacctagtttagacaaaccagctatcattagctgtctagtcacgtcctatttttttatattaatggttagagaccatattgacttttaaatggtacagttttgtacatacgctaaacgctaaaggtagtgggaactgaaagtagatgttaaatgaaaatacatccgtttccgtttcgttctgttctgttctgttgtttctgcccgaggtcggcgaggcaggcagaacacgcaagacgcaagacgccgatccatgggggcagagaacacgcaagacgcaacgcctaaccgcatcctttaaccatgtatagtactagttgcgcttaagagggtagacgtacgatcgactgcgtctcgttcgatcgctcaccggccgcgcgtcgacttgggcttcgctccggtaattagttgaaaaaccattcggccggctggtcaccgtacttaatttgctgatccattaattcttttttacctttaatttggacgcagatcgatgatgccggccgtcgactagccgcgcgcggccggccagaaaccaccaggcgccagccaattaaccctggtgaggctggcttctccctcgaaaccattgcatattcatcgatcgctagctcttctgttcaccacaataacgtatattcctcttcaagcctaaacgccgcccgccaaaagcccctgtgctgctgctgtgccgccatctcaccggatctcgacgccgttgctggagctccacgtacgagcctggcttctccgccgaaccacgtgacggggtaagcagcaggctcatccaccctactcctccctcccttccttccttccttcttacccagttcgcgagctaccaagaggtaaaaggtaaaacaatgtgaacgaaaccgttgatatatcataactgatggtattggagtaattatctaataaaacatgggtattttgggttaatcaaataccgaattgttcagcattatctggtagaaaaaattgtcaatcttccgaggctgtctccaatacattttttatcgttcggtggagaaaaatgtaaatcttcccgtacattttgtttcccaaataaattttatcattttctaacatttgaatgtatttttgtgtagttttcatgcatcacaattttatcattttgtaatatttgaatgtattttttgggtagttttcatgcatcacaagtctaaaattaagtggaaatgcgtgtttgtatatataaagtagcatatatacatggcagctaaattagcccctaaattttagcatgcgtacatgcatgcatgatgattaagttagaaaccataatggccaaattagcccctaacttttagcatgcttaactccagtcaacgcaagttaattattagctagcaagttcaaatctttggaacgaagatgggagaataggatctaacattgttttttctttttattactgtagaattaaagagaaaacatctttttaaaaagaatttcctcaatagtagcgattgcactttgatcaacacaataataaaaaaagacactttttttttgcgccaaacaacatggctgcatgataaaaacacaaatccattccttcttcacttaccatcgtatgttgtactttgatctttataagactttgtatctatgttcatgttcattggggggagaatatgtaaatatagcgtattgacgatgaattacattttaacctgcaaaccagtgatttaccgaggttacatgttctttgtgataaaatataaatcttaaaataaccgcgcaaacattcagacatattttatcctatggtatcattaggaacataatatcaaccttaaaaaaactacaatcaagttcttagggagaaaatgtaaatctaaaagaatacgtaaatatcgtaacggaggattaccggcgatcatgttcttaggaaaagagtgtaaatctaaaaagagaacacgtaaataaagtatggaaaatcatcgaacatattggagatgaggtacccttctctatcgcttagaaaaattatttttttacccttattacctaattacatgtgtcgatattaaatatcttttgagtgatacttttattatgtacagttagattttaattttgattttaatttttttaatgcaaacaccgtaaaatctctcttatacctagtgtttaagcctctgttagcacagtcgttgtcgctatggccgccaccgtgctcatctgccactagtacaataatgatttttccgtgtggtcagaatcggttttcgcgtgcggatctttcacatgtctggaacaaggtgtctgcgaaaatccaattttttcgtgcgagtgatgcacccgcacgggaaaataaaaaatcgaaacaaaataaatcaaaagccgctctcgaaccctaatctagcctctgtcaccaccgtcatcatcctcgcggtcgccggcgacgaatccggcctcctcgcggtggcaggcgacggatccggtctccccgtggtggctggcgaggcggcgatggttctggcttccccgcagtcaccggcgacggatccggcctccctgcggtggcaggcgacggatccggcctccctgcggtggttggagatggatccgctccgccgccaccaccctagccacactcgctgatgtcgccgctgcctccgccgctctaaccgatgccgccgcctccgccgccctagccgaagccgccgccgtcgccgggattgggagattggaggagggggaggaggaggggagagggagagggagagggagatgggagtgcgggagtgacggatctgagagggagagtgtgtgggacagtgggagtgggcgtcgccgtcgattaaaagggggtgggctatttttgtgtgcgggtcacttaacaggtcagcacgcgctgatctttccgtgtggtcattttaaagagccgcacgtgaaaatggagcacgatttttgcagacgcgaacacttacgatccgtctgcaatctaaaattagtcagtgtgctctgcatttcaccggggcaaatatcctttgctccgctcaacgctggcgacctcaaaccgctgcccctccacgtgtctatagaggtctttttttttatagaggatgtctttagaggtcttaaacaaatgtctttttatttttgtctgaaaggaattaaaatgttcgtttacgctttcagccgttatataggaagccgtcgtttagcttattttaagcataagcgaaacagcatattttaaaaaaaataatttatgaataaaatttttatatatgtgttcttagcgatctaaaagcaaaggctgaaaaataaactttgatgaaaaaacctcaaaatcaacttcaaatttaaggttgaaaatttaaattttggctgataagcataagcataaacgaaaagacgagactgatagggttaacctccaaatgcattaataggttccgctttcacttgggaggacacgtaaatcatctagtatatgccaacagggttaaagccctgtttcttgcagcttggaattattataatccagattattgggagtaagctgaaagaaacagacaacttattgaagtagcttattataatctggagcccagcttattataatctgataagcttatttaggtaagctttttccagattattgggtgaaaaattacccaccatgccaccccactccctctttagactttgccccaataatctaggctctaataatctaggaaagaaacaactaaccgcttattatactacagattataacaatctagtttataataatctgactcaataatttagattataataatcccaaactgaaagaaatagggcctaaataaacgtaaaatctaatcggcgcatgcgcggctgctttcactgtaactgttacgaggaaacctacatgtaataatttttctattttttaattcataaaaaatgatactattattgaagctcaccaatcattttaaatttcatgttctatgtgctcatgtgtggtggcatttttatttgggtgcaagacgggaccatcacataggaaaaatgcgccctaactgttgctagttaaaactaattagtatacgcacgcgtcggcctatatagtcgtgtccttaaataaatcataacccagtacacagctgaaaaatgaagatctcttttccaaacgatatttcttaaaaataataagcttacctcctctatactctagtggtgatactaatcaatttgctcttttgcactttacagcaaggcaaacaggtagctactattcaagatggctgcccagcatgatatggtgtcaaagtttggtgctgctgccattgtggttatgctcatgcttgtcgtccctaacagcggcagcggcgaagatgcagggcatgacaaggatcaattggctcctatgtcaagcgaagcagaatttggattttctctcccaattgttcacgggcgtccaccggcacccggtatggatgacgagaagtttgtgactccatttagaatttatgaggatgttgtctatcttgctgaaatggagattggtgagcggcaacagaagcaatacctcctgatcgacacaggcagctctttggtctggacacagtgcgacgaatgcccgcattgtcacattggcgatgtgccaccatatggaagatcccaatctcgaacattccaggaagtgagctgtggtgatgatgatgacaatgataaagaagaagcaattgctagttactgtccagcaaaaccgccgggatatatcactttgtgcgtcaatgggaggtgtatgttcaaggcgctatataatttgaccgggcaaggcgagactgttcaaggatacatgtcaatggatacatttcacttcattgatgacaggagatttgactaccaagctaagttccggatggtttttgggtgtgcacaccaagagaatatcgttcttacagctgtcaaggaatgcactggcatattgggattaggtatgggcgatgcatcgtttttgaggcagaccggaataactaagttctcgtactgtgttccacctcggatgccaggttactcatataggagacacagttggctccgttttggctcacatgcacagatttcggggaagaaggttccactggtgatgcggtggggtaagtactatttgccgctaacagccatcacttacacatacaatgagcttatgtctcctgtgcctattattgcctataagagccaagaagactatctacacatgatggtagatacaggaacctccttgctaagtctcccgacctctttgcacgatgatctgatcaaagaaatggaggcaataattaagtcagaaaatattatggaaggggccactagatggcccaagcactgttataaacgcaccatggatgaagtcaaggacattaccgtcacacttagttttgatggaggtttggatatagaactcttcacatccgcactcttcataaaaacagaaactacaaaaggacctgctgtctgcttagcggtgaatcgtgttgacgattcgtctaaggcaatcctaggtatgtttgcccagaccaacatcaatgttgggtatgacttgctaagtcgtgagatagccatggatccgattcgttgtgcctgataaagtacgcagcttgttaaattgattaggagcatggcgttattggacgcattgattcatgcgtggttgttttagtttattggttatgttaccaatttgcatcttcacggctgtcttagtttactattgatgactgctgaaatggacctgctacttcgttgagttcgtttactattggtaactgttgtaatgaacctgctatttcatttgagttagtttactattggtaactgttgtaatgaacctgctacctcatttgagtgctgtaatggacatgctacttcattaagtactacaatattattttttatctgtctagacttgtctacatttatgttccactctaccgtaattaacaatcaccacttctccttcgtcgtttgtttacatgcagcaagtaaataaaattctgattgtctgctactccttcaatgaaaaatctcaaaaattttgtgattctctcagggcgacattttggaaaagacaatccttataaacccatttctttgtaagtacgttgctgtcagattacaatagtgcataaaccacctttcaggatacaggctaagggaaaacttatttgaaccaaaaaaatcgaatggcctcagtagcctagtacaaatatatctatatcacgcacacaacatacacatactcgggctgtgcagcccacagcatctgagaaggaaatccttacaactgcaacattggaaaaattttactacgcatccttcgaatgcttgggcatatgttcttgattcggcaaaggcgctgtcaattcaaaatagtcatcaaacacgctgtatccagacacgctgttggagcatgctgcatgcgctgaatgcttgcagttgagttcccaaattgggaaaaggttgtctatacaagagctttaactgcatcacaaaatatatggtttattaagcaagtcgataagaacccaaactatcagaatggtcacaatctaagctgtaagttcagtaaccacgttccaacaaaagatagctggcaaatattagttttctagcctttcaagcaaagctgacatcttaacagctgacagaatatgagattgtactagatgcaatgaaaagtgagagatactcacaatctgttcatgcactcctctttttagcaactctaacttggaggatcagatggacatctcgcttgaatatggacctcaattcttcattggcttcaataccaattctcctgaaacagttgtcacaaatgagataacgcattaatagtttaccaatcatgcacaagaataactgtcggaacgagattgattggagaagtgaactgcaaatgcactccataaaaggaaccaccatctgccagggtgaccagttttttctttttttaagatggtggagagcagtttcttcataagagaatgtgttacccgattttggagccatttttcccaacaagaatctgtcgttggctttgctttggtgcaatgaagtgttgttccaccctaagagaaccatcttttagctccttccagtccatcagacgatggtcaattacataaggaatttcctgcatacatttacccgaacataccatagcagacaattccatcagaatcaagagaaaattaacaatatgccactccatagaggtggctttaacaatatgccacccaataggatgtccttataaagatgccactccatagagcatacccctaaataaaatgccacttttggctgtttagaggttttgattactttgtttatattattttatcagactcctcacgcgaaatgaccgaaatgcccctttcatatcgtttagatccagagtcagattctttctcttctctctctcgatacttctctctcggccggcccgggcatgcggggttgtcgccgccggttccacgccgcccctccggtcaccccctccctgttatggtcacccgtccgtgccccccaccaggcgtcggcgtgcacccggcccagcgtcgcctccccgccgcccccctctgctaggtacaagtcgctgcccccccccccctctcaccacctcgccgccctcccttcccccactcccgccgccccgccgctccccctggtaggtagaagtcgccgccctcccttcccccactcccgccgctcctctgcctccaatgtaacctcggcctctttctcctctcagacagtaaatagaaggttgacaacatgagctcgaaggatttgtcctcgaggtaaaatctttcatatcgctgtacattttatattttcatcgagttagatttctaactcgcttttttctcttgtcgattcaaatcgtttaggttggattcagaactgtctagagtagagatgcagttggttgaatatgggacaagttccatttcagcagtttcagttctagcttcagaatgtctagatagttgtacaagtgtgcctttatgccttgagtatggggtgatttcagaaccagcagctccaactgttggtgtagaacagcaaccttttcagtatgttgattgggataacttggagatagatgaaacgttagatgatgagggaaggattcaggtcatgaatgatgaccaattatacgtactcctaggcttgagggatgaggaaagggcaaaaaaatcggcgcatgctgctggagcgaatggttcaagtaatgctgctggagctgatgattcaagtaatgctgctgaagctgctggagtcactgacggcatcgagggtgcagcaattcctgttgatgattcagtaccgggtgagcttgttataagctatgacaagaataacccttgtatggatcgatacactaagtacccctcaatgaaggaattcagattggctgtaagacagtttgctatcaagaaggaatttgagctaggcaaagtgaaaactgacccggagaggtatagggtaaaatgcgctattgaaggatgtgcatggagtcttgttgggcgtaggcagaatgataaaactataatggtactaacccaaaacataatttttttgacattacttctagcgtgcctagaattgtttgcatggttttaatggattacctttcattgctattgcaggtcacagttcataacaaagaccatacttgtacatctagcatgaggataagaactactacaccgtcacaaggttgggttgctgatagggctgttgatatccttaagactacaccaaacatgtcttgcatagacttgatgaaaaggttgcaggatgatcacaaggtaactctctcttaccatacagtttggcatggaatggagaaagcaaagaaagaattgtatggatgttgggaggaaagttttcaattgttgtatagttggaaggaagaggtccttaagagatcacctggaagtgttatagaaattgacatcaagatagttgatgggagggcatactttcataggttttttgctgcatttagtccttgcatcaaggggtttgtggctggttgtagaccataccttagtgtagatgctacccatttaaatggcaagtggcatggttttttgccatcagctacagcaatagatgggcataattgaatgtatccagttgcatttgggtttatagactccgagaccgaggacaactgggtttggttcatgactcagcttcatagggcaataggagacctagaacctcttgctatttgttcagatgcatgtaaggggttagagaatgcagtcaataaggtgttccctgctgctgaacgaagggaatgtttttggcatcttacgcaaaaattttctaagaagttccatggtgagacttttggtaatatgtaccctgcagcaagagcctatagggaagaggtgttccagaagcacatgttccctattattaatggaactcctgaagtttggaaatatttgacaatatatcataacctaaagtggatgaggtgtggcttcaaccccgcaattaagtgtgattatattacaaataatattgcagaggttttcaatgcatggatttctgatatcaaggatttgccaattgttgacctagttgacaagcttagagagaaggtgatggttctatgggataagagaaggagaattggagaaaggcttaatggtaagattctaccagctgtaatgcaccaattgaaggcaagaacaagaggattaggccacttgaaagttatcacagctagcttacatactgcagaggtgcatgactatgtcaaagaatttggaagacacgttgtttcaatagtggcaaacacatgcacatgtgaggagtggcaacacaccgggcagccctgtgggcatccattggcctttttaacaactcagagaaatgttgacttggaagggtatgttgatatggtttactcagtggagaaattcagggctgcatatgagagagataccggcaatgccagacaagtcacattggccaaaggtgaaaatgcctttcgatttgggcgcaccactagagaagaggagtgttgggagacaggaaattgaggatcaaaggatgccttgagactggtagcaagagtagtgcaaagagtgatggcaagaacaagaaaatcataagaggtccagttacatgcaaaagatgtggtgagaaaggtcataggcaagctagctataagtgcccactgaatggtacaaaaaaaaggtattaatatttctgtttttttcactttacatccttttaaatttgtggtacttcatcctatatgtataaatatatgcaggaaaaggaagcctaggaaaaacaacaaaaagaaccttccacctgaaccttccacaccacaaagaacaaccaatgaagctacaataatgcaagaaagcccgggaatggttacaaggaggtaagttgatggtcaaatgacaagttagaattattctccttgctgtgcatgcttcaaatcaattgtgtgtgtaacttggcttttgggtatacatgcataggcgacttgcaatgcttttgggagtgaccagtacttctggagtggaaggggctagagagccgagagagatggctagtacttctgcagaccatccaagaaaaaatgactcccaagaaaatgaagtcaacctaatgtattttagttgtcaaatgtgaactactgtaatgtatttgtcaagctactgaactactgaatttgttaggcttgtgaactgtatttcttttgggtctctttgatgcttcatgtaaccaatatgctatgtgctatgtgctggaatgctatgtgctatgtgctgcaatactatgcctatatgtgctgctggagacctctgtgctgctgtgtgcttgctgcaatttatttgtttatgtgctgcaaatgcttcactgttgtgtgcgctgcaatttgagggagcacagatcgtgctatggtgtatgggctgcaaatgctatactgatgtgtgctgcaaatgctttactattgtgtgctaaatgcacaatttatttgtatggtggacttctgtgtgctaaacgaggtggtaactgatttgcaatttatgctgtgtggtagtaactgatttgtatttgatgctgctgtaatttgagggagaaatctgacccgaacattgcaaaaaggagctaggggtacttttgtcatttcgcgtgtcatttctgtcaaaaaacctctaaacagattaaggggtatgctctatggagtggcatctttataaggacatccaatagggtggcatattgttaattttctctcagaatcaaatagtaccaattacacagtagcaatatgtccaagaattaggccctgttctatactccaactataaacttcaacttcctcattttccgttagcacgcttcccaaactactaaacggtgtatttcttacaaaaaatttctatatagaagttgtttaaaaaatcaaataaatcaatttttcaagtttacaataattaatatttaattaatcatgtgctaatgagttttctcgttttgcgtgcactggaaatatttttccctgggcatgaaacaaacgaagccttacttggtggatgtgatccagcatcttctcccgcacaacctccaatgagatggttttcatgacctcttcagtcattgtagttggttcctcatcccaaggtcttctcactgcctacatagcacatagacgtgatttaaatattgatcaaaagaaaccaagttcgacgtcacagcacgcaacagagataacatccattgaatagtttataaactaaaatacctgttccatcaagaactgtacaaggtctttgacccctttgccttttagtccagataccatgaagtacctaacattccaagaaattgttttatgaggcagatgaaatggtaggaaggcaatgcaagtacacctgcagactaaggggaacctttcatatgcaggaagatcttcaaattcctttgcaactttaagcaagtcttttttgtcttccacaaggtcgaccttattcatgcataatatacgcttctgatttgggtttacctcagcacccaaccgtttgattaacttgacaactcgcgtgtcagggctgcatacacgaagaaattgattagaggtgtgcttatcatggtctctacataaaataagaactgcatttcattgattgacagacaatactgaggaaaggaaggataaaaataaatatttgccaaggcttacgttttaagatgcctgttgacatcaaacaagactattaataaatcataaaggttaattgagctccaggcactctctacacgaacagtgacatccctatgaggtaatccatggtggcctaacatgagccctggggtgtcaaaaaagcactgcagtgcagagaatattatcagtgaaaacaactaaaagttaattaaagaaaaaattgtagatgacacccataggcaccaatttttgtagcagctccttaattacgagctatgcatttgacattttttacagacaaacccaatcagcacagttttttaatacgaagtccattactttgaattatatatctatgagatagatacaatcaggccatggggcacaatgtgcttgcactgactgatttgaacatctctcttaatgtaatcagtaatggtagaaataaatcacaatgtactctgttttatgatatgtaatatattcatcattgtccagaattcagtatttgcaaatgaaatacagacaagcatcgttagacaggatttttagaaatccataacggtaccatcaaaaattgaaaatatgaattcacttcatactagcacaagcagatattggtaacagaacatactatttgagttatcccttttgtcagcacgcccaaaatttcatgagttgtagtatttgtcttgcgggacactgcagccacttttgttccaacctgtagcaaaaatataaatatggaacattaggctccactacaaccagttctcctccctttttttgttaagaaatggcagggttgccatttgatttagttaatgaggaaaggttccaaaattataaggaaaaagaccagggcctaaacaaaaggcatagtttacatttgtcgtctttgccactattaactatttagtctctacaaatgatgctaagccagacgcatacaacagccagctggtaagtctacctgcttactaaactatacttaacccaaagaagccattatatcaacagaattccaaaaaatgaactccaatcagacccagaaaatggtatactctatatttattgatgtttaggtattgtagtaataaaaacccaaatctgcaattgggcaactgcacaattctgttaaatttttcatacagaacaggataccattgaggcaacgatttgcaacaactcatggccatgcccagaccttctgaaataattcaacatcaagctagaggaacattggtggtctcagggaacataatcgaaattccttattatttaagcctcactggaaacagtcccaaaaaaatggttcaggatgtaataactagcgtaggtaatcttaacctaggcaggctagcttacacagttatttctgtctctgacaacacacaggttagcttttccagttttttttgtctctgacaacacaactagttgacctaaactacagcttgattagatcaggagcatctgtatttgtagtgcagaatggtcgttcctgttgtatgttgattaatctaaacataagtttagcaaagttagaatttttcacctggataaattagccaaataaccatggttgcagagatcagtgagagaatgtgagtttaagaaggatgtctagaaattaacaacactaagttacaaaagcaacacaatttctgtaagcattttagcaaacatccatgatacaaacaaatatagggtgctctaaggaatgctacaacaaaataaccatttccatgtcacaaaattttcaatgctgtgacatgaaaatacgtaccatggtgtttgttaaacctacaaagaaatataggattatactatgatcactgtaaagtgtcaaaacacacaactgcacttcaaactcctaatgctcctctaagaaatgttacaacgagctaaaccaaaccatttccatgtcacaagatttttgttctttcaatgcgtgaacacacgtaccatggtgtttgtgagcgaggacttgccggcgttgggggcgccgacgatgccgacggacagcgacatctggtcctcctccctgacctcgccagggcccaagtcgtcgtcgggcggctcgagcgcggcctcgagcagggccagcgcaacctcccgcgaccgctcctcctccaccgcatcgtccaccccacccctctccttcccgaacagcgcctcgtcggcgcgcgcgcggagggaggggtcgaaccggagcttccggagcgcggagaccgggttgcgcgcctgctgcggcggcggcggcggcgtcggccccgagggcggcagcgcgaactccgagctgtcgaagtcggcgtccggggcggcggcggagtcggagtccgatgaggaggcggcggcggaggcggaggaagaggaggccgaggcggtggagaggacgcggagcgccgtcgggatggggctgagggttagggtgcggagcgggcggagggccccgacgaagcggcgcatggcggcgacaagccgcggccggcggcggcggcggcggagggtttaaggcggggggggggtattttggggagagaaatgcggagagggaggaagcgaggaggtttgcaggcgtgtgaaagggggaggaggcctttttgggccgtccggccctccaagttggcccggttggtctgttgactagtatgggcccatgaatggttgcctctacatgtacatgtactagtagcttgttggttttcaagaacacaaaaggcacaccctatttcgtggatgtgactcctttgtaataacgaacaaatttgacatatatttttggatggataaattgaagtcatttatatgaaaatcatacaaattattgcgttccatatctggagtagtcatttatatttgtcgacaaattttctcctagaaatttgacagatgtaattatagtacaagcgtgatgtaatttatatataacttgtatgtaactttcaaaaatctctaactaagatgctatttcggtgaaatggaggtcgtgggaacgaatcatctcatatatgtgcgcgaaatgacttttttccttcacttgcacaaatattgaaacaatttaatggttcaaaattatgggcaagttacattgtagttacattcaagttacagtgtaattacactacgattgtactataattacatttgttaaatttttagaagaaaatttgtcgacaaatatatagcaaaattgtttagtcccaacaaaattatatcagttttagatttggagccctgccaaaaacctcctaaatgtccataagttagtatccgtgttcaccaattgtaggagtacactgtgaaaaaaccgcgtgaacgatttttccttgtatctttcagtagatcatgttcatgcaccgccgaggatacctatgcgtgtgtggtagtgtgtgttcgtttccgcatcctcctgtacaagagaggaaaagaaaacagagaagcatcctgttctgtcctgcaacccattggacggtgcagggccgcaggggcctcatgccatggttgcgttctcctcatgctttcgttctctgcatctttgccttttgatctcagcatggtccagtttaatcccttttgcatatattctctgccagttaaacaattctgcagggaagaacaacgcggcaaatcaaaagaatgtttctgttacttcagcattgttctgtttaaaacagagaatcaaatcaaaccatacattcagtggcaacagtttaaactatcagtgtcaggtttcagaggtttctggaataaaattcaggtttcaggtgagccacacaagcggtatatatttctgaaacaaattgcagatttcatcaggaataagaagctacagttttgcatttctgaaagactagagaaaaaggagacaacgctggggattatttgattcttcactgaacaagtgaacaaacttcacagagctcttgtcatacaaaaaggatttaccctagctgagaatctgtacattgacattgactccaaaaggaggtcatcatttttatacaaagcttttggacttgaagagaaaatctgttcaaggaccactacctcgactaacccatttgattcttgttcacttcatttggtgctatactggtggaagcacaccatttgcccaagaatcagatttgtcctgaacttttgacttgtgtactcatgtcagtaaactctaaactttcggtcgtattcaggccatctttttctccaattctggttgatggagattctacaaaagctggttgcagtaatgctatgacaacatcaaaccctgtcagctacaaactaagctcagggtgtctttttcagagacaatattcaaaaatttgcagctcttggttgctctgaagatctcatgcccatatggcaagcagagacatcatcccagcgccgaggaagagggcgaggtatactgccagctgaagctttgtgtttgtttgaagcttcggattgttgaaatctgcagcgaggagatcgaccagggacatgtagatcagtatccctgctgcagcagagttgaagactccctcgacgacaagtgcggtcgagctgtgcttgctatagctggatgagattgcgatccccagtgcaatgcccaccggagcagtgagggagaagaaagtcgccatgatcactgttgctttcgccttaaaatttgcctgtgtaagaaaatgtgacacaaagtatgtcaaattattgtctcatacgagaaactttaaagtctgtccctttttcatttttatggaaagtagcttatggtggaatggattttcacctaattgaatgaactaaagtaaactgctgaaattgtggttcttctcagacatagtaatatctgcgtggatattgatcagcactggatagtggatacagtatactgataacaattgaaaatggttgagaatcctggccagtgttacatgacaaaccagtctcaacccatttctgaaaacgcggtatttttaggtatatgctaaatctgaagtccagttttaaaagcatctgggaaaacagaagggcaaaaaatgacgcagcaattcctgtttgtgtatcctgaaaaaaaaaactggcattgagaagctgggagcttgtttgagcttgtcagttagtgaaggatttctgaaccatagtggaacggaatcaattattgatggtcctacttcaagtttgctttgtacagtatagtcgtgtagctagtgataagttctatcatttgagctataaatatctctgtctatactctatatgtcgtttttcgcacgcttttgctaatggagcatgcccttctgtttctgtcatgagcccaggtgccttttacctgattttcacgtgtagatattttatcaatttgccatgtaacaatgtaggtaaacaagcgcacagctatagtttcaacccttctatgtcgaattgtcgattatcttataccgcggtatgaatgtaatgtgagatgttcatgttaatcatggctgtaaaatgttattgtgatatacctgaacaatgcagccaccaaggccaatgccttcaaagaactggtggaagctgagggctccgacgagtggcctgattgacgacggcctcagtgatgcgcctagcgaaaccccgatgatcaccgagtgcaccaggattcccagctccagaacctgcacaatcacaattcttttgtcagttattcttcgaaaag

SEQ ID NO: 14549 - DNA, 6291 bp, Oryza sativa
agttccatattctagtgctgttggttctttgatgtatgccatggtttgctcccgtccagatttatctcatgctatgagtttggttagtaaatacatggctaatcctggtaaagaacactagaaagctgttcagtggatttttaggtacctcaaaggcacagccgatgcttgcttgaagtttggcaggactgataaggggcttgttggatatgtggattcagattttgctgcagatttggataagagaaggtcactcataggttatgtgtttactattggtagttgtgctatgagttggaaggcaacgttgcagcctgttgttgcctagtctaccactgaagcagaatacatggctattgctgaagcatgtaaagaatcagtttggttgaaaggattgttcgctgagctttgtggagttgattcttgcattaacttgttttgtgacagtcaaagtgctatatgtctcactaaagatcagatgtttcatgagaggacaaagcatattgatatcaagtaccattatattcgtgatgtagtcgcgcaaggtaagctaaaggtatgcaagataagtactcatgataatcctgctgatatgatgacaaagcctattcttgttgctaagtttgagctttgctcaagcttagttggtatagtggtttaacccaagaggctattcggcgccgaaagtgtttttgtctttgttgtattcagggtgaaggattgtttcatgctacaagaaggaattcgtctcaaagtggagtttgttgagttgtgatccaaattcatttgcacttaataaaggccaacttctgccgtagtggagcggaggcccgtcgccgggaggcttgggccgaagcgaaacggatcgtcatcccttttaggattccaccatatatatacctcttgtaagccgccgtgcggtgtcgacccccgtttttataacaggaatcaatcgtgtaaacagtaccatttccctggatcaagtagtttggtacacacgaattcatagctggaatatcaagtgcacatacacgagtgtctaatacgaattattacatcataggcccgcaggcatagtcttaaatcatcggaccgagaggtccggaatacatccaaaagcagaaatagataaggcagcggaattcaggcagcggcatgccattgccacaggcaacgaccgtactaagacctactggacgccatcgtcttcatctccctcctgatagtaggcatagggatcctccgaggcttcatctcccgcttctgataaattttatatttgcaaggatgagtaccaaccgtactcagcaagccaccacaacaatgatgcacatgacagaggaattcaaaggatggctatggttctcttgcgcaaagcaaattttgtaattcttttcacaggcataagacctagcatagactgatcaagttttaataccagtgttcatattaaacaatgacggttctgtccactatccattgtgatcccaaggatagcttcccgccattgaatcgttatggttttctgaggatgtccaccttcccacctcttgggaagtggctcccacagcataaaattcatcatgcaatattccatcccacacaagttaaagaatttagagtctagccaagtgtaatacatgtctcggtgctcaataaccgcgagcacggctattcgaatagatttggttcactcacactgcagtggatgtacactttacccgcactccgcgactgcccaacacataagcctcgtcccaacacacgagacgcgtcacggcaaagcttttcgataaccccgcattggcagtacccgctccatgaacttaaatcctcatgcactctaggcgtccatgtttctagcagtgagaggagttctggcgctcccgggaaagagaagtctcacacacatattaaattatggttcaagttaagttctctctctcacgcactcatggcagtcctaccaatggcaacaccgatgtagggcacgcctctcggccctacctcaacggctgtcccaccatagcgcacctgcctcactcaggggtgaaccatctatgcagggatactgcctccgctcggctatctaatccgctaggtctatacccattcgagaagtacggttgtacgggggggtcgttttatgcttaacttcatggctcggtccttaattgaccggggacggtactagcctttcccagataccacccaaatcctccgtccgccccagtcgaaaacaattgtttaattttatttatcctttcacaaatcatgtcatcaacgtcatggcaatgtggcgctcatgtctccacatgccgtatttcaattaccttcccaaaggtaattgcccaagcatatagcatttgataaatatgagtatgcatgattctagaatagcatttctaagcaattgtcatagttgactagggactcatgcgtaaacatggttacaaagatttaagggtaaacaataatcaaggcatggcttaatcacaagtaggatgttcatcattgcatgcaattttatttgtaaacaaaacaatttcgcaattaggatcaacatgttcaaggaatagtgatgacttgccttgctcgaggttttgcgggtcttggccttcacctggatccgcggctccctcggtctctatagttacgtgcgagaattgatctgaattcggttagaattcaaataaaaatccaagtaaatccaaatggaagtcgaacgcgaaagtcatttcctttttattaattttactatccgcgaactatggcaaaccccaattttggtttaaattattttgcggttacaatattttgttgtcgtatgtttttaatttaatctaccctagcattatatccatatattaggttagaaatttcttatcgcgagctaaatgtcggacggaatcctaaaattatcttataatattatacgacttaatttagtctatgattaaatataatacacggctaacaccctagtaattaaatccgaatcgctaccgttgatcgattatttatagagattacccagaaataatccacaataatttacgagaattcatacatttgtttaattattaattacatctaaattaataccgcgaattgatttcttatggagagtactaaaagttatctataatctataggaatttatccaattataatttccttaatcctacatttaaatgctagtattttaggtatctaattagtaagagtttatctaaccatattttcattaatcctacaattaaattctagtatttgtaaatattttaaattcccccctaaattcttccccttttctttttctctttttctctccctctattttattttctctctccctctattttcttttctttcctctcttttctctcttttccttttcttttctttctcttctttttctctctccctctctttctttttcttttctccttctctctccctctctttctttttcttttctccttctctctccctcccggttcctctcctcctcccttctcttttccctccctcggttctccctctctctctcggctctccctcctacccgagcggcgcggcgacaaaagaaagagggggggggggaaacagcggctcaccgacggcggcggcggcgacgacggcggcggcgacgacggcgcacggcggcacgagaacggcggcgcgggggcacgggaatggcggcgcggcggcacggaaacggcggcgcggcggcactacggcggcggcacgggaacggcggcgcggcggcactacggcggcggcgcggcgaaaagggaggagatggaggggaatgggtatgggggagaagagatgggttgggggttttatagggtgtgagagggggagaaagagggggcggtgaggggatgcgacggcggcgcggcagcgcgcggggcacgaggcggcgggcacgcggcgcgaggtgacgagacggcgcgcggcgccgcagcggcgacgggacgcgtgcgacgacggggcgcggcgatgggacagcggcgcggcgcggggtgcggggcgcggggcggcgacggcgacggctcggcagcggcgacgcgactgcgggcggcagcagcggcgatgggacggcgcgacgggatggcggcgagcgatgcgcgacggcacgggcgcggggcgcgaggcggcggcatggggcttcgggatgacgtgataggcggcagcggcgacgcgacggcgggcggcacgaggcgcgggacgacggcgatggggaacggctcggcagcggcggcgcgcggctcggggcgggacgcgacggtagcgcggcgcgacggcgacagggcgagtcgacgggcgagcggcgatgggacgggcggctcggggcgcgaggcggcgatgggacgcacgagcggcgacggcgacagcggcgacgcgacgggcggcgacggtgcgcggcggcggcagggaggaggcggagcggcgcgcggcgcgcggggcgcgaggcggcgtggcagaggaggggctagcgctagggaaccacgtcgaacacctggcggccgatgaacagtgacttttcctatttatcccgattttagtgtattttccatataaatttgatttcacaattcctaattttacatatatgcattttactcaatattcatgttatcttaactaatgaattcaccctagattaatattactcatattttatttttatataattttcttgaatttaattagagttaattcttattcctacacttttcgatttaattgatacaattatagtcctaataatattttactcatttctatcctctctaaatattattttaaattgctctttaattatttacttagtcaatttactttttagggtttactcctaactaattttccattattcgcgatttataaactccgagatcaaaattcattaaaataatcgaacaaaatcggcatgatgcaactttatttaaaaagtttttgaaggtccgtatttttagagtttagatttcgtcgtcgaatttttagggtgttacatgcggcgtggtaacctcaccccagatatagtgaagatattttgctggctggcgcccgtggttttttctctcctactttaggagggttttccacgttaaatctcgtgtcttctgtgattgatctattgttttctttatcgtttgttagcttatcgtttcctaacaaactgaagaggtccggcctctgcacctagatgagcctctgccagtaagcaccgaaaaagcaggcagcatggccggaacgcctattggccatttctgtcgtcaccttctccgcgacatactagaggagggtggcccagtcgacccggtgagccgagccgtgcctcacgctttccgcggcgcggtccacctcctcgatgatggacacaggaagaggaggcggctccggcgataggtgcagggtgaggaagcggcgccgacgatgaacacggggtgaggaggtggcgccggcgacgggcgcggggcgaggaggtggcgccggcgacgggcgcggggcgagggagcgccggagcggcgttggcgacgggcgcagggcgtggccgtgatggacgatggcggcggcggcggctgaaggagtctcgtcctgctcgcctgctcggtggggaatttggtgaatggccgaatgggccttcactggagtctaaccattttggacccaatactgtattttttaaccaaaaccagatcggtccgaaccaatttgtctaagaaataagtccactttgattcccttaaaagtgacccgaatctaatccatgactctaaaccacaaaattggatatctcaacccccgaattatcgaaaccggtgcaatttgactcctttatggctttggagggcggtttcggtgacgtggcgctgatgtggcagtgtagacctagtctatagggttgacgtggcgcttaggtgtcatttgaattaaaaacgaatatgtgggactcgtttgtcattcacacataaaaaatgtgggggcccactgacatgtgggacccgttcttcttcctcccctcttcctcccttctctctttctttctctttctctcccctttggtcggccgagccgcagagagagcacgggctggagcggcggcgggtgggggccaaagcggcggaagctggagcggcggtggcggtgggagcggcggcggatggcgctcgccctgtaggccgactgcttcaccagcgacctgagccagctcatcatcgctgacgtgatgtccgggtcagtgccgctcgacgcaagcacgagtatcaggccccccct

SEQ ID NO: 14550 - DNA, 512 bp, Oryza sativa
cggcgacgtgttcttcgccgtcaaggcgttcgcggcgggcgtcatcctcgccaccggcatggtgcacatcctccccgccgcgttcgacgcgctcgcttcgccgtgcggcggaggcaggggcggcggaggcgggttcccgttcgccgggctcgtcgccatggccgcggccatggccaccatgatgatcgactccgtcgccgccgggtactaccgccggtcccacttcaagaagccgcgccccgtcgacgaccccgccgacgccgcgcgcgccgccggggtcgaggagggcggcgccgagcacgccggccacgtccacgtgcacacgcacgccacgcacggccacgcccatggccacgtgcactcgcacggccacggccacggccacagccacggcagcgcgccggcggccgccacctcgccggaggatgcctccgtcgccgaaacaatccggcacagggttgtctcccaggtgagctcatcaccaaccgtcaagctcaatctcgttacgcaca

SEQ ID NO: 14551 - DNA, 824 bp, Oryza sativa
atccaattaaattacagcttaattccaacaaaagaatccaccatccaattacaccaacaccattcatcagaagtagttaaccaccagattttttggggcctatggcaaatacagttccaaatacttcaacaagagccagcaaaaaaaaaaagaaataaaaaagaaagaaataaaagaagagaagcgaagactttgacttttcagaactgcgtggtgtttgacccggacgccccggcgccgtagctgctccggcgcggcggcggccgccggatcgacacgagcccctccgacacgacgctcccgtcgtcccactgccggccgagcagccccgtggccgtgaccgccgcctcgtcgtcctccccgcgcatcgcccggagcgtccgccgcgccatgtcccggcccacgccgccggcgccctcggccaccggcgtgagcgcggcctcgacgccggcggcgcgcgcgagccctcggaacctcaggctcccccggctcatcccgtacagcgacgagatgcagtactcctcctccgcgctccccggcgcggcggagccgctgctcatcagcctcaccacggcggccaccgcgccgccgtccatcagcgcggtcctcccgtccgggcagccggcgaggttcgcgaggatcatcacggcgatcctgcggagggcggcggcgtcggcctcgttggcgcggtcgtccctcgccgcctccgccgcggcgagcagcgtccgcaccacccccggcgtgcgcgcgatcttggaccggttcatcccggagagggagacgtggtacagcgccatgccggcctcgcggcgggcgaggtgggc

SEQ ID NO: 14552 - DNA, 13002 bp, Oryza sativa
ttctctgggctttagtcatcacatatggagcatgtggagcagtgcatgttgaattcccatcatccttcaagtgtaaatttttccttatgcccatatcttctaaatcgagcctcgcagtaacagagtcctttgacttgcctgcgatgtcgagaaatgtaccaagaagggcctcacatatatttttctcgatatgcataacatcaagattgtgtcgtagctttaaattagaccaatatggcaaatcccacagagtcgacctgcgcttccagcattgaccttcttctaccctctttctctttttgttattaggatggttcccaggtcttacatgttccaccctcgccaattgctgcatcaactcatcctgagtaaattcttccggttgcgcacgttcttcagtctgaccattaaaatctttctttctcctccaaatatggtccactggaagaaaacggcgatggccaatgtagcaaatcttgttcctaagtcttttgtagcaaggatttttatcacaacaaacgcaagcatagtagcctctagttactctacctgaaagtgtgctcaatgctggataatcatgaatgcaccatatgattgcagcgtgaagatcaaattctttgccggtcaatgcatccaaagtagggacaccactccaaagatttaacaattcttcaaccagtggctgcaggaagagatccatatcctttccagggcatgtcggaccaagaataagtaggcacatcatgaagttggattgctccatacattgccacggaggaaagttgtaagggataagaaatactggccacatgctatatgaggagctcatcttcccaaatggattaaacccatcagtagcgaggccaagtcggacattccgtgcatcatttgcaaaccattcatactttctatcaaaatctttccatgcctcaccatcagcaggatggctaagctcattgtccactggtttcctcttcaacttgtgccattgtgcctcagctgaaagttctttcgatccaaacatcctcttcaaccttggaatcaaaggaaaatgccttagaaccttttctggaatcttccttcggctatctgcatccttccatcttgaagcaccacatattgggcatgcatcctttttagccaactcctttcggaaaagaacacagttattcggacacacatgtattgactcatatccaagtcctaatgcacgaataaaattcttcgcttcagcataggatgcagggagagaacaatttggaaatgctgaacttaaaaggtcaaaaaaagcactgaatgcaacattgctgattctgtaaaatgacttgatgtggagcaacttcaccacaaaagaaaacctagtatagggaccaccggggtgtagcacctgtttcatctcttctaatatggtggcaaactttgactttgttcttggtccatgattttgatctgggtacagatcctgtaccatacggtacatttgatcatcttctgggtcatccggaggctcattcgtctcaaattcaacattgcagctaacatcttcattcaaatgctcaacattgcagccaatatcttcattcaaatgctcaacatttccagtgacaatgaccaatggttctccatgatgtatccaccgagtgtatgtgttagacatcccgtacataagtaagtcatcctccacacgtcctttatattgatgtaaccgattcaaacacttacgacatgggcataatatcttctgactgccactcaaatttttacaaacaaagtccatgaactcagtgaccccctcccgatgctccttgctaaacaacttacaattcatccaagttctttccatctgttacatattgaaataagacaagcattgaatcaatgactgatcattgcccagactgctattttcctatttctatcacttcaaatctatggtttcagttcaaaatttaaaaccaaaacataagttcttctcatatgtacctttccttcctaattgaaggggatggggcagtctctggtcgacctcacccgccgtcggcagtgatcccaggctagagctcttgggggcttcctagcggttgagcccgtgaagcccagcggccaggatctgcagccagccggcccagccgtcgagatcctagaggcgggggcgggctactgtcgtcggcgtcgggctcttgggggcgttcccagcagttgtgcccatgaagcccggcgtcctggagctgcagcaagctggcatcgagctcctggggatggggtggggcttgggatccagccggcggtgccgggctccagaagccgcgttgggcgaagggcgacggcgtcgagctccaacagccgggcgctacgttggggacagggtggggctacagcctgcggcgttgggctccagcgggagcaatgggaaagggcggcggcgtcgggtccagcaggcgcgatggggaaagggcagtggcggcggcgtcgggtccagcagccgcgatggggaaagggcagcggcgttggtctttgctagatgtgcgttgggattcttatgtctcccagcaatagtctacaagatgaaaagaatcaaagattagctcagtggtttgtctgttacctgggatgccagaggtcgtgtgttcgatccctcctcattgcaagaagcgctacatttttagtcttttcaagttaatattctaacttacacatgggtcccacatgtccacctagacatgctcacgtggctgtgccaaggtgttcttttttaaaaaacaaatgatttttaaattatgacaatcatatttattcacttttgtcatgaactattgtcacaaagaatgggaaaggcacatggtgacattttcttatgactaaattacaacttagtcacaaacgcttgtcatccaaagaaaaattgtcataaaggcatcactactgtgactaaaatgtgttttgtcatatgaattttgtcatagaaggccaaatttcttgtagtggcagggggcggcgactccgggttggcgaggctcgcgacgaggccgactttgccaggcgcggcatcgaggtagggcatcgggcagaggcggcctcggctttgtgcagccttgcagcgggatttgcgggcagggtggcgttgtcggcttggaagcgacgacctcggtctcgcatgctaggtacttgttgaaaagtccagaagggagagagaggaagaggagagaaaactgagattttgagggaaaattttggaataattacattgctccaaagcttgtgcaaattttactggagcttaatgtggtcatttactttatttggtgattttctgggatttttcgcatgtgtagattattttttgaaaattgaaagaagttttacgatttttatttcaatttgaacaaattttgatgttttctcctttttatttgagatgcagataactgattggttttttttgttctatatatatatatatatatatatatatatatatatatatatatatatatatatatatatatatatatacctaataaaaaaaatacgtaaggcttccttcattatttttggtccgtcgccgatttcccacacacgcatgcccccacccaaaaaaattcccaatcggaattcaatcatcttcacaatgggaattcaatgaaaccccccgaatcccaatcgcactaagaatcggatacgggacacaccttccaacatcggcacacccaaatcgcatgaacacaccgcaagaaaaattcaaccaatctttatccccaaaaaaatcatcccacatacatacatcacaaaactacacaccctcggccgtcgccgctgtcggcggatccatccgcggccgccaccgacgccgccactgccgacggatccatcgccgccggatctagggcgggagggaggcgacaggggaggagggagccaccgccggccatcagccgccgccaccgctgacggacccacctgccgacgccgccgacaccgccatcgccgccggatctggggcaggaaggagtcgagaggtgagaagggagccgccgccgccggatccacccgcggctaccgccgccgccgccaccaccggcggatctgccgcaggagggaggctagagggggtggagggaaccgccgccgacgccgcccctaccctcggatccgccgcaaccgccaccaaccggccgccgccgacccgagagggagaggaggagggggggcgccgccgccgtcgctttgagagaggggatcgggggcgccgctcgccggtcgctgctcagcgccaccgcagccgctcgggggaagaaggggggggcggcggcgccgccgtcgtcgctcggcgagggggggggagggacggggggaggggggaaatgaatcctagggttagggtttgggtatttttatttagcttaggattaatctggactgtccattcgatcggacggctccagctgctcccacgtcgggccgccggcctattgggccaccgaatggaggacgcaaaatagacttcaatggagaaagaaaacaggccagacacatagaatagacaaaagggagggaatataaacttttctatattcggcccaaacatagaaaggaggattttgatttttttttccaattaaataatttgttaaatgatttttgtattattaaaaattagcaattaagctctgataattccaataaattccaaagagcataactaatcatggagaatttaatcaaattaaatttaaccatgtcattttatttttcacacttgctttacttgtaaattgatttaattatacacctacctacttaaaaataccaaatattttaatgaattacataatgtaaattttttttaactttttctcaatttttttgttctgtacacttcccgttgcaacgcacgggcacctttgctagtatatatatatatatatatacacacacaaacacatatacacatgttttgtttttctcaattttaatttaaatatgcaaaaatgcaatgatgcgtagaaaatccaaaaaaaacaaccaaaataaattttcaccacaataaatataaatgaaaaatctcattatattgactttctaaggtttttgttttcacaatttgggtttgttacagcttggctgatcggcgagctatctaacgctaacgccttctctcctattctcccttaccctcgtctccagccttgctccctgctggtgctgtgggcatcgcgttgctactatcgtgaccagcgtaggacctccttgcatcccaaccaccggtgccaccatctcctactagcactgttgcctctcttcgcatcggctggtgtggctctgctcaaggtacggagcacgtgtgtgtcgtgaggaggaagcgcacacctacataatcgtcaatgaacaccgcatgagttaacttctgtggcaaactttattttttttatagtagtatataataagataagataaatcctacttcctccatttcaggttacaggacgttttaactttggttaaagttaaactacttcaagtttaactaaacttatagataaatataatatttataatatcaaattagttttattaaatcaatgattaaatatatttttataataaatttatcttgtgttgaaaatgttactcactccgtttcgaaatgtttgataccgttgatttttttagcacatgtttgactgttcgtcttattcaaaaaattttgtgaaatatataaaactatatgtatacataaaaatatatttaacaatgaatcaaatgatagaaaaataattaataattacttaatttttttaataagatgaatggttaaacatataataaaaagtcaatagtgtcaaacatttcgaaacggatggagtattatttttttaaagccagctcaaaacgtcttaaaacgaagggagtattctatccccccccccccccccccggcgcccccccccccccccctatcttgtacatgagttacctacatctcccgtgccccgcatcaattgtctcgtctacgagcggcaccggacgacaagcagggcggtccagtggcctcctctcgccgccgccgtcaacgactccttcccaatcccggccttctctctccctggtatgcacagggcacagcagcagtgccggcccggctctcaattctaattttgcccctgtctcctctttcctgcctccctcaaggttgctagctaatcgagattgatccaggaacggcccggggcggagaattttggagccatgggttttccttccagtttcacggcattggtgttcgccctactgcttaccttcctacagttttctaaggctgcaaacagccactatcttttcaacaaaaccagtgctttggaggcggccgacgtcaatggcaacaatagtgcggaaatcttggctgctccactgtacccggtgagtcatagttacctattggagattgctgttgggtctctgggcaaaactagacttgtcagcttcgacacagccgtcaacatggtatggctgcagtgttcagattattgtagggattgcaatccctcccaagttggtactagtactacgtattacaatgctagcatgtctataagctacaatcctctgtcttgcgatcacccactctgcggtgccggtgacaaccatgaccaacaagtattagctgagtgcatggatggcacatgtactttcaaagtcgattccttggacaataacggcggctgggtacaaggcattctagggtctgataggatatctatttcagaccatttcttcttcctttttgacaccaacatcatctttggttgtgccacggtagaccactcaaaatataccttagatcaatatggtagtagtggtgtggttggcctgggcctaggtaaatactcactcccacagcagatctctgttacgagattctcctactgcttgccatcctgggttaagaacgagcttttctcacctccctacgtgctatttgggagcaacgcggtgctgcagggcgatatgacaccgttcctcccagggtttcccaagtactacctcaagctcgaagggatctcctatggaattgttcgtcttgacatattcggcagcaatgccgctgccgccgaccaatatcatcagcaggcacaattttgtcgtggaccttaccttccagatgctcagttctatgccatgtcagtcgagtcggcaacatttccgctcatgctgccgagtcgcgcatacgagctgcttgaaaaggaatttgagcaagacaatcctcttcttatcaagtctcgcctccaacccatgaacacttgctacaaaggcagtgtcgacgatattgctgacaatgccactataacgctgcatttccatggtggcattgatttgcagttgtccaggaatgccacctttatggagatcacctccatgaatggcgaccaagaggagcgctatgtgtgccttatcgttgacaagacggtggatgggacagcggtactgggcttatcaccccaacttgaccacaacataggatttgatctggagaacaagcagatctcaatttatcgcaagatatgttagtttgtccccttattaattacattgttaattttcttctactagctaattagactcattgttactgtacttttctgcaagcaccattcatatctaatatatgcatgctgatgaaatgtaataatgactatgactctcgtagcttttatttttttattaatatcacatagcttgccaattcatgctgggcaagacatgcaggttgttacacgcattgttgcatattgtactacacaaacccatttgatactggatgaatttgatttgtgtggtgaattgagaaatccaaaaaaactctcacaatctttacagctgctgatgagcagtcaaaaacatacatagaagcttcttatgttttcaaccataaatcaagctcattatttcattaatagtaagaaggatatatatattctgtgtaactcaaaagcagcaaaacatatatggataaataatgcagcaacttatgcaggtctttgcaacatttatctgttaagtagagagacaagaaaaatattattgcgctactttatgcgtaagggcattgattatttgaactggaagcatgaacacagtgaaacactgggtttgttcatgcaagcaaaagacgtataccttaatttgctgcatggccacattcacatggaactcaaaacctcattcactgtgccgcatgaactccctgttcttcttcatcttctctagcaggtagggagccacctcattatcgaactgcctgatcgccctgtcatatatagcagcgatgatggccgctagtccgccaccaccggtgcatcgccgccggagcttctctatgaaggccatggccgcggtgtagccgtgtaggatgttagagttaatcttgttgttttgcatatttgtgagtcggtcgtatccagcattggtttgtgcaagttgtgtacgtgctcattatctcacattggttagtggccaagagaggcagccatgatgtgagtgtttgtgcgaccaggtgcttggtcaattcgtggagagtgcttaggagcaaatcagccgatgcatgcattagttagtttgatcacacgttggcttggagttatggccaagtcaagcgaatgagtcatggcgagaagagtggatcagatagctcatgcatgtagtgattggtggtgatctgcatgtagagataggtgctttgagtgtagaaaagtgaatagtggccacgggagaatttggccgagtcgtgcagccaaacgtggcaaaacctgtgcgtgtgtgtttattatttaaacgatgtaatcagaggtgggattaaggagtgtggtgaagaggtgggattaaagagtgtggtgaatagaagtgcagcagtgtgcgtgtgtacatttgctgctggtgtgcagtgccgagacaaatacttccattgtgtgtgtgtgatcttgtgttcgagctaacataggagactgcattgtatcctcaaacccgtgggatgccgtaggtttggtgttagatctcgtttttgccccagagtctcacgttgaactgtggatcatcaatagggcgacgtcgagaggtacaggcagggtttgatctatcggaaagaggaaaattttaagggtcagcgaaattacgaaatttctaaaattttggattttttttccggaaatttcatacgaaatttcaaacaaaatttgaatttgcacataaaaaaaattggggaaaattgacctacacctcaatggagtagcagagcgataaagggaacataggagaatgaaacagcgagatgcatgatgcgaggtcccgcccagcttggactgccgttatcatcgatgcaatgcgccggagagtgcatccgccgctgttcaagccaacgggcggtagagtgctgttgttgcacgttgccagatcgagagccgctgctgtcttcgagccggagcaagcctgctaatggtcttgaatccactccatatccaaacctaaccattcgaatcacagctgcttccccagaccaaaccaatccacccaccgtgttctgaaacccaaaccaattcaaccaaaataacatttcccccaaaccgaaccaacccattttatatttttggctgaaaccatttccaaaaaccaatccaactatcggaggcgctgccgtcggcgctcgctcatcctattgatgttgatcatcagacaaagaaaggaatgaaaattgatgaattgagttacatgtatgagttgtttccggacggcctgaaactcgtcgttccttgatgagcagagcatggttgagcaactcctttgctcgcatatcatccatcatattatctttgtcttgctctagcttcttctccacattgtcttggtcgagctgcttcgacgtcgcgccaagctccggcatcttctaagtggcagcgatggccgagctccggcatcttctcggcggcggtgatggcagccttggcagggatgcggctcctgctcattgggtagtaccagcggcaacgacggcaaactgtgttgagttgtaatccaaattcatttgcacttaataaagaccagcttctgccgtagtggagcggaggcccgtcgccgggaggcttgggccggagcaaaacggatcgtcatcccttttagggttccaccatatatatacctcttgtaagccgccgtgcggcgtggtaacctcaccccagatatagtgaagatattttgctggctggcgtccgtggttttttctctcctactttgggagggttttccacgttaaatctcgtgtcttctgtgattgatctattgttttctttatcgtttgttcgcttatcgtttcctaacaagtggtatcagagcttgttcccacattagggtttcacgatggcatcgatgaagtatgatctaccgctgctagactacaagacgagattctcgctgtggcaagtcaagatgcgggctgttctggcgcaaacttcggatcttgatgaggcgctggaaagtttcgggaagaagaaatcgactgaatggaccgctgaggagaagcggaaagatcgtaaggctctgtcgctgatccaacttcatctatctaatgatattttgcaagaagtgttgcaggaaaagactgctgcagaactttggctcaaactggaatcgatctgcatgtctaaagatctaaccagtaagatgcatatcaagatgaagttgttctcgcacaagttgcaggagagtggttctgtgttgaaccacatatcggtctttaaggagatcgttgccgacctaccgtcgatggaggtacagtttgatgatgaagatttaggtcttttactgttatgctcactgcctagttcatatgcaaattttcgtaacaccatacttttaagccgtaatgaactaaccctagcggaagttgatgaggcactccaaaacagggagaagatgaaaggtatggttcagtctgatgtgtcgtcctctaagggcgaagcattgcaggtcagaggcatatctgagcagagaacctacaacgatagcaataatcatgacaagagccagagtagaggccgttccaagtccagaggtaaaaagttctgtaagtattgcaaaaagaaaaatcatttcattgaagaatgttggaagctgcagaataaggagaaaaggaaatctgatggtaaggcttctgttgttaccagtgctgaaaactctgattcaggatattgtcttatcgtttttgctggttgtgttgctagtcatgatgaatggattcttgatactgcatgttcgtttcatatctgcattaacagagattggtttaattcttacaagtctgtgcagaatggagatgttgtgcgcatgggagatgataacccacgtgagattgtgggtattggctccgtacagatcaagacacatgatggcatgacacgcacgctgaaagatgtgagacacataccagggatggcgagaaatctcatctctctcagcacacttgatgctggaggatacaaatactccggttcaggtggagttgtaaaggtatctaaaggttctctcgtttatatgattggtgatataaattctgcaaacttatatgtccttagaggaagtacattacatagttctgttaccgctgctgttgtttctaaatatgaacctagtaagactaacctgtggcatatgcgtcttggacatatgagtgaacttggtatggcagaattgatgaagaggaacctgttggatggctgcactcagggtaacatgaagttttgtgagcactgtgtttttagtaagcacaagagggtaaagttcaatacctcagttcatcgcaccaaaggtatacttgattatgtacatgctgatttgtgggggccttctcgtaagccctctcttggtggtgctcgttatatgcttaccattattgatgattactctagaaaagtgtagccttatttcctgaaacataaagatgatacatttgctgcttttaaagagtggaaagtcatgatagaaaggcaaactgaaaaggaggtaaaagtacttcgcactgacaatggtggtgaattttgttcggatgcttttgatgattactgcaagaaggaaggcatcgttaggcatcacaccatcccgtacactccacagcagaatagtgtggctgagcgcatgaacagaaccatcatctccaaggctcgttgtatgctgtccaatgctcgcatgaacaagcgattttgggcagaggctgctaacaccgcctgctacttgattaacaggtcgccttctatcccacttaataagaaaactcccattgaggtatggtctggtatgcctgctgattattcacagttgagagtttttggatgcactgcttatgctcatgttgataatggaaaattagagcctaattctattcattgcttctatatctggtgggaggcgcgacttacaggtcatgagttatagaataccgacctgctgaacattctgagcatgagtgtggtgtcaatgaatccgttatgtttacccgacaggcttgcccacagattcataccaatgcgttctgataccgagcctgatcatgggagctatcctgcgtaaccgtggatgatcaggaaactgaaattgttggtaatgatgttaatgatactgtttagcactcacctcctgttttgcagccacaagatgaacctattgcacatcgcagaacaaagaggagttgtggagctccagtccgccttattgaggaatgtgatatggtttattatgcttttagttgtgctgaacaggtggagaatactcttgagccagccacatacactgaagctgttgtttctggagaccgtgagaagtggatctcagctatgcaggaggagatgcaatctcttggaagaatggcacatgggagcttgtgcacttgccaaaacagaagaagcctgttcgttgtaaatggatcttcaagagaaaggagggtttatctcctagcgaacctcc

SEQ ID NO: 14553 - DNA, 750 bp, Oryza sativa
ttgagagattttaaggcgtgtatttatctgaagaatgccatcaaaggcttctatccccacagctgttatcccattgccagaaaagtctacctcttctgcactctgtgaatacagagaacaactcgttttcaaaaagtattcaaaagagctagtatattagtaaggaaaaatcggtaagaaagtaagcatgtactcatgctcatatatggattgcaaccaaaacaatatatgatatatcggatatctgaccttgttataggctaagctttctgctagaaaaaacagaccctcatccccaaattgacgacctgccgagtaagtaaagttttaagtgtacaatatgcaacacaaatctgaaggctcagagcttggtttcagcattttctttcaaatattttaacttaagtacacatagactctagttacctgccatgttaacatttttcagagtcctgatttccttatagaacttatttaaattcttccttgattccttttcagcattaaagcttgcagatgttgacaaattggaaccagcggcaaaggaccacatgatcccagaaggggtagattctccagaactctggtcctttgtcttcccgggaagcaaattctgaaccaccctccatatgactgtcctctgaaacagagagttagtattgattccacacaccgcagaaaaaattacatgctctgtaacataacgtgataaaaatatgaaaagttcggcataataatccctctgtttca

SEQ ID NO: 14554 - DNA, 1756 bp, Oryza sativa
  unsure (1)..(1756): unsure at all n locations
ggtggtgtttgtggcgataaaatatttaattcgtcaagacttatcagcttttgactcccccctttggtttttaaatagatagccccnccagtctcttgggtcaatttttgaaaccccctaaaccaaatacaaggcaccggtccccttaccccattgtatcgtttgccaaccgatgcgccaagtaaaggaactctttatttgtgggaatccggccataaaggcactcacagctttcccttggtttccccctttaaaaaacaacccatcaagccccgccatttttcttacaacaggttgtaaccctttttttgcatggatccagaccatatgtcattcctcttaaatactgttggatccaagccaattttcctattccccaccccagtgttgccagggttgtttttaaaaattcaagtttggtatttaaccaactttgggatttgcccttaagttaagtcaaattttttttcatcacaagccattttcttttttcagctcaaagacagatgcatatacaaacatttcttattgaacagttgctttcatatgagctattggccaggaaggattagcagctatgagattgccatacttttctgctatcataacagatgcaaccagcctactatccctcctaggtggacaagcatgcaggttgtcaaaggttactatttgccagctgtctgacctagaattcttggaaagcagacatacccagggacaactttcccaatcacactttgccctaaccctttgcccatcatccttagcaaagttgatcactttcctctctgcaatagcatatgttgtaatagctttcttgaattgcttcttacaactgaatttcatccccaattcaaatttagggaccccttggctcttcttataccttgcttgatggctgccattagtcctcatctccccatcactgccaagttcatcaaatgattcctcctcatcactatctgcataaggggtttcattccctgcctcatcaccacctgtatgcattcttggttcagccttctgaaaaaaaatgtcatctaggttctctagttgtcctgccttaaccttcctcttgacctccttgtaatgtttctctatctcaacagccttttcatcatcatctgattgagcatcatcccctggagtataatcactgtcttcatcactgtcagaaggtgggtggctagctatgggtgtactgtcatatgttggatggttaggaatgggtgcattggcagaaggttgatggctaccacagggtgcactttgacaaggttgatggctagcaataggtgctgaatcagagtggtaaataactatcctcctatcagtttcttcctctgccggttctttacccttacatccactaccatcaacctcatcaacccctttccctttggatacatctatatcaacctccattttcccaccctccttttcactttcaacttctaacttcatttctgcctcccaatcactgtcatcatcagacccattacacaaatcaacaatctctggctcttcaacatatacatctgctatatccaattctcctgtatagtcacacatcagtttgcaagccttatcattagaaagagcacgaagatctgtttgcaaatctttaccaggaaacaaccagtggagcaaagtcccagacatcacattgcaatggtcctttaggtggtccaaaaagttggggcaaagaaacatagtctctttgtgcatatccaaggggtntctattgccagtg

SEQ ID NO: 14555 - DNA, 4882 bp, Oryza sativa
  unsure (1)..(4882): unsure at all n locations
agcgcattgattgctngtcgagctggacaacggngatacagagaacagaagtttacatacggagagtatatgaacagcgatgttcgtgcattgccattgcatctagcatcaatgcacgagcgggaaacacaaagtgaagaaattacgagaaaatcaaagctcgatcacaccgagatatataggcagtcgtgtgcatgatggatggcatcgatcgattggccggtgtgtcggggtcaaattcagttagaccctggccggggcggcgggcttgtggtggtggtcggcggggtagtcgccgtcgtagccgacggcgccggcggcgtggttgccggagaagaggccgccgtggagcatggcgacgtatagcagctgcgtgaaggcgaggatgatgaccaatgccttgagcacgcggaggcgccacccgcggaagccgccgatgtggatcttcttgcaggcgaggccgaaggcgagcgctgtgatggcccaggcgatgagcgccgacgcggcgccggcggcgaggctgtgcgcgccccaggagcggacgtggtggacgccggcgagcttggaggcggcgccgaccacccccgcgaggatggcgaagacgaggaagtagaaggtggcgccgttgccggcgacccccgggtggttggtctcgccgttgatgtagtggttgagattccagctcgcgaacccgatcacgatcaagtacatgatcagattcagcaccagcagcggcgcgatcatcgtcctccctactccggccatctcgtatcaaaatcacaaatcaacacaaattagcaacacaattagcactggtttagctagctagctgagagctactgtgattaagtgaggagaaaacgtgctggttggtggagggatatataggcggggagaggggtgacacgtgtgggtggatggggatggcacgtgtcggcgtgtggcaaggggtaggggggacacgtacgcgcggggccacgccacggacgcccggcttctggtgatttccggagaggcgcgacgcgagggagacgggggtaaagaaagcgtaaaaaagtgcagcgcgcgcggcgtcggcgtgtgcggaggtggcgacgcgcgggcgggagatcgaggggaggagaagcagatggttccggactttcgccgcaagcgcctcggctcggggtcccagagacggcgtacgtggcgggcgtggttagagcacccgcaatgataaagtaaggtgctatctataaaacatgtacatctcagcaatagattcgattaatagtaaaccaccttaatagtatatctacattggtatctataaatctctcatgcattgtctgttttttctcaaagactttctttagttaagtagaaagcttggtttctttcttcctttaatcctttccaagtagaaaattatgctgacatggatttcttgtaagaggttattgatacccattgtggttgtccttaccggcttattttgggttaaagtgtgcgtggtttaccttattctggcgggtgtgccaccagaggcaagggttagctgcttgttttggttttaatgatgatggtgttgctgcttcttttttgttcctcctttctttaaggcctagtgcaaatgtgcttccctgttttgggtttacgctgatccggcatactcggtacttctattcgtctgcctaagtaatgcagcaatctgaagtctgtattccctgcatttcaaaatgtttgacaccgttgatttttttagtacgtatttgaccattcgtcttattcaaaaaaattaattatttatttattcttttcatatcatttgattcattgttaaatatactttcatgtacacatatagttttacatatttcacaaatttttttgaataagacgaacggtcaaacatgtgttaaaaaatcaacagtgtcaaacattttgtaacggagggagtagttttaagtagtgttgcatacactactatcaaacttttagtaaaatgcttactcctttcgaaatatgggaatattgtgtcttgaaaaagtatttttaaaatcttttaatcacagtatattttatgaatttattccgatacaaaattatgtttagattcacacactgaagatgtgaaaagaaaaatcaaaccgcgcatgttctttttaaccggagacaatattaatatgtgatacttgtaaaactacactttttcatggcctgatcaaatgcgaaaaatttaaccaagaaccttttacacatttgttgtgtccacagtacattcgaatctgtacgtgtgaacaaagctagtataatatttcaacgcaacaagaataacgtgcaataaaattaattaagatataatcagtacatgacaggcgttgggagttgacaaaccgaccgaaatcgaagtctcaaataatgtctcaggacgatgcccagtttgtacggccgtgtttctcttcatctttttacatgttctttaattatagtcggcagttgccacatcgagtcagctaagcaacgataataagcacgcacgtagataataagtccaccaaataagcgcgttatacctggcgactaattaaccccctgtaatataatcgtaatactacaattggtcgcggtcgtacgtgatcggtcaaggcagatccacgcgtacgtacgtggcagtactagcacgactccaattggaccaagtggcacatgttctttaaccaatttaggacatcctcaatgtatagtgtccaaatacttcgtaagatgtaccctttaaaaataggtaatagttgttgaatttatcataaaaatatatatattgctaaaagtaaatagtaaagtggagccatatattacaatagaaaaatgagatagatataggaggaaagatgaatggctgatggagtaatagggaatgaatggaagagagaaattttaatactatttgttaagttcttatgacctggtaataggtctattgctaccagattgtaggagcttcttactacccgatttcttcttacattatactccctctgtcccgggattttcagtttttgcttgcaacgtttaaccactcgtcttattcaattttttttgcaaatataaaaaatgaagagttatgcttaaagtattgtagataataaaataagtcataaataaaataaataataattttaaaattttttgaataagacgagtggtcaaacgttgcaagcaaaaatttaaaatcccttatattatgggatggagggagtattgtggttgcctttaacatagcaatgtgatcaatgcatacttcgctgaaaccgagcatgcacaaacgacacacgcgacaaaagggcttagccacgtgtcgtcaacagggtgattgaatccccatgaacttgctttactgccttcgttataaatataaggccattcccaatccaatgactaggatgatgtctaaactgccacctaggataaaaaatgatgtgacaagtgaataaatgaggaaagagaaggaaaccatgtcttgcatgagacatgatttctacacaatatccaagacatcatgtgagataagtaacattaaatttaagtatggaatagtatgtttgcattggaagagtagtgtataatactagtttcttgataatgtggagtttatagtaattatatctagtgttttaggttgggaatggcctaagggacttttacataaaaatcgtttatatattttagaatgagtataggctgtcgcatatgttcctcaacaaagtaatctaatgatttcaataaccgttattcatttgtccgaatttaccataatggttttatttaggtgtgttggtgtgccattagattgttctttctttttaacaaaaaaactgctaggtttttctagaaaaaaaacgcttcaaattaaataacaattatttgtcagtagaaaccatgcaaatgaatccaattgaaattatgggtgggatcgagccaacgtacgtggagagttttttttttcgtttttagaaacgtattgtggagaatttggatgaaccaatatatcttgcatactgcaaaatcaaagggctgctttcaggctttcagccaaccaaagtatcccggtcgaattaattactgatatcgctgacaggatggcgatatatatagataaaggacacggctagatagagcgcgtgttaacgaaatatcgctaaccagcaacaacacctagcttcctttcaatccgtgcatcaagatggatatttatcgccgtgcctgtgcgtgcatgcgtatgtagcataccactcccttcgttccataatataagggatttttgactttttcttgcattggttaatcgctcgttttatttaaatattttgtgcaaatataaaaaacgaaaagatgtgcttaaagtactttggataataaagtactttggataataaaagtagtcattaataaaataaataataatttaaaattttttaaataagacgaataatcaaacagcacaaagcaaaacttaaaaacccttgagggatttcattgacccgtccccgcatatatattgataccgtttcttgtcccgtccggcccaatagtgtttggggggcaagcttaaaaagtgtcggggtacccgccgccccatacctgggtttggcgggtttaataaaaccaatttgaagttgtttttcctcctaaaaaacaaacccgcgtgggtgggtatatccagacaataaatgggacaaggtgttacccgattatgggccagggtggcccgctttatagaagattttaaaataaattggatattttggcagagggagactggtttggctttcctaaacagcccagataggccccttaagaaaacttcatggggcaaatatttcatatccccagaggccctccc

SEQ ID NO: 14556 - DNA, 1117 bp, Oryza sativa
  unsure (1)..(1117): unsure at all n locations
acgttagatcccctctgtanccncnnccnggncaactgtgtatctcttatccttatcagtgacctcaaatccatcttttccattccaaatggcttcacagtttccagataagtcaatgtacttgttcaacttcttcaagatatttggacatatcctacctagccatccttttgctttgctcctgttctgttgtatcctgacataaaccttggtccttatgccctcaaacatagatatgattggatgtgccctgatgtcaattatccaattattgaagctctcacacatattgttgtctacactatcacaattggaccctatcctaaaccaagctctactccagtgcataggttcagtgctcatcatgtccttggcaccagcaggagttagctgtgcaagcttggctctacaaaagttgaaaaatggtctacaagatgccttggcacacttccaaaatggcttctggaatgcttgatccctatacttcttcctccaattagcatagatgtgtctagtgcacattctgtgctcaatttgtggcaaaaattcctcaactgcacttacaagtccctacattggtaaacgaaacacatgaggatcaatattcatgtatttttgttgatcatataaaaataagtagatatcaaggatgccttaccttttgttgatcaaaaatataacccaaccagctccatgaggaacaatattcaaatcttttttgaaggagtccaataaaccaactccaagngtcttttgtctctttctcgactactgcccatgcttattggatacaatttggtttgttggggtctccttctaatgcacattagaacttaaccatttgcagcaccttttgaaaaaccacccatttaatcctataacttttctggatctcaactataaaacccttctttggaggccttaaaacatacatatcattttttgtgaaaaacggccaattgttttttgaatccaaaaaatagccccccgctacacgaaaaatcctaaaaatttggttggtgtctaaacactttaaggcctccccctccagcctcaataaaactcttatgaaaaatcacctgattcttaaattgtggagggcccactcgcaacattt

SEQ ID NO: 14557 - DNA, 2207 bp, Oryza sativa
cccaaggaaccaaacaatcttgtgtcacaggtatttcccagaggccgaatataaaaggcactctcatagccaatggcttaagaaggttataacaatgaagcgtgccattgtagggctcatgaaaccaattttacaagttctcatcgcccggtgtttgtaactccttgtaatcttagtgtgcaggaaaggtcaaaagctgcggggtagatggtctagtttatgactttatcaccaaaatcgccaagaaagagcacattttggatatgcgcctgtcacaacttcgggcgcattatttctccaccttcagtggtctttgactctgtgcctctgacaccattgacacggttgtggagaaactccctagatatttacataaactgcatctgctaaagttgctagatctggaaggctgtcaatatcacttggacaagaaccacctcaaggacatctgcagcattttacatcttaagtatctaagcctaaggagaacagatgttgctgatctgcctcatgaaatcaacaacctccatgagcttgaggtattggatatccgtcaaaccaaagtgtctgagcatgcaacaaaaaatattgtgctcctaaagctgaggcgcctacttgctggtcaagttgatccaagcacaagtcatgaaatgggcaagccattgcgctcagctgtcttgatcccacgcaaaatcaacaaaatggaaaatatggaggtattgtccaatgtgaaggcttattcaaggaatggagctgagttaaaagaaattagaaagctagggcaactgaggaagcttggtgtggttatcgttaacaacgaaaatcacctcaagaatctgctctgggccatgagtgacctaaaagaatgcctccagtctctttccatcactatacttaaaaccagaaatgagggtgatactgccaacaagcaaaaggtgctaccacatgatctgtacaatcacttgatacagccccccaaggttcttgagagcctaagcattgatggacccccaaaaaatgttcggcttcaaacaatgttcgctaaaggtagcaacgaacttgccaaggtaactctgagacacacctcattgaaaaagaaaaaatctggtccacatcaccatgtttcccaattatgttgcgtcagactccggcaaaatgcataccaagaaaagggagctcactttttagacggaagaattcccacatctcaagaattttcttgttgaagcagctcacgaagactgacatgatcaacttaaaaaaaggagcagctcctgagctcgagaagatcgtgctattccgcaccagcataaagcatctttgtggggtcggtgcccttccaaacctaaaggagctcgagttgaaggaaaacgagcagcttgttctatcacctgaagctggaacagtttccgctgatccagttatacttgaagattggacagactctactgatataattgtacataaagatggagcaacttctgctgaaaagagcgcactcaccttcaagaagaaagaattcaagcatctcaagtactttcttgttgagggtcaccacatgcagactgacatcaaatttgaaggtggagctcctgagctcgagaagattgtcttgtccaatacaaacatagagtctcttgatggagtcgacggccttgcaaaattgatggagattgacttgaagggtaataagaccattctttcattatttgccactgccaatcatattgccaaggtaactctttccgatacttgcctgaagcaaggtgatctacaaatcctcgcgaagaaaccaaaattgtgctggctactgctcttggacaaatcttatgacgaaagccatcttaccttcaacaaagatgagtttcccaagctcaaacatcttactatcacgtgctccaagatctcgggcatcaacttcgccaaggaatctgcctgtaagcttgagaagattacctggtccttcaccgagctagagtctctctctggaattgacaacctcccggaattgaaggagcttgagttagaaggcaaaagtgtccctcttcaagtgtggagagatatcaatgcacataacaagaaacttatacacaagagaacacaggttcaggatgaaccaaaaggaggaccgacactagctaacaagaaaaagtctgcattcttctccatctttccgtccactcatcgctgattcccggtacttgcta

SEQ ID NO: 14558 - DNA, 2265 bp, Oryza sativa
  unsure (1)..(2265): unsure at all n locations
cgcccttgaattcacntctaattggcnnntaccatnncctatatatatattgatgttaagaaatctagatataaatatggaagatgttagaatgacttacattgtgaaatggaggtagtagctagcaagaacaaacaacaaaaattaaaaaggccgataaaaaataatctacatccggagaggctgcaccgttgtagcggcattacgtcgaacgccaccgccgccggccggtgcaagctagctagcctcaactcagtgagcgccggacggcttcgctatccacatccatcgccgccgcattgtccttcagatcacatccccggaggcccggagtcagggggaaaagaatgaggaactccggcgtagggaatcccggcgtaaccgcaagcggcggcggtgcctgtgccggtgcctgtgcctgcttctggtggtggaatcccggcgtcagagggaacagcgggaggcacaccggcgacggcgtaggttcctctttctccccgccgccgccaccgatgatcgggtcgtcctcctccttgctccacccggccaccttcgagttcttcgacgacgacgacgcctcctcctgctgccccggtgttggcggtggcggcgaacgattgccgccggcaccgcccgttgctcctccctctaacgccgccatcgcgttcgtttcgattgcttcctctccggcgatgaataaagtggaagatgaactaaccgaaagtacttacacattacattatctctacgacgtggaaggagttttatatagttatctttgcgacgtaggagtttgagtcgagttaaagaaagtatagtgtttgagattaattcgagtcaggtttaagatagactttgactttgattttcacttggttaagtttattagcttctgcaaattaaattgaatttgatattgcaaattacaaactgttcgtagattttattttcaatttttgaatcttttagttttcaattttaaaaatcaactctctcaaattttatttgaaaattctaaactttttgatcactagcttggcgaacaacatttgttttgtcacgccaccattactggcatggcaaggatttttccatgtcggctaggttggtgtggtaaaataacactagcacagtcaccattggtggcaggggtgaagctaggataaatggtcaccggggtcagtattaaccagggtttatgtttttgatcaaaactaaccagaaatcatgtaattttgatgttttgccgtgggacgaaaagtatattctgagtgaaatttcgaatgttttttgagacttcacagtaaaactagatcaaaacttattaaaatttggtaagaaaaatgtcatatcgctacattggaatccaacactaaatcggaaatatgtcatctagtttgtaattaatgatataagaatatacataatacaggacaaaattaatgacaatacattatgataaaatgaaatgtctacaaatctattaaaaactatacattattaatttgtaaaagacatcaaatgcaccaaagatcatcaaaaccactaatttcttgccttccgttctgctagaaataagatgatactccctccgttttaggatataagatgttttgactttggtcaaaattaaactactataagtttgattaattttatagataaaagtagtaatatttttaacccaagataaatatattataaaaaattattcaattatagatttaatgaaactatggtgatgttgtaaatattactaattttttctacataattagtcaaacttacagtagtataagatatcaagatgcgcaatgccggtgcgggacaaagtgctcgaaggaatacgatgacgcaacaagagaaactcgtggagttgtgggcttccaatgttatttttggatccaaatcccaatcgtatatgtatattcggctaatgtataaattataagtgctagctaatttattgtttgttagtaccgttcctagtcgctatttgggttttgacggaagaatcaacaatattaccggggtctagtttttctcttcactcaacaatattaccggggtctagtttttctcttcactggggtcatggatggcaaaataaagaagggtaccagaggttcgcaaaagatcgtcagggtcaactgacccctatgaacgagtgtagcttcgcccctgattggtggtgtgacacagtaacaacgttgtttcgaaatgtcaccaagccagtcatagccattcganaagaattcaagccat

SEQ ID NO: 14559 - DNA, 3921 bp, Oryza sativa
  unsure (1)..(3921): unsure at all n locations
cctagatatcaaccctcccgaagataatttttatcagaacccgtgaattttgggctcgaaataatattccccccttcagagagaaattccctttaataacttgttgagattgacacagagcacagtcatattcgcaaaatttgcttcccaacctgacccgctttctttttattccagatgttggaagatataggtcagcttctttagtctcacttaatatgtccaaatgccgcagagtttataaataaagcaacttttggtttttttcaaatggacaaccattcatcggtattctaaaaagtggcaaaccagggcttttattcaaaattcatttaaggttagtgttattgacatttggggctagacccatttgttggtgacatagagtgctccttccagactaaggctcatgatttaggggttgttttggacttttggttccttggaaatttttatgtccttaaagctatttcagcctaagtcgggtgacataaaatctactatattttttatctcttacctaattatttgggtgattctgaaggatcaatggatagtttctgtatacattacaattttgaactaggaagcgctgttaatgaagcataccaatctgtcttgcattcatcaattttgaagttctctaaacaactatatataagcttataattgtcattagttcaactttttcgagtactatttttgcaaatctgatgggagttactctcaaatatcaaatctgacttttgccttgagtggcatatacatgaatgtaacctgtttgctgaaacatgcttgataggagttactccagagaagttcgcaaagaataacaagttctggagggaccaggttagcatgtattggtcatttcttggtgttgagaagactagcatccgaaatgtcatggacatgaatgctaatattggtggatttgctgtggcactaagcaatgatcctgtctggattatgaatgtagtaccccatacaatgagcaacacattgcctgttatctatgatcgtgggttaatcggttcttaccatgactggttggttgtttttctggaaaaataaacttttcttttcattatttgtgatggaactaaatccatctatgctgcaggtgcgagccattctcaacatatcctaagacatatgatttgctgcatgctttccacatcttttctcattaccaaagtcggaaggaagactgttcattggaagatatcatgctagaaatggaccgtatcattcgccccgaggtaaccatgccttgtattctactacagagtcaaacttcaaacatagatattattatggtcacagaaacgattttttaatgctatttgtgctagaacagaagttatgctcattggcatgctatgttcctcagcaaatcctagctctagtcatcaagtgttttggcctatcattattgatatatcataaaatagagtagaaatgccttatcagaatatctatatttatcaacaacttgacttcagtgcaaacgtaatgattgatgttttatcgctttgcatagttaataaatattttcccaattcatttttagtaatccacaaaagagattggactgtgtcccatgattctcacaagctaattactgacaacaatatcagattggtgatcactgcagaataaatagtttatctggagaaataagataacatgttatgaaattcaatgatagcatatccttaacctaatgatttgccattcatattattatgaactgtaagctaacagattcacgattcagacattatcttgtgtaggatcaacttttgtgtttttcaattttatattgtttattacataaatatagtttatagagaagatccgtgatctgacaaaattattaatatacagggttttatcattattagagatgagaatgccatcttgtcaggaatcaatgatcttgcaccaaagttcctttgggatgtcaccacacatatgttggaaaatgaggaaagcaagccggagaaagtcttggtttgcaggaagaaattctggtccatcgtttgaggtgtgcttaggcctaaagctgttgtttttatgacctattttgcattcccatttatatcgctgactaaacgtgggtattctgcaccagtgagcggatactattcaggccagttctttccagatgagtgtcctattattgaaaaagcagatgtcattcggcaaaaggaacacagaaaaatacatggaaaagaaaagaggacaacaccgggtttccttcagcaactatttagattcgtatttcagtgcttgagtatatgtcgatttttctgactttaaaaagggcagaccaaaggtgtaaagatgcaagatgactttttcacttgtttgatgacgatgctagtatgtgttatgtactttctaatttctaactagtctaagttaacctaggtgttttagcaaaattttgctggtgtttctgttcttgtatgggagcacatgtggtactactacgactgaacggcatgaaggctaaatttacagtggactttgagggataattatttcattatctgtttaatttgatttattatcctagtttgtatggtgtggattatcaaccatgcgcttgtttgcaatatctgcctactctgtctctacgttgagctacccagtgttaacacatgcaatcgccatgaccatgcatgttccatgcctgcctgtttctttatttgttttttttaaaacaaaaatattagcatgctattctgctatgttccacggcacattgttctcatttttgttccctttttttttaaaaaaaaaactttggagttttaaaccttatgtttttatttttccgatatgctttatatttagctcggattctagttttattttaatttccacatgttttttttcctttgcatattttctgaccgattcttgcatgttgattgttcgcctttttaaaacctgcaacttctaagttcttttcctgatctgctttatgccttttcccatttctgcatgatctgcatgttttattggtttccttcttatgtgtgatattctaatttttgtttactttgttgtttcttattattaaaaggtctgtaggagatgttccattatatcttcacacgcaaaacggaataactcattagcgcataattaattaactatcatctattttgaaaaaagattaatataatttttaaagcaaattttccgtaaaaagcgagaaaatgtaaaaatacaggcacaaaggggagagaagctagagcactaaaaaaatatgtacttcctccatttcacaatgtaagtcattatagaattttccacattcatattgatgttaatgaatctagacatattgtgaaagtcattctagcatttaccacattcatattgatgttaatgaatctatattgtgaaacgtagggagtatattacaaactctgtaactaatcaagcaaatctaatgaaggggccggttccctcatcctacaaatatggatgtgcaggtctccacatccgttaaaatattatataaaataatttcattacgctgcttacagatatgtcaatatgtcaaaaacatgatctccgtaaaatttttttttatgatttttagcacgacacacgttgcccgaaggtgtgcacgtagtaaaactcatgcgctttagaatttaattagaactcctggcagctaatttaattgtgaattcacaattaattaatgaccacatttatcttgttttttaataatggaaaaaagaattccggcctttgcttcaaaaaaagctacaactacttattacaaaattctcttaaagaaaacaaatactcaggcaacagtaagaacataataataaagccaacagacaaggcannnncanttngaaggggccnatccacngagaattcatggga

SEQ ID NO: 14560 - DNA, 2268 bp, Oryza sativa
gcgcccccctctagtgcttctctatgtggggcaacagaaaagagcccacttcggtgtggcgctcccacctttttagttttctttcttccgctatatagcacgagccataatatgttgggcctccaccaaaataatttggcctgtgtaagagttatccgcccctcctctccaccccaacaatgaaggtgggctaaaaacgcaggtgcgcccttttccttcaccccccaaaaaaaggttgggtataaaaggtgcgcactttaacacgaagaaggctttgtttcaaccttaccttcccccgcaaaaattgggccactttcagagttttcttggtttccccatggaagaagaattgaggactccctccatttttcttctttggaagtttttgttgagggcttttcatttggagacagccaccattgcccttccacaattgtcagcctccacaaatccaggttgtgaagcttttggaatggggaaactattgctttccggttccactttgagcggatcccaccttgttctgtgcaaacttttggctcttccaccaaccgttgccatctcctggttctccattggtgcgtgcaatgacatatatgtgttaattgttaacttttgtttccggttaaagaataactttggaatgaatattttttggctttacccttgctctttggagtgtttggtcctggattggcttgtagtgtttgtggtagtcaggctgccaaatttcctcttcttgctgtgagcagaactgcatagtgtgtttgataacactcatctgctggcttggtgaaggattttgctgttgagaacccactgtgccagaaccactagactgatgctttgaacaactgcttttgttgtgcccaacttgcttgcacctagtgcatctaattacagtaccatacttgggcatcttggttggcttgggtggctcatgcttctccctcctcctttcagtttttggccttcctggcatcttaatgtatccaggtgcatttagtggttccctatcatcctgtggccaagcactcattccttccaatggctgaaggcaatgcacatatgtgcttctaaatgcatccacatagtaacaaggtgcaatatagtcatctagcttatttgttctatagaatatgcatgatatagcatgagggcatggtaatcctaagagctgccaatacctacaagagcactccttcttgtccaagtgtactgtaaacctatggtcatggtgcttaacctcaaaactatcacctccattgcaaatagcatggcaaaaagctgattcagtgatgtaaacattaagttttttgagaattcctgggcatacaacagtagtccacttagcaccagctgctttttgatcattgatcctaaccatgacctttctccaaattgtctcaagcattgtgataattggatgaaatctagattctaatatccatctattgaaagattcacataagttattgtcaactgagtcacagttagaacctaacctgaaccaagctctactccaatgctcaggatgtgtgttcagtatagcttgagctccagcttgagtgacctgtgcaagtttaaccctagcaagattaaatagtattatgcatggagcttttgcacacctccagaacttcttttggaactgcttctcatggaaatgccttttccaattggtataaatgtgcctagcatagttcctatgctcagcctcatgtgcccatttcttcacagcattaaggataccctgcataccaaacagaattgcaaaatttagtcagacagatgtagtgaaaggtgacacaacagaaaattaatcagttcaaagcaaatcaagggattaaatacccaccttttgttgatctgaaatgaagaccccaaccagttctgtgcaactttgattaccacaaagcaattagggacccggtccattctcattggtttactggcaacactgcccagcttgaagaaacatcggatggtggcatttcggctttagacacaacaagttttcattggtttccccttggaaaaacaatcatcaggcccacacttttctaaaccagattgaaaactttttggttgcttccaaaaaaggtccaaccttaaaaacggggggaccagcaaattcctttacaaacaaaaggttccaggtgtttttaaaatcaattggaataaacaacttgttttgccttattaaaaaatttttttttaagaacatgttttttatttaaaaagggcttaaaatttcttttcacgggt

SEQ ID NO: 14561 - DNA, 1145 bp, Oryza sativa
  unsure (1)..(1145): unsure at all n locations
tgatgagnataganaccctntgaaganccgcgaatngnngntgccaccttcattctccctttggcttgtcatcttcagcacaatatcatagtagagaccaacaagggaatatgttataggctcccacggtgttgaacaaaatccttgggccttctggttgttgtttgtgatcactatcactgcattgccattggagcaatccaacaggctcaaagcattttttatcccctcccactcggatatgtagcctctatcatcaatgaggatgaaaagggtcctttttctttctagaggcaccttaatcttgtccactatccctttgatgaacagtgaaaatttaattgctgacgatatctccccaaccttctcattggtttcttgtattgcagcattagtaccttttgccttagtgtcccttgggttctcattcatcttctcctctgtttctgagatggcagcatcaataacactattttgatcacgaacaccctgcaggacacctttggctagttccttgacagagttgccttccggaagctgggaccagcgaagcaactcccgaacgatgtctagtgcaatcttgtggttgttgaggatttctttgatgtgatcctcacccaatgtagtagcagtattggtactggtttccttggcgtgtgagggcttagtgtctaggaacaccttctgcaggatgtctaggtattggatatcatccaattgaattgggggcttaggcacgacagattccatgtgttgtttaagcatcatggccgtctcctgcattatcttggtatccgatgatcttnnctatatgctgagcccttcacttgttaacattgagcgcattgccttgtggaacatggcaattgaaaatatcagtgtagctttcaagtacttggttcctccatcttggtggtcttgacttctcagtgtttcattgacttntcatcttggccttaattcttcaatcttgcggcaaaatcaattttcaaaccttttcacatttaataaggggggtaagntggctggaaagctttcgcgtttttggataaactccctttaactttgccggctgttgtgttgaacaaagtttatataggatctcccaggttcccccgaaaaccctggtgggcaatacctcgggt

SEQ ID NO: 14562 - DNA, 5055 bp, Oryza sativa
  unsure (1)..(5055): unsure at all n locations
tcaattcaatttcctgtgcaaacaaggattccttctacagtcacacatgcattgagtgtttgagttgaccttgttgcttgttccgttacggttgtgttacccatttataagctctggcccaagttctccaaagtcaatgtcttgattcctgacgaagtcaagatggcagtaatgctgcacacttgatgaagagtgcgttgtcatcatgtgctcatcttctatgaccccaggcgtacaacaagacctaaagatggggttaaagatgcaagatttgtgcggccnttccttgcttggaatctccacgcaatactcaaacggcggtttgcaacatcgctcaccgggtccctgagctcacgcagcgcaagggctgcgtttcgctggtcatgcatctttcgcacaagccaataggtccacaagatgtagcgccggacaccgccctggcgaaggtggaccgccaagtcgccgcttcgaaggtagtcgtcgacgcagttgctgcagtcgtggccgaggtcccggacctgtttcatccacgtgcggacctgcttgtcgtgcccgctggcgagatgcgccgtcctggacatgctctccatctcctccttgatgaactccacgtcgctccccatgcggcccagcagctgcgcctccttctggaggaggcccagcagcgagctcacagctccggacgcgagctcggccattgttgcgccgccactccaccgccggctgcccggcgtatgtctggctagctaggaagggtgtgtggatttgtcttttcttttatctttatgagctgtgctggtctttcatcaagattgatctctaatgctttgatttggctgtgtcatggtgcctggtttcttttctcctttattttggtggtggcaaccgggcaagcattatacttccatccaggattctttgagtcttatctttagattagtaccatgtcccttactttagttctttgtttattctttttttgcctttggctgtttgtgtttagcatatattgattctaaacatgacgtacatggagaacgctctacatttaggcttaagtggagagtactcatgtttctatagaaggaagaaatcaacttctttaaaaatggaaggctgctacagaacagaactctccataaaagcaaataatcaacttcctacttttgttactaaaactggaaattcactctcttccaagtatgttaaacttttggatggtttttaaggagctcaagtttttttttttttttggccatccattagaataggatccaatggaggatacaatctattaccttgatggaggtaagatcacggtctacctttttgccctattcttactaccgccctgttgcataattcttggtttaaagtgcgtaagacttgcagagtacagtgaattgtttccgataactatcgaggatacccaagcacatgttggtcacacatatcgagtattatcaggattaattcttccgcatgttattttgtaatgaatggccgaatagctaaataactgaatgatttccaataactattcaagggtacaaaggaattagataactattatgaagatgggaaatggattcaaaacaatatcataagaaattcatatatagaatatttttgcaacaatctcactgtttagaagtttgagaaacgtgcatgttaattcattcatccattaaacaagccgggtcctcacattggtggtgctctcccaactttaatttgttgtgacaacaccaaatggaatacctacatctgccttgatgtacatgtggaagaaacctgcacacaggaaaggaacattgcatcattgcaaaatttttttttaaaaaaagtgatatccaacaccaacacatcctgcagaaggtgaggcaaaataaagatggggacttcctatattcctattttttcgcataaatgagagatcatttagaagccgagacagctcattatctaaactagctggaccgagttgagccgtgctggcttgttgtcccagcctaggcaaccaggaaggcacggtactattccattctttgagtatttctttaggttagtactatgctccttactttagctctctggttatccttttcttgcttttgcctgtctgttacagcattgatttcacatcctctgacaaaggaaaacccatgatttttattgtgacaaattaaaggataatgtgcaagaacagcatccgacatggccctaatgtacatgtggaagaaaccatgcgcgcacatgcacaacgtgaggtaccatgataaggagcaggggaaggccaggttagacagcatgctgagggagcaaggcaggtagctagctcagccaactaaaaaaaatttcccctaccattgctaattttattgatgatctaaagctttgtttcaaagtgtagaatggaatggggagaacacctcacacccaatgggaggggtggccatgcattgatataggaagcacatgtacatgatcctcaattagaggagaatacaaggaaagagacaatacaatacaatctgtacatatatggcaaagtattcctaatacccgcccgcagtcgcagcgggaggctcacggacgcaaaggctggaccgaaaatctgtaaataactgcacaggcaagcccttggtcatgatatcggcgaactgatgtgtagacggaacatggagcacacggacctgtcccagagccaccttttcccgaacaaagtggatgtcgatctcaatgtacttggtgtggggtggtgaatcgggttggcggtcatgtagacagcactgacgttgtcacaaaagacgacggtcgcggtggagatgggagcatgcagctcctggagtagctggcggagccaacaacactcggcaaccgcgtgagcaacggcacgatactccgcctcggcgctggatcgggagaccgtcgtctgacgcttggaggaccaagacaccaggttgtcgccgaggaagatgcagtagccggaggtggagcgacgagtcggggcagccggcccaatctgcgtcggagtaggcgatcagagacccgaccggaccggtaccgatgtggaggctggcggagagtgagcccttgatgtagcgcgggatgcgtttaaccaaggcgaggtgaggctcgtgggggttatgcatgaagagacacacctgttgaacggcataggcgatctcaggacgggtgagggtgagatactggagcgcaccggcgaggctcctgtactcataaggatcggcgacaggagcaccctccgaggcggtgagcttggcgcgagcatcaaccgaggtggcattcagacatgccggctcgctacagaaggtcgacggcgtactatcgctgggacaggaagaggccgttgggtgtgcggcggatagagatgccgaggaagaaatggaggtcaccaagatccgtcatggcgaactcattgtgcagccgagccgtgatgtggcgaagaagatcagcagaggaggccgtgaggatgatgtcgtcgacgtagagcaacaggtaggcgaggcgatcaccgtcccggaagatgaagagcgatgtgtcgaaggccgatggcatgaaacccagctgacgaatatatctagcgaaccgttggtaccaagctcgaggcgcttgcttgaggccgtagagggagcgctggaggaggcacacagcgtctgaagcaggggggtcgatgaagccggatggctactggcaatacaccgtctcatcgagggtgccgtggagaaaggcgttcttcacatcaagttgattaatcggccaggagcgggaggtggtgatgctgaggacgacacgaatggtagagggcttgacgacggggctgaaggtctcgttgtagtcgatgtcgtgttgctgggagtagccacgaacaacccatcttgccttgtgacgggcgagcgagccatcggagtggaacttgtgcttgaagatccacttgccggtaacgacgtttgcgccaggtgggcgagggacgaggcgccacgtgccgttatcgatcaaagccttgaactcttcggccatggcagcacgccagttggggtcggcgagggcagagcggtagttggccgacagtggagaaatggcgttgtgggacaccgagagcacgagtcgatccactggcttgagagaaccggtcttggagcgcgtaaccatggtgtggacttgtgaagaaggtgcgggtgcagccggagccacgacttggggcggaggagtcagcgccagtcgtcgttggtagtggtacgggaatggctccaacgtgccggctggtcgtgaaaaagatgtggcggccggacagctggtgacgacggcgccctccttgaggaagatggagacgcggcagccggctgcatggaacttggcatcgtcccgcccgcagtgtggtgcgctacatgtagtagggcaggtgctcgtcctcagccgagggagcacccgtgggcagccgctgctcgacgttcacagggaatggagcgtgcggctgctcaacaccagccagtggtggagcgaccacagaaggagcagtagcaccctgcagtagaaagtccaaagaggaagcatcgacaagatctcccgaaaatggaaactgtctcatcaaaaatgacatggcgcaaaataatgatgcggcgggtggatatgttgaggcatcgataacctttgtgcgaggaggggtaaccaagaaagacgcaaacggcggagcgaggtgcaagtttgtgggcagcagtggcactaaggttaggatagcataaacacccaaacacatgtaacatggaataatcgggaatcttgcgatgaagaagctggaatgggatggagttgtttactgaggacgatggtcgacggttcaggaggtatgtggcggtggctagaccttcggcccaataggagggtggcatgaaggcttgtaggagagggtgcagacagagttgttgagggtgcgaatcatgctttcggccttgccgttctgtggggaagtatatgggcagtagtcccgtaccagtgcncggccntgtcccatcagagntgcaatcaagggcg

SEQ ID NO: 14563 - DNA, 2533 bp, Oryza sativa
  unsure (1)..(2533): unsure at all n locations
cgggtgttgagcgcccaaagagaccagagacctcctgcgtgaaagagtccaaagagaagaccttccacaattctccccaaaaagaacctttctccaccaaatagcacgtgcgcaatataattatgcgcgggtgtgattattttagagcatcgatacctnttgggcaaggaaggggtaacaaaaaaaaacgccaacggcggaaccgaggttcaagttttgtggccacaagtggccataaggttaagnataagcataaccacccaanacccagtgtaacatggaatataacnggaataccttccaatgaannaagctggnattggtatgnnaggtggtttacttgagncacaatgttcnacggtttcagnaaggtatgtgnccggtgncttagacttgcgagccaaatgagaaggntgcaatnaaggccttgtagnananggtgcaanacaaaggttgttaaagggtcggaaatcatgctttcggcctntggcgtttttgtgggaaagtatatggccagaagacctgtaccaggaaccttctacaagtgagaaagaagtgggtgttgtatttaccaaactcggtaccgttgtcggctgaaaacacttgagncgntggcgaacttgtgtgtgggcatactcaacgaactcacggatatggcgatgaacatgggatttgtggcgaagagaaaacgtccacttanaatgagtaaaatcttcaaccatcactaaataaaatttgaagccagaaatgctcataacaggagaagtccatacatcgcagtgcacaagttcaaaaggagaagaggtactggaagtggacttattaaaaggaagacgagtgtgtttccctaactgacaggcatggcaaagggaattatttgtcttggagcgaggtatggcggataaatgttggagagtggtgatggcaattggacccggatgaccgaggaggcgatgccataacgtggaggaggtggcgaggttgcactgggcggcgatggaaggtgcagcggccaggagggtgtagagctcgccatggctattgcaatgaagaatcacgcgcctggtccgagggtccttaatagaaaaaccaaactcgtcaaactcaatggaacatttattgtcgcgggtaaattgacgaacggagagtaaattgcgaaccagagggagcaacaagaacatgacgaaggtcaaatctagtggtgccaatagggagaaaggaagtgccatttttatcaaccggaatagagggaccattaccaacggtgatataagtgtgtgagttggggaggcgagtaacgagtataccatcggtggaggacatgtgcgaagtggcacccgtgttgagaacccatgaattggggctgtgaatcgtcatttgattgagaacggcgacgaggccggtttggtcccaagccggctggacagaccctgcaggcggcggcgaggagtatggcccggtgaaggcagtgtgggcctgaggatacggcccatgtatcctggcgctgggggcacgccagggttgctgctgtcctgcccagggcaagaagcacatccatggtgcggcttagcgtggagcagggatggagaaagtgctggtgccgaagctgttgccgccgttgttctgtccaccatggtggccgccgaatccactgccgccgttgcccccggagttgcggttgttgcggccgccgttcttgcccttgttcttgccgccgttgccgccgccggcgcggctctgctgctgcccaccgctgccagaggagtggcaagtgcccctggcgcagttggagtaggtggtgttggctgtgacgagggcattctcggactggacctgcacggaattggcgttgcaaagctccttgagaactagcgtgttcctcaccgaggtgaaggacgacaagacaggggcgctcgcgatggtgtcggccgtgctggtgaagcgcgagttgacgccacggaggaggttgaggacgagcagggactcggtgacggggtggccgacgtcgcggagggcatcaaccgcttgtaagttcaagtgccttaatttggttttggtgattaatgacaaatctaactatatgagactaacgtttttatgagcctttctttgaataagctcatttggatatgaaagtaaaaatgatgagaggtattgttttaaccttacacaattctacttggtttttttgtgggatccaaaattaagggagcttcctcatgactttattgactttatgggcaattcggtcttcatatcaaatgatggctttttggggggagctattttatatttgttttatagaactttcctggtttgaaataattttattaccctttttatggttattggggttttttttccaaaaaaaaaaaattaaaaacttgttaacaaaggaaaaggggttgggaaaagaaaaacaattttgggttaacctttttaaaatgtgaaaggttttcccaaataagagggggaggccctatatacagctaatgttggaaaacaaggtcacctctttcacttataggcaatt

SEQ ID NO: 14564 - DNA, 1698 bp, Oryza sativa
  unsure (1)..(1698): unsure at all n locations
ttttcgtagtctttacccggtccttggtgtttggtgtagaccggacttgctagatagacgccgtactatcaagaggggtctatcaagcgagcacgtgaatgatcttgtgccatattagttcatatgcatgtaggtacatttagtgggcttgtctagccaagtgtggtgagttttctcaagtcccaaacaaagagagaagtgggcacatcctataggtttgggtagcctcatatggttttgtccggtggagtatcttttggagtgtgagccctttctccctgagaaaagttgtgtttcttggatggattgttcatgggttggagtagaccggatttgctagataggcgccgtactatcaagaggggtctatgaagcgagcacgtggatgatcttgtgccatattagttcatatgcatgtaggtgcatttagtgggcttgtctagccaagtgtggtgagttttctcaagtcccaaacaaagagagaagtgggcacatcctataggtttgggtagcctcatatggttttgtccggtggagtatcttttggagtgtgagccctttctccctgagaaaagttgtgtttcttggatggattgttcatgggttggatagccctttgaataagctttccatagagtacaagaacgtcaaattacgatatccgagtcaagagatatcgccgttttactaacggctggttggctgaaaagtgaaatgcggtctgaccgtgggccttaggtcggtctgaccggggctgttagccggtctgaccagcgtggtaaggccggtctgaccggccccactggtctgttgcactggtctggttttcggtggcgatacaaagccgccagagccgcaaccggtcagaccgagccgacgacggtctgaccgagcggtggacggtctgaccggccactacactgcgatcagaccggccaggttgagtgggctcaatgattgccctgtaacagctagttttctagccattacaaagtagtccagtctgaccggccactctatggcggtctgaccgtgttaacaaccaaatttgataatctgagtatcgaagaagaagattagatcgatgcggaattgtagacaaagatcgtttcggaaacagagcaagattcggctgaaatccaaatcggctacgatcaaagacagccgagttcgagttggacaaggtagccgattaagccgaatctgacaatatgactcggtgtatgtcatcgggttgagttaatgcgcttcacacggattgccacactcggattaagtcctgaagaaggcaattgtatctattaattaggaatagtctgttagtttcctttttatctttaggaaagtatgtttagtgtccgattatgactttatgttttccttttatctttagaaaagtttctttcttgtcctacaaggactagtatccacccatgggtataaatatgtacacccggggtcattgtaaactatccccacagatcaatacaattcggcgtttcgccaccttttaccttttctactttatttatcatccggcggaaattggcacatgacgcggggctgcatcggttcagttcgatctccggcgaaggggtaagtccaatgttccgttggatcaggcaattgtatcatcttcgtcagcgtcgttcaaggctgcatcagtacattggtctacagangagatctaatggggct

SEQ ID NO: 14565 - DNA, 2466 bp, Oryza sativa
  unsure (1)..(2466): unsure at all n locations
cccaccaccacaaaagaagggggtgttggaaagtttgtttttaaggagagacaaacgtaggttnccataagtgggaaaaacacaataaaaccctctggtggttagaaagggttccgggggttcacacaaagatattggccgggccgcggttataagatgataaattattggtttgccggacgccacaaagtttcattgattaacaattagaggttataggcgcggccttcagccgatgttgctttaccctgaaaacagtgttttcatgtaatttgcagccggttggtttaactggattatattatggtaaaataaactatcaacagccgatggctttatatcataatctcatgggacatatagcggagtgttaaaccctatccactatcggctggtatcggcatcggctgggattgctccatcgnctgtcaagccgatcggctatttgatctgctgttatatatcttgtcagttgcaggatcaaactgactggcacgcccgcatctcatcaacctttggacctgcactggagctaagcagatctcccaggccggtgtgttcgatttttttcgtcaacagaccggcagagcacatagttagggatttcgactccaacggctagttttgatggttgggggtatatatacccactccccagcaacaagggtaaggtttttgcactccattgcattatcttgaacccttgcaagagctctcacacccttgtgtacttagtttatctagtgaggtgttatagagtgagttaagcccatccaagtgcattgcttcattgttatagctagtgtggcacttgatcatccttggcaagcatcctagacttgttactcttggaggttgccgcctcctagacggcttgtggaggtgttgcccggtgacctctccgaggagattgtggaggaggcccaacgccgtttgtgagtggtttggagttcaccaccttcggagtgaaggaagaactaccctagtgatcgaggctagggtagtcctcttcgtgggccggctcccaccttgcccaccccttgacgaagggggcgtgcggtggcttcgtggttgagcggtggagttgagctcgccttaacagggattaggaaaccggcgagtttccgagccttggtgaaaaattccttgtctcttgtctcatttatttgttgcatttacatttgtacaatttacatttatagagacatatttgagcccatatcacctaggtttgcaaaacttaacttagttgcttagttaaccttgcacttcaccttgcctagcaacttatgttagttttgtttaagtgccattaagttttaaaaccgcctattcaccccccctctagtcggcctccttgatcctacaccgccgtcttcatgcactgacaataatcggcgacggagagatcgccttgggtcatggagtggaactcgtgatgcagatagatcgcgcgaagctcctttgtggcttgaaagagggtgtcgatggagatccacaagtcccaagccgattgatcgggcttcatggcgaggtcgaggacgtcgtctgcgacagaaccgaaaagccagctgcggaggcagcaatcgggctgttcccaagcagcgtcngggtttgcgggaggagcagcgtcaagatgatcgaggagaccaaatttccacacatcgagcggaagaagcccttcacttgttgtagttggggtacgaagctcgagagaaattggacatgggacttgacggcgacagtcgcatacgggttgatgaacaccggggcgacggtagaggtggaagacgacgccgtagaggagtcggtgncagcgaaggtagccgagnaagtgnacatggtgaggaaggaggggcgcancagccaggnaggcggcagcgctcggtggacgcagcgaccagaggaagcggcgctagagcagtactagaagaggagaaaacttggaatctgataccatgtagaatggaatggggagaacacctcacacccaatgggaggggtggccatgcattgatataggaagcacatgtacatgatcctcaattagaggagaatacaaggaaagagacaattcaatacaatatgtacatatatgtcaaagtattcctaatagtaagggatcatatatgctacacaggggaatctagatttcaatcacctgaaattttacaaaatttcagtcacttttttgctgccactagatgtgcaacctacggttgatagcccttcacttcagtcctgtcttctcagcccagatattcttaacttgtgaaatttctatacatgtgttgtgtaattcctatacatgtattgtaatctttgtgtactagtggttcgctagagcagaccgacagttgggatcacttcctaacttacaaaattgttcagagaagttggtcaacaaattgcacagaacaaacatttgcatgataagtccatacagttcaaaaaagctatttcaag

SEQ ID NO: 14566 - DNA, 963 bp, Oryza sativa
aaaatttaactcgtagattcactcatgagttaaaattttactgggagttaaattttaactcatggtgacgtggacgaatctcggacgtccatttctcgatccaacggtagtttccaagtttccactacatatgtggtttgcactacatattttcccctgctaatcatcacatccaacaaatatcatctataggttcttacaagcaatcaagattgcattgaaatctacactcactactgaacatgggacagaaaaaacgttctacttctaaacaagtcaggactcaagattacctctctatatactctgatgcaccatgcttgaagtgagtaccacctccaggaaaccaccaaagcttacccttctcgtgcacccagttctgtcctccttttacctcagcaaggcgtgaatggttgacgttactacgccaaacatagtcccgacttgttggccatcttataggtatcttgtagtcatttggtgggggcaccaaacagaacaagcgtttctcttgtggtgggcaaatactttcaagatcctcatgcctagatctatccagtttctttaattggcttatataggatgcgtcgtgacagggaatatactcgttgtatttcaaaggacaaacatcaactccataatctggaactgagattggttttgttcgataagaaagagagactctgtttgtaaactttggagcacctgcatatgaaaatcaaacagatttaataatttagcatggaaataatatacaacaatacaaattaaacagtgggcttgggtctaggttatgtccactaaaatgtatactgtaccatcaatacaaactgcagcacagagaaaaagagatcagagaaattcatatctaagacatacagaaatgtgtcaagatctaaaaaatataatgtcacgaattatgaactgaataggagtggcctgcactcttttgattttctatac

SEQ ID NO: 14567 - DNA, 2676 bp, Oryza sativa
ggtagcctaaagccacgaaccaaactcatactaagagtcctaaacaccttagaaaaccctctagtacaagaaagaaactttacataaccaattgtaccaaatttggactccttccaaattcgactccgcatcccatacgcacacaatacctccatcgtatgccatatggaatcttcaccaaccacgtgcatcaactctagccttagtatcctgcgtgatatctgaccaccacggacatcgtctttccaccaagccgactcccggtccatcaccgcaaatactctcccgaggcatcgagtcacctacacatgaaacaaacaaagaaactatattccgagaccaagctatctccgacttgactcattgttagcaaacaacagtattacatacgtaaagtatccatctagaagccataaccatgaaacaatcacgaatatccaaagaaacaaaccgaaaccgaaaccgacacagcgtcggccggtcagactgcgggcctgccggtctaactgctcgattaccaccggtctgaccggcatacaccgcccggtcggaccggtcacatgaaataacagtgaatccgatcatcacctgaaaattgattatctccaaaaccacttcgacgataatctccaaatatcaaaaccaataatcacagatgccaattgttcatcacagaataagaatcaaaacacactttgatcttacataattaacatgatagactgcgcgtaggttgttaggcatatatatgttgatatgtaggtctcatcagccttccgagggatgcccaaataacagtacgtatattgcttgcaacaacgagatgacattcacacaggcggcgtatatatatggttcgtcaaaagggacctacaaaatactcactccgtttcatattataaaacattgtaatttttatcataatcaatctctttttaaatttaattaagtttatataaaaacatagttccgcattttcaacactacaaaaatattatcaaaacatatttaatgaaactaatttggtattttagatgatgttaaatttttctacaaacttggttaaacataaaaaagtgcgactagtaaaatagtataaatgactttttttttgagaattcatgcattttatttaaaagagaaaatatcgtttagaaacaaattgcatgagttatagttacatctccagtgggactactggtaagtgctagtttgacaggacaaacacccctttgacaaatgtgagaaatatttgagcagtcaaatagtataaatgacttatagtatgcaacgggaggtaatagatactaactctattttggttttcatcactcttgtactagcatgtactttcatcttataagttgttttgttttcttttctagtacatcaaactttctttaagtttgactaagtatatagaaaaacatagtatctatatcacaaaaaaactcttttttcaattttttttgtgaatttagtcaaaatgtattcaatttcagttaaaatttcaaataatttcatgtaaaacagttccaaaaatatttcagtgaccaccgaaatttcgaccaaaaccaaaagtgtaaccctgcttataaatgtacgacgatcaagaagacagggaatggtagccatagaggtggagcgagctagcagttgagatagaggggagagggagattagttgagagacgtgggaaaaaaatgcatgtgatatcatgcggcttcccaacccttgtatagctccccacctgtggagattatggatatcccatatctacacggcgatgatatttggactggatataggataccgaatatatatagaatatcttatttgtatctcgggttcgtttcttaacttgtacatcaaggaaacaccttgagacttagtcggttacgactgtattttacctgtatctgcatattccgttagggatatagattatcttttgtaacacggactccttcccatatataaggggggtccgggtgcctctaggggcagaggttgattttctccaaatcatacaatcaataatacactcggcggattcatccccggacaggagtagggtattacttcttgaataagaaggcctgaacctgtataaatcctttgtctccaaacccatacacttttccagcttgatagccacccccttttattattgccgaaatctagtttcgacagttggcgcgccaggtaggggtagcgtcaagcttttcgccgatcagtgcaatgggttccgtctccggcatcgacgacctcgtcttcccacccggggagacgtttcggttcggcagcctcgacttcgtcaccaacaacttcggcaagatctctctccttgactcggtgtccgcccagtcgggagagaaccggctttcagtcccgtttggactcccaaacgcggctgaaagttacttcaagaccatctcaatcgagttggcttcaaaccactcgggcgagatcgcatcttccccgccggatcaagatgatggggcttacccaccgatcctaatgaagctccccgacgattcggcggccgcctccatcacgacagcgtcttcatcccgtaggcctaggcggaagtcggcttcaacaccgatttcgcctagcttcagggaagtcggcgtcatcctccaaccactcggcacggtttcgacggatcagttg

SEQ ID NO: 14568 - DNA, 1301 bp, Oryza sativa
tatgctgctgctggttgtgtgacctttgctgcgattagaggaagggaaacagatgagattaaaagatgccttgatattatatgtggatagtatttctacatgggtgtgctgaaaagaggatctttggagcagagaattgaatacaacgaaatgttgttgcagaaagtatacatcccgtaatttctgcgtatattttcgatatatatatagcgcggaataatgaataatgatatgcgtgaagtatctatgtaattcattaattacatagtgtgctcgttttgatttgtatccatttttcagctcatttattttgacccatataaaaatgtatagataatctgattcctcaattgatgagttaatctttccttggctccagatgtgtgtagcgagttagggacgcacattgttttagatgatggaaatagtttacgtctccggtatctgtcgacatgcaccgttgcgcacacacacagtcaataagttttacagttgagaaagaaaaagacaatatcaagtaatgggacaatgccccaagtgctctaattaaaaagataaccattatatttaaattaaaatttaagacaaatcatacaaatttcagcaagtaattttataggtactataccattcaaagcgggaaaaaactttttactaccaattttaagagagtatagcaccactgcacatagatcccgttcctcctgtgatagcgtcaaagtgcaattgcgaagctatttagtagacatgaagatattatgaatttgaaccttgattttgataaaaaaaaactagcgattctgactagttaatgtttattcttagggtgtgttcttatccataaaaaatattatggatcgatgcaacagtacacttcccaagctggttttaacgattctacatgaatttcttaaaagaaaactatatcaaatctatttgttaactttgtaatagttaatttattcgtttgcaccatcgactcacagaatcatttaagtactattcagctattcgagaaattaaaacaagcctcgagggattaatttcaccatccttgataggtactaggaggtaccaattcttttttttttaaaaaaaatattgacaccttttagtacttatagtgtagaatttataaattctacacactagaaataaaatatagttactctcggtatcctctcaaaacaaatgtaaaatttctccattaatttgtaggatcgaatcacaagaactaagccaaccagatggggggggggggtgaatggttggtatacccaaaaaccgaaaacttttagcgg

SEQ ID NO: 14569 - DNA, 1911 bp, Oryza sativa
gccctaacgagacgagagcaacgccaagcccgggagaccgaagcacgtcgcgaggctgagcgtctccgactggaggaggagcgtcaagcacaagaacaagaacggttacggcgtgagcagcaggagcgtgagcggaccgcgaaggaggctgaagatcgacgacagcgagctttggaagcagggcgccgagcgcgtgatctcatcggccaacaagatgttgaagggacaccggttttccgcacccctcagcagaatgcggttgccgcgatcaccctcctcgacaccctcctcaaggaaaacgagctcaatcaatctgatcacgtcgtcaacatcttgaaccagacgaagaccatgattgcggcttcggtcccagttaactccgaaagcgtccacacgccgactggcagccgagttccccacttccgatctcatgactaccgtcatccaagcctcagcatcaccggcgcaggatccaatcgtaggagcaggggtcacgacgggcggtccgttcactcacctcccgaccatcatggggagcgccgagtggaacggcctcgctcaccacctcgtcgccgccccgtcgatcttcgcgacacgatcatacagcgccgagcaactcgaggccatcatcattcgccggaccgccacgacgacgaccttgacggagtagcagccttcaccgacgatctgcgtcgagtggattggccagccggcttcaagccgactggaatagagaagtacgacggtaccactaacccagaatcgtggcttaccgtctacggtctcgcaatccgcgcagcaggaggagacagcaaggccatggcgaactatctaccagtggctttagcagattccgcccgatcttggctccatggattgccccgtggtacaatcggatcttgggccgaattacgcgaccacttcatcgccaacttccaaggcaccttcgagcgtcccagcacacaatacgacctctacaacgttattcagaagtccggagaatcccttagagattacatccggcgattttctgaacaacgtaataagatctccgacatcaccgacgacgttatcatcgccgctttcaccaaagggattcgccacgaagaattggtcggcaagttcgggcgtaaacctcccaggacagtcaagcttatgtttgaaaaagccaacgagtacgccaaagctgaagacgccgtcaccgcatcaaagcagtcgggtcctagttggaagccaaataagggtacgccggctacgggaggaggtggaagtaacaatcataaggaccgcaagcgtaagcctgcggaacttgttgcaaccgccagtcactcttctcgacagcgttcgcgcgtcaacacgttcgacaagatcatgaactcccaatgcccgcaccatcctaactccaaccacgtggccaaagattgtttcgtctacaagcaattcgcggatcaatacaccaagactacacggaagaactccgacgaagaacaaagcacgtcgatgaagaaggacgacggcgacaccccggcaggatttcaagaccaccgcaaggagctcaaccatatcttcggcggccccttggcttatgagtctaaacggaagcaaaagttgactgaacgggagatcaatgctgttcaacccgacacgccccagtatcttcgatggtcagaaattgcaatcaagtttgaccgctcggatcatcctgaccgagtggtccacccggggcggtaccccctggtactagacccagtggtccgtaatgtcaagcttcgcagaaccctcatcgacggtggcagtgcactcaatatcctcttcgccaagaccttggatgacatgcagatccctcgctccgagctaaaaccaagcaatgcgcctttccacggagtaattccaggattatccgcaactcca

SEQ ID NO: 14570 - DNA, 1722 bp, Oryza sativa
tgtgttgattatactgacctcaacaaatcctgccctaaagtccttttgggttgcctcgcattgaccaggtagtcgactcgaccgccggctgtgagcttctcagttttttggattgctactcggggtatcatcagatccgactaaaggaatccgactgcttgaagacttcatttatcacgccctttggagcatactgctatgtcaccatgccgttcggactaaaaaacgcaggagcaacttatcaacgtatgattcagagatgcttctcaacacagatcggtcgcaacgttgaggcctatgtggatgatgtagtcgttaagaccaagcaaaaggatgatttgattttggatctagaagaaaccttcgcgagcatccgcgctttcaggatgaaattaaaccctgaaaagtgcaccttcggagtaccgtcagggaagctgcttggttttatggtgtctcataggggcatccaagccaacccggagaaagttactgctatccttaacatgaaaccgccaagtacccagaaagatgttcagaagctgactggatgcatggcggcgctcagccgatttgtttcaaggctcggcgagcgggggatgcccttctttaagctactaaagaaaacagacgacttccagtggggacccgaagcacagaaggccttagaagatttcaagaaactcctcaccgagccaccagtcctagcctcaccacacccgcaggagccgttgttgatgtatgtatcagccacctcccaggttgtgagcacagtcttggtcgtcgagcgcgaggaagaaggccatgtccagaaagtccagcgaccgatttactttgtcagcgaggtcctagccgactccaaaacgaggtaccctcaggttcagaagctgttatatggtattctaattactaccaggaagctatctcactactttcaaggtcactcggtaacggtggtcacatcatttccactcgatgatatactgcacaaccgtgaagcaaacggacggattgctaagtgggctttggagttgatgtctttggacatatcattcaagccccgaatttcgatcaagtcccaagcgttagctgattttgtcgccgaatggaccgagtgccaggaggatacccccgcggagaagatggagcactggaccatgcattttgacgggtcaaaacgactttcgggcactggagcaggagtagttctaatttccccaactggagaaagattaagctatgtgctttggatacatttttcggcgtcccacaacgtcgccgagtatgaggcgctccttcatggactacggattgcaatctccctagggataaagcgtctaatagttcgaggcgattcacagctggtcgtcaaccaggttatgaaagagtggtcctgccttgacgacaacatgatggcatatcgacaagagatacgcaaattggaagataagttcgatggactcgagctcagtcacgttcttcgacacaacaatgaagctgccgatagactcgccaactttggatccaagcgtgaggcggcacccttcgatgttttcgtcgaacacctttatacgccgacagtacctcacaaagatgctactcaagttgcgggcactcatgacgtagctatggttgaagccgactggcgagagcccctcatacgatttttgatttctcaagaactcccccaagacaaagatgaagccgagcggatttcaaggcgga

SEQ ID NO: 14571 - DNA, 1357 bp, Oryza sativa
gtagtcggcggttacaccgcacctctttgtggccattgacaaattctccaagtgggttgaagctacaccggttgtcacaatcacagcggataacgctcgagatttcttcatcaacattgtgcatagatttggagtgcccaatcggatcatcactgataatggcagacaattcactggcggagtttttaaagacttttgtgaagactttggaattaagatttgctatgcctcagtggcgcatcccatgagcaatggacaggtggagcgagccaatggcatgatacttcaagggattaaagcgcgtgtttttgaccggctaaaaccctattccggcaaatgggtgcaacagctaccatcagtactttggtctttgcgaactacacccagtcgggccacaggctatggggcagaagcaatgttgccgagtgaagttgaattcgagtctttgcgctttcgaaatttccgtgaagaacgctacgaagaggaccgagtggatgacttgcaccgattggaagaagtccgcgaagcagctttgattcggtcggctcgatacttacaagggttgcggcgttatcataatcgcaatgttcgatcccgtgcctttctagtcggcgacctggttttgaggaaaattcaaactacacgggatcggcacaagttatctcctctatgggaggggccgtttatcatctctgaagtcacccggccaggttcctatcgactcaagcgcgaagacggtactctcgtcgacaactcttggaacattgaacatcttcgtcgtttctatgcttaagcttatcattgtacttccttatcttaactgtcaacatcaagttttcttcttgaagttgtcagtcgggggctatcatcataataatggagtgtgattttttaccaattcaatttgcttacttggtttatcattgccttgttcgatttttctacttagtctgcgaggactgaaagtttttaatagcttctttgggttttaggctcaacaaagcttgataaaagctttaagaaatcaaagatttcgctagaactatcaagcacagcatatatacaccagtattgtacaaattgagcctccatttgttacattcatactcaatcagaatcagtcctttcatcatcagagttattgttgctcggctgaaggtcgttgttgcggaattgctctacaacgtcacttgcaatcttgtcagccgcgttttgagcattgctgataagatcaagagcagcctcttcgcttgtcccgtctgcaaagccatcaatggcatcaatttcaattctcgggtacaaggacttggtcatcgccaatgccatctagctcccatacttccagctttcttgatgt

SEQ ID NO: 14572 - DNA, 10418 bp, Oryza sativa
  unsure (1)..(10418): unsure at all n locations
aatctcttcttcatcatcgcctggtggtcctgatgtatttccaatacgttagacgaataaaccgaggttatttaaatcagcatcacttgagaagacgggttacctgaggatgttcctagctgagcgtgaggtgatccttgttctttatttggagacccaatcatcgagtcgttaccagcctctggtccttgagaagttgtcgtctgcgcttcaacttcggggatttcttgatcgagacctacatctgactggtttccagtcgggggctcttgggttgttgcagtttcagctgctgccgactggtttccagtcggcggttggtcactcggatcggccttatcacccgaagcatgggcgccagtcggttggctttcggcagtcggctcaggatccttggataaatttggctctgtcacagccggatcaggatcttttccagttgggtctatgtcggatggtttcctgcaaagtgttctttcaatattcagtattattttcatgagagaagcgtgccgaagtgaaatggtaccaagaggctttatacctagaagatgttctaatctttggcgttgggcagttagccagttttttcctgggcatggtacgctttgggagtttattaggcgagcccttgtccccagatttgttgtcgtcgtcgccttcatcgttgtcaagcaccagttttctcttgcgagaacctgtctgtccagttggattggaggtttgaggttgcgaatctggtctgattgttggccctccacctccctgaacggtgtgctggcgaggagaccggcgctgagtgattgggggatcagattttatcaatacatattcctgaataagatgcctccatggttagttaactcaatatgaagacaagatactattttggtcataggttgaagatttcagatacacacctgcggaggcggattgaatgcattatatggcacgactggcagctgatgtgagtagctgacgacaatagcatttgagaagattttatacattctctccttcatgattttaaaatccagagagtctggttcttcgcgattaggatcatgcttgtcgtcaaactcaaaagctgtacgggatctttctttaactggcgccagtcggcatttgatgaagtgccgagtgatctgctctccttgtaagccttgttctttgagttttagcatgcggtccatcaactctaaggcttgggctgcttcgtccccaatcggaagagagttccaagtatcttggtacactggaggaagacaagagtactcgggaagagcaggctcaggattctgaacataaaaccagttcgcatgccaccctttgtttgaagtcttgaagggcattgagaagtacttctggctcagagttcccctcagctgaaatccggcccctccgactacacatggcttgctcttgtttggttggggtttgagaaagaagattcggcgaaacagagcgaagtggggtttaattcccaagaaggcttcacagacatggatgaaattggcgatgtggactatggaatttgggtttaggtgatgcaagctgattccatagaagcttaatatcccgcggaaaaatttcgaggtcggaagagcgaagccgccataaaagaaatgagagaagaccgcaacctcgtgtgtatcgggggacggaaaagcctcaccgcacgctggccgccacccgatgatctccttggcagggagaacgccgtgcgccaccatctccttcaggttctcctccgtcacgtcggatggcgcccattggccttcaaagctttctttctcttccaccattgattttacccgaatgcgctgatttgattcgggggatggctagggagaggtgagggattgaggcggtgaattacgggaaggattttgatgaacttttcgaaggtggatttgagtggattggtgaaccctagtttgccggcgcagctccgtactgtagcagggagtggggaaaatggcgagagttccggcggggaagacgaagtggcgcttggatcacgggattttttgttaagggtatcggaggtgcgaatgggcttaggcctgaacagtacctcagcccaatacttttaacagcgtggcccattgtgctccttagggacttaggcattttttgctttggcaacttatgcgcacaatagtgttgcccaatgctgataaaatctttttttacgcggtcatataattcttcggaattattgcaatgccaatttttcaggtgtggcctgtcacgttcttttagggactcaggcacttttcgcttacgccaaagtgcgcgtgatcaagtgcccaataccttaaaatccttttataccgcagttactcaactttttaggagttggtacaatgcatcttaaaaggtgtcaaacagtaaagctttatatagctgccccgctgactttttaatatagtcatggtgctgtttgggtttttaagcaattgattggatacaatatcgttgctctttgccacgtaagtgtgcatttttattgaccaatagtatggcttaggctgattatatattgtagtcattttttttaggcggttggtaaatcctttatgagtttatttactcggattttacaccacatattcctgttttcattatggtggatagtcatagcttagactattagacttattcattaccataatttttataatatttggtgggtaatctttagagttttttattcggatgcctgtcaagtgtgttcattcgtgaaccttttagagtgttaaccactcggattctttttattatggctaanaagcagtcggctagagtgcctctttaggcgccgcatatgcttttgtcatatgatgcatgattgtgctattatttttgttctcaactatatgtttagtttgttaactaatcacatagttggaggctacacctaattaggtgcatctattcgatgcaccatattccttatttttttttgccctttacagtcttcgtcttcgctactcggcaggccttggcatgaaaagtttgaagcactcggattattatctttgagaaggctatgatggttgactgcaaaggtctcgggggctactgtggagattatggatatcccatatctacacggcgatgatatttggactagatataggataccgaatatatatagaatatcttatttgtatctcgggttcgtttcttaacttgtacatcaaggaaacaccttgagacttagtcggttacgactgtattttacctgtatctgcatattccgttagggatatagattatcttttgtaacacggactccttcccatatataaggggggtccgggtgcctctaggggcagaggttgattttctccaaatcatacaatcaataatacactcggcggattcatccccggacaggagtagggtattacttcttgaataagaaggcctgaacctgtataaatcctttgtctccaaacccatacacttttccagcttgatagccacccccttttattattgccgaaatctagtttcgacaccacccgtgcacttccgatttattcacatgtctacttgaacaatattatgtgtgcaccatagtgatatgtttgtgcattgcaatatagatccatacgactaagaatgtggggcgatgcatgtatggggccctatgactgaagatgggctaggaatatggatttagcataaagcaccggatctaacaagttttttcgttaaccaacatatattgtacgctttgtgcaaggagggatgactccacaagtggaaaatcttatatctactacttgaaaagtacttgaaatataagatcttcccttttatgcatgtatgacaaattagtggcaatggtgattattaattgcaccgtcgcatttgaaagagggttcatgcgttttttcttctagtttaatcttttaaaattctgtaagtgatttgtgcatcctaatacaatttggaattcaaaaactatgtttagaaaagagagctcaaatcatcccaccacgcataatcttcgataaattgaagttcttgaagcctaaacaaaactagctaatcaactgtttttgagaatatatgtggtgctaaccctacatcagcttttatttgatttgtcccatcacatttcatctcatatgtgctataatttcaagagcataataacacgtagcaacttttaatattacttagaaagcagaaagtaacgatgtttagttattaatcatttttgtaatctctcaaaggacttgctttggtaaaggattattaattcagtcctttaatttggtttaaaaatcaaaaatcaactatgtataacttaattaccaatatgccattgccattgcaatttactaacctgaaattcactatatatccaaatctcatctattcatctcactgttaaatgaaaatacattattttgattccactaggcaatttcatcatatattttcctcagcaaagagaactgaatacttaataccagaaagtaataaaaaataaaaaaaatcaacaagaacgacattaatttaaaccacaaccgatgtattaataattttaaaagtagcacaacattgttctcttaaccgaaaaacaaagataacaatagtgttcagaacacaaacaaattaaacagcaacaagaaaaatcacacggataaataatacatgttcaacaatagaacatatatcaaggacaaagaaccatagcatgcatctctaggacacacacgatcaccaagctgtgtgtgtcctctccccttgatcatctgcatgcgataatcgccattgcttcactgcctcctccacgcagagacgcagaacattggcttctcctccctgttgaggatgagccacccgccgccctccgtcaccccatacctcctctcatcccctcctccgggaagccgcgccgccaccgccctcacccgccccgccgccgtcaccacggtgatcgccggcgcgagcgcgaacccggcggcgcccatccggacgacccacctccccagcgtctcgtgccgcgcccagcgcggcccgtcgtgatcacatgcaataacgtccttgatctcctccctgaggaggtacctctccgccgccttccgctccaccgtggcggcgcccgcctcctccatggcggcgaagagctgctcgtagtagggcagcgccgaggcgaagcggtccgtgaacgacggcacgaagtggttggcctcgttctcggtcaggatgatggccctcggcgacagcaggtggaagccgcggaggagcctgtccaccttcgacgacatgttcgccggcggcagcggggaggtgatcatgctggccgccgccgccgccgccggcgacggcggcgccgtggtgctgaggatgccggcgccgacgaggcggtggagctggagcgtggagacgatgaccacggcgtggtcgctcctcaccccgagggcgtccagcttgagcgcctcgacgctggactcgacgatgtggaggtcgagcggcacgccgtggcggtcggactcggcggcgaggacctgcgccgcctggccgaggaagtgcttgtgctcgtggacgatggtgaggcggaggcatgggcggaccgcggcgcggcgcgtggcgaggccctggaggagctccacccagtgggcgtggtggatgccgccgaggtcgacgatgtggatgaacttgtcgttcctcgtcgtctcgaggatgatctcgttcacggcgacggcggcgaggtggagcagcgggcacaggttgaggaagctctgccgcgcgaactcggcctcccacgcggtgagggcgtcgccggcggcgccggcgtcggaggggaagagcgcggcggacacgcccctccagggccggatcaccacccgggccatcgcctcggcgaacgccgcggccacgcgctgcacggcgtcgccgtccgaggacgccatgcgagcgatgctggcgagctcggcgtccgcgtccgccggccgcgacgcggccagcgcctcggcgcagcgccggaggtggccgtgcagcgcggcggagcggtgcgtggcctggttcctcctgtgcgccgccagcgcgctcgccaccgccgcgagcgaggcgttctgggcaacggccatcgtcgccaacggcggcgccggcgctggcgctgctgctgctggaccagccatcatcggcgccgcagccatgggtggcaccgagacagccacagccgccgtcggcgttgagccgagcggcctcagttgcaaggacaaggacatgctgccgccttgtccttcgcctgagccagaggcgttctgtgacgccgacgacgatccatggccaccattatcggctgctgccacagctgccggagcagtagccgtcgccatggacgccaccggaaccggcaccatggacccgaagagctggaaattcgtcatcggcacggcggcggtggtggcagcggcggtggtggtggcggcggcggtggcggcttgcgctaccatcagttcagaggtgttcgcggcggacggcgtcgaggacgaactcttctccgttacagctactgatctgataaaaaaaaagagaacttaaattaaaatagtgtcacgtacacaatcttgataagagctagctagtgagtgagataaataagtgtcacacaatcttgaggtgaaaagtgggaaacacatttatttaagcagacgggagaaaaagattattacaaacagtgaagaaacacaaaaaccctagctagttttatcctatgcatggagacactatacatgtatttcctgctcgtgtaatctactttgaagaagcacctaaaccctagttactttttttttgcgacgaaaaccctagttacttgtattaatctatggagacagtacaccacatgtttcctgctggggaaaaaatctacaatggagaattaaacgcataaaccctagctacttgtatatatcttacatggacataagactatacgtttcctcctgaaacttttctatctgagcagatctattgaagaaaaataaaaaataatagttgtatatgttgtttctcgcttaccttaacgcagacacagatctgcgacgaggagaaaccctgccaaaagacaaaagattatgcatccgttagagaactagcatacaacagatccagatttgttttttcaacaaaagaaaacagcacgaataaatcagcataaattaatctgacccaacgctttcaatcaaaacatacataaaatccctttccaaagaaaaaaaaaagaaacatacataaatcaatctgaatcaccccggcacatatcagatctattattaaacatcttgatatatggagttattgacaaatcagcatgaattaatctgactcaacgctttcaatcaaaacatacataaaatccctctccaaagaaaaaaaaaccatacagaaatcaatatgaatcaccccggcacatatcagatctatataaacatcttgatatatggagttattcacatggcagagaaagagcaaatcccatgtatatatgctctagctatctcaagtcctcaacacagatatatagtatatcagaggacgaacagagatgctagctccttatacatataaatcaatctgaaacactattagatctatacatccaagataaaacagatttgtttcacagataagcagagaaagagaaagaacacaaatctcgcatatgctcttgtgtctctctatctctatctacctcaacaaagacgacagaaaccagaggaagaacacacagatagatcgagagagatgctctctctgctgccttaccctagaactcgacctagcttttgctggctaggagaagatcgagacgagcagagagatcagaagagagctcttgcttagaaatggacggagcgagctagcagatgagtttgggagagaggacgtgaggtgtgggtgcctatttgtagcggagggaaatcaatgcatgccaaatttgcaaaaaagagtgtttgaaatttggacaaattttgtgggcgcgggctacagctcccctacctccggtactcgttcacacatgcgcctaaaatcgaacgttaggggtgcatatatggtcttcctttttaagcatccatccatgaatgacgtacagctttcaaagctagctaacactgccacgtttgagggaaggttcaagccagcattcctttttctacttgtgttaaatatttttatgttccagttttgtcgtcctaaaaagaaatatatgtaaaaaagtttgttcaattttaatttgttatcctaagagaaatttgaattaaaaaatgctttgctcacaaaatacaaattggaggtgtaaaatgtatatttcggttgcacatttttaccagggaagcttcaaatatactgcgtgaaaaggagatgtatgaaaaataaatcgatttatattagcggggcatgtcaaattgatttgttcctgtcacgtttcatctcatattatgctttaacttagagagaataacaagttcatttacaacatggtaaggaaaagatcgatctgctagtacccaaataggtatatgatctgaagtagtactctagcatagccagcagcttgcaccataaatatcttccttatttatcctttctcgactgcattggactagtgctcctcttttagcaatcgccataaaagctagagggctgacaaaagggtgatttggaatgttagtacatataaggattcctagagtattacttgtcatattaattacctctcattcaaatttattaccattttatcccccaaccacctttccatcctcgaatcacccctcgtctaattagtagggttgaaagtgatttggattttccgtccgaccggaccttttttcggattcggatagttttgattggatatatccggaaattttcgaattcggatattttttctggaaatgaaaacgaatatgatatatgtgatatctgtcggaatcggataacggtctaaaactatccgttattttccatcggatatccgcattacacgtaaggctgccataacccataagctagcccaacccaagaggcagcccatcccaacaacaacaacgagggttccccacactcactggcacacagcacagccgccgcctcctcctcacccgccacatcgtccccgcggggccaagccgccgccgccgccgcgtcccatcgcctccttgcccgccacatcgccatcgcacgctcccgccgtcgtcgctccctagggcgtgggaggcggatccggcgccgccgaccctccctattgccaccgccactcccgccgtcccaccaaaccaccgtctggccgccgcttgctggccatccgctgctgcctccaccggccgtcgtgggcgctgagcccgccgctgggcgccggctaccgagagagagagaaaaggaggtgagagagagagagagagaggactgagaagtggtgaggagaagaggagaaataatggtggagagagagaggactgagtgtctgagtgagagtgagaagagaagataaggttgctgaaattttgaagtggtggagagggagaggacgcaagacattttagcaaaaataaatttcgaattgaattttatgataataatgaactcatatgaaaaagttatcaaaaacaaagttgtagaactcattaagatctatcaattttattttggtcatttctccatccgagtttgattgaattttaaaatataaaaaattcaaataattttttgggtagtaaatgatttcaaatgaaaaaattgtcaacaacaaagttgtataacttatcaagatgtacaacttttattttagtcatttttctatatgactttgtttgaacaatttgaatttgaatttaaaaatatgacaacttcaaacaacattttcaagtactaaatgatttcaactgaaaaagtcatcaacaacaaagttgtataactcatcaagatctataacttttatttttgtcatttcttcatccgacaaagtgatagtaacattgttcacaaaatttacatatctctcatatttggttttataaactataagagagatatctaaattttgtaaataatgttactatcactttattggatgaagaaatgaccaaaataaaagttgtatgtcttgatgagttctacaacttttatgttcatgactttttcaatagaaattattaactacttcaaaatattatttgaagttttgaaattaaaatttttaattgataaaacaaagtcacaaggaaaaaatggctaaaataatagcagcaagaacaaaataacattatagagcataattttaaaaacatttaggaaaaagaatcatccagtttggagttcatatgagtgagataaactagtttcaaattttattttcgcatacggctccttaagacgcccgt

SEQ ID NO: 14573 - DNA, 8591 bp, Oryza sativa
tccagacgcggcaagttgtgatctgtcggtgatatgggcccgagggtatcaagactagagggaggaggttgccccggtacccacgtggcactcccccaaagggggtcgggcctggggtaggttggcggccgccccctctgagcctctgcatgacgccacgtgtgcgggattaggtgggcacccccaacgctcacctaactacatttagggcggcgcgcgcgggagagggggagagggtggtgctcggctgaggggaaggggagggaaaacagaataggaggttaggataggactttcctaaaaaggaaaacaaatgcggtgccgttttaggtaaagaaacggaaatggtcccgcgaacgaaaacggacagttcgttatgcaaaacgaaatcgcggacagagaggggagtgaattgggcacaattcatgaccaaaggcaaaaggaagaattattgatgtgatcttgacatttttaaacttagaaacattgcctccggtgctttgtgaattgcactttaagtcctgttaatgagtttagagcaaagaaaattcaaaaaagaattctccctggcaattctgattattaagtatatttgttaattagggttttctcctggttaaccaaagtaatttatgtagatcatttattagtgaattggaaacaaaggaaagggaaaactccaggtgtgacaccgaaatagtgcgcctacatattgctcacatgtcaggcggcatgcagcttggcctgcctcatcacgtcatgataatgagaagcttttagcctctcatcccggccggagtcggtccatccgctctggtcaaagcagggctcccgtttctcggcgcaaacgggaactcggaagtcttcattcagtaaaagactaggcctacatgtcattggcatagaagagtggcgtcaaccctggccgcctgtggaaggtttcggtcagggctgacaccgtggctactatcggtgatatgggcacgagggtatcgtgtctagagggaggaggccaccccaaaccccacatggcactcccttgagaggggtcgggcctgtggtggagcggcggctgctccccccacacccaaataggggtcgggccgccccgaccccctccgcattcctgccagtgtgcgtgggtgttaacaaccaaatttggtaatgccatgggccggattcaaagctagagtcaaagccgatttggagaaatgctatttgagaaggcagagtacgcatcggctgccgcatgaatcggctacaggcagtatcggctgcaacatataggctagcgccaaatcaacggactcaagccgatgcaaccagtttcgaaaaagacagtcccacgtctgtcatcgggattagtcaaagctcttcatagccattgccacgcaaggattggagtcctaaaaatgggcaattgtatctattaattaggacatttttctgtttccttagagatatgtttggtaagagtccacctaagggatttattcatattttaaattgtattagagaaaagaatcgtgtccagcaaggacatattatgtacttcgggtataaatatgacccgacaccatgtaatcaaagcacgacagttcaataatacttcggcgcatcgccaccctattatattttcgttgtttcgacgagtttttgctttcgagttaggcttcatcgggttcgatctccgacgaagaggtaaagcttgctatggcggattgtgttctcgggattagtgcttacatctttatgacactctaatcctgtctatgtgaatcgccaagttatcatatatactgcataatctagattgatttcgtcatctaacctcatcggctagcctctatcatcgaaaacggccgatgggtttaagcttcgaagtccatctagactatgcgatatatcttccatcctatatatcttccatcctgaatgagtttttatcgatttgcttatggaccttttgtttcctttcacgcttaatgctgcatcggttaggttcgatctattaagtattgtcttgaaacgtcttgtctagctctttctttgaatgctaatagagatagcatcggggtttcagccgatcttacctgatttagctgtcttgtttccctacttggtcatgaatcgtctaaatctgccctttatatcaagatctcatccgcttaaagtatattaagcttcctatcagtctgctagtccatctttcttgttagattgatctttgttttgtatatttcattcgtgctgatatctttatctgtactacttaaaagaaatgtagtggtgatggtgaagccaacatagacgtatctgtgcctccccctctcacgcccacactcgcgcctcctcctctcatgcccgtgcctgacagacacatttcattctacccgtacgatcgggagatccaatggccagattgatccctcgcgctcctcccctacacatgcgcccacaccactagcgccctcctggcctccctcatccacccgccccactcccgtgcgacggctgcgccgccaccggctgggcgtccccagatcgattcttcgcgctcctcctctccgctcgcgccccaccccagcaccgccgccggttgtaggtcgtcttcgttgccgcgcgattccacctcccccgccgatggctgctccaccgtgccgcctccgtcatcggatcggcgggacctcacgtccctcacgctgcctcccctgcgaagccaccgccggatcgcgccacctggtcggccgaccctcgacgacgcgaccccgcgttgcctcccctgagtccacctccctcccgatttggggggggggaccacgccgccgccggctcctaatctccctcgcgtgccgtcaccggcgccctctccatcgttccaccgcaccgccagtcaggatggcgttgatccctcgcgcgctgtggccggattcctccccaccccgctgccagtcaagccgccggcgatccttgtggtcgactctaactcgcaggccaccgaaccagccctccaacaaggtaactatcgtggtatccatttttattacagtataaatgcaaacttgtgaaatcagtggatgtgaataataatgacagtgccatgtttatgatgtgtgcacacatatcccactactaaattatcaatgacgatgtcctgttttgaacaatttgattagcattttcatctttttatataatgcaaatggtttaacttctcttatgattgggatgttttatgtttatatctgtaaattcagataaagcgctttaattagtagcgtgcatatactacctttatgtattatatcattcgactgctgcaacaatggaattcatccaagttccagaacttcttttacaagaaattgagcttcatgtttcatggtttatatttatttgtgtatttgcaatggagaagagaacaacgttaaattattttacaaacaatttgaggatatatatggcggcggtggagggaggcactggcggcggcggtgtaggttgggatggttgaagacatcaaccgccctgtggtatgtagtcccacgcttgctctcccgtgcgacgatatatatgatttggccgttgcttaattcagagaagttctagcctctgaaagtgaataacgttggcatggtttgtgccatcttcttaatgagtaggttttcttcttggcattggtggccccaatttggatgtcataaggatcattgcttcaccagctgataaaatgtcacttttaatgatctattggctatgctatgcgatttgagatgattttataggtgattttatgctgatcagcaacagaagtggttgatattggaacttaattgaagattcacgaatatatatttaaacataccatatgtaccctctgtaagtttgttttcttttgaattctgataaggtttatcttttaatcctagatatctttgttactacagtgtattattactcatgatatattacattgtacactactttctcagcattaaggtggtggcatattcaagaagatacttgagggagagaaataggagaacccaaaggattctaattgccacaatttgagttttttgtttagaagagttcggttgatcttatggaagtttcatattaattcctatgaatcttcggctctcttatgttttccgtgtgagatttgtgctagattttagttgtacatgtatcagatgaccatgtgtgatccctgtgagatttatctcacgacctaggttatacatgtattcagtttgagcaccaattactaattaggacaaactgactgaatctatattttatagttatggtttgattttttaaatgaatgatttgtttggtggctgattcaatgtgtttttgccttttaggctggtctgctttggctattagagccatttgatccagatgaatatttcttccttcattatcagttggcttgtttgttatttactatgacatggctgagctggtacttatggtagttttgatggtgcaggttttttctaagacaggagacatgcatgctccatcagcacgatgcaatagtatcatagctaatttagttcttagcagcgaagtcgatgctcatgatagaattttagatttttgttttctttcttctgtggtgtttatcaccttttggttgttcgctttacattaccaaagagcaccgtagcgttagcatgggcatattactagtcttggtacaaagtggtatcggagtgctagccgatacacgttaggtttgccctatcggctatgctgtgagcatacataatctctgctttgaggcacatttagatattgagtgacttatattgtctcggcataacatccgatctatcccaatcacctgatctaagtgtgtttcactggatagactacgtatcattgacatctacagccgatcgagtagatctaataatccctacgtttcatctgaccccgccggtctgacgcaagtcgcatcgacgtggcccaggacgatatgtcatcagcaatccaaccgatcagctatcgttgatggatttaactttttcctttttccttccttgttggttgcaggatcaaaccaactagcacgctcagaacccgaaggcaatctctttggacctgcactagagttaagcagatctctcaggccagtgcgtgtttttcgcgtcaacagcgggttaagtgggcgcgcccaacgcccacctaaccgcatttaaggtggatcctgcgaccgcgccacgttgcatttaatgcggtgtgcaggcttggctgataggccacgcgatgcttgaatgaccggtatggcaaggcgggtgcgcctgtgagctgactgcctaccaggcggcgtgcgcctgtgccatccggtcacatcgccatgatgagaagccttttgcctcatatatagaccggggacagattccctactccggttcaaattagggtacccgttccctggttggattgggtgcccggaagtctttagtaattaatgcagaatgatgcaggcgtcccacatgtcgtccggcgtgatctgatgggggccatgccaaggcgctgtgcgcatggttttccaagtcagatggataagaaatgtaataaatgtaaagaatgttttccttatcccctaggtggttttttgggcccctgtggtaaccctttgaggtataaaaggaggtccaggtctagtggaaagggaggattttcggatttctaccgactcatacactagtgttcctcgcagaatcaaccacacacaggagtagggttttacactcctcagcggcccgaatatgtataaaccccttttgtctcatcattctcgaggggcccgaccccttccgcataactcttgctaccaaaccacgattctcacccgctgcccccgactaaactaaaagggggctctccagtcccctacttgaggagttcaccctccgacagctggcgcgctaggtacggggcgcgttcgtgagtttttgagggatttttcgatttcgtgtgcgccaagtttcgctcatgaggccgaatggctgaagaggcgatcgtgtacacacccacacccattggaggtgacgacggcgacgaggacaggcgggaccagagcccgcactttcgtcgtcgagctcgcaccccaccgtttccaccgcttcaccgaagccctaggcgaggggatggccgcggcaaggctgagggctccgttacttccccactagcaggcgagggagtggggcgttgcgggtggggcgcgtcgccgtcttaggtacagcaagggaagcacgactgagggcgcgctcctgcgtcactcgcccgtcgccctcgatctagaggccccgatccagcgctggctggacaatgtggccaacttggtcaccactgcgcaacggcaactaaccgctagcgggcgaacatcgatggtcggaacgtattgcactccggccaccgcctcttcatcgtcaagacgaagggcctgccgggcggcggctaccgcacgtgcctcatccttgcttccctcgtcgacgcccgcgggcagctgtggacgtcatgagagcatatatggtggagccgttgctaggctcgttatcgagcgccgacgtgatgaacgtcgtgccacccatgcagtggaaggcaccgcctcctccagagcgccacgccaccctaggcaaagggctaggccctccatttccccattgagtagggctagctaccacgcctctgtggcgagtcttcggaatgtccgatggaccccaaagtttcggcccagcctcaccgagaagtatgacggcaacgttaacccctccgagttcctccagatctacacagcaatcatagaggcggcagggggtgacgaccgggtcatggcgaacttctttcccatgaccctcaagggccaagcgcgggtttggctgatgaacctgcctcctgcctcggtccactcctgggaggatctctgctggcagttcaccacgaacttccagggcacgtatctgggctcgggagaagaagcggacttgcacgcggtgcagcggctagacgatgagtccctccagcagtacatccaattctgccaggtcagcaacaccattctgcatccctgctcatgtagtgatctacgtgctcaggggggcgtgcggcacaaccacatgcttgaaaaagtcgcctccaaggagccccagactaccgcgcagctcttcaagctcgcgggccatgtggcttgcaaggaggaggcctggacctggaactcttctcacttcggtgcggtggccgcggatgccctcgagcccgcggcccgctccgggcagcgggagaagaggaagaagaagagatcggcccgttccaacgacgagggccatgtcctcactgctgaaggtgccttgcgacccccgcgcaagggggaggccacgggcggcaagcaaggggacgccggtgcccccagcggggagcgctcggcggacaaatggtgctccgtgcttaacacctccaaccatagtctcgctgattgccgctcggtcaagaacatggccgagcttgtcaagaagtttgagcaggagaggaactagggtcgccgcgaggagaatgctccggcgatctcgaccgacaaccgatgaggtgaggccaaggagaaggccctgtcgaggagcccgatggcgaggatctaggcttctaggagccccaacatgctatcaccaccatcgacggaggggcatgcattcacgcctcccgtcgaagctttaaggccatgaagcacgagcttctggccgctgttcccattcatgaggtggctcgaaggtcgcattggtcggaggtgaagctcaccttggatcacactgaccatcagccatgcactgcccgagggggccagatagtgttggtggtctcccccaccatctacaatgtcaagatgggtcgtgtcttgatctatggcggcgcggcccttaacattctgtcccccgctcccttcgacatgatcaaggccccggggatgcatctcaagccgtcgctgccgatcatcggcgtgaccacgggccacacgcggccgttggggcatatcgaccgccaatttccgcaccgaacgggttgacttcgatgtggcggatctcaatctgccctacaatgtggtgctagcaccgcgttggtaaagttcatggtggctgcccgctacgcctacctccagctaaagatgccgggccctagcggctccatcaccgtccactgagatgtcaaggtcgcgctggcttgggtgaagcagcgcgcaaacagcctcacagcggccaccgaggctggggacgacagcgggaggaccgaggcttccaccctgcgtgccccgaagaagcggatgacctcgggcgacgaggtacccatcaagcagatctagcttggcgatgacacgtccaagaccgccaagattagtggtaacttggacaccaaataggaagacacgctcatctcatttcttatgggcaaacgccgacgtcttcgtgtggaagccgtcggatatgctcagggtccccagggaggtgatcgagcaccgcctggtcgtgcgcccggacatgagacctgttcggcagaaggtttggcggtaggccccggagcgc

SEQ ID NO: 14574 - DNA, 4146 bp, Oryza sativa
  unsure (1)..(4146): unsure at all n locations
cagcgccgatagcacnctacgtagcaccncaccggttatagtatatatctgcaattgacaacctcccggaattgaaggagcttgagttagaaggcaaatgttgtttctcttcaagtgtggagagatatcaatgcacataacaagaaacttatacacaagagaacacaggttcaggatgaaccaaaaggaggaccgacactagctaacaagaaaaagtctgcattcttctccatctttccgtccactcatcgctgattcccggtactgctaacttgtgtgtgtgcaagctccatcgtaaatatgtgtgcttcgcgccatgattctcttgttcttgcttgtgttctgttgtgtaagtgtgtgtgtgtttccttcatttgttccgcgcggagcggtatgccgtatgcttacaaaattactgcaagcttgctcctgtgccgagtcggatgtgattgtgttgtgcttggctcttgttcaggatgccctgcatgcatgtctgaatgcatgcgagtgtccatgtctcgagtgagtgccgctttgtgtgtgcgggcatatatggctgtgcccatgcgtttttcctttgaatttggatgtgtgatgtgtgtttatggttccatgaaataagtgacaccttgcacgtcaatgtaacagttgtgttgtgtgaatgtggatttataatactctagtagatgatatcccgcacgttgctacgggaatttgtgagaaataattacaggagaagatgcttacaatggaccaatatataagagtttacatggatattgtttcttcaatcatgtggcagtgatgagagaacacaaaactaaaccggaaaacaatagcagctgagttcgtgaaatcttcttgtgaagcgaaaaaaaaaaaagagagaccagtttctcgaaaaacaaaaacacggttgcaccaccacgatactgaagttctactccgatattcctgaccagccaaataaagttacgcaagttacacatcttttatgtttgcatacgtgcgctcactgcgcatgtcttagacatctcaatcagcagtggttgaacaaaattatgaataacaacaaaacactacttaatcatttggtttcacagtaaaccaaatcacctgcacataagaatggaagcacaacttacctacttgtgaaatctgcgttcgttgttcctagttgggaactaatgtgcggtgcacgcagaatggagcgacttattagcgcataattaattacatattaactttttttgaaaaatggattaatatgaattttaaagaatggctcaaagaggagggaggcaatatagacttattacaggcatataaggcgcgtcctaaagaggagggagcaaaatagacttattccaaccatatgtaagacacggcccaaataggagggaggtataatagacttattccaagaataagcatgatgtgctgatcgtgccatcgggtcggcccgacgcggcccgactcttattgggtcatgcctggaccgctgtgcctcgctgtgcccgggccaagccgagctgggtggcccatttggccatatatacaagcaggcgcctgaagcttctttaaacatttaactaactatttgtcactctcagcaagtttggcatttaaatatttatcacccatatattaataacatgtgaatatttatgtgtttatgacatgtgggtttaggtggtaaaccgttaattgtcacatctaagagtgagaaatagttaaatattcccattttcgatggtttggaaaggatttgagtagtttataggcattgnatgcctgagagcggtaacactgagtttaattttttgcgtgaagcgaggacgagagcacattatgtttatctattgaacaatagttaggagatatctacagttgcaggaaggtattatatataatcacgggagagtatttacaatcgttgataataaattagcagttgcgatgaaactcctgcatttattactttggactagaaaaatacccctgtgttgcaacgggtactcataattagtttttagctacagactagtctgctacctctcttcgctcgacctgcctcttttcgctccagctcacacaaccgattgccatcttcaaccttcaaaagacaatcatgtgtccatacgataccggagccgatcctccccatcgattctggtgaattaaagacaaattaaaaggggaaatcattctggtgaattaaagacaaattaaaaggggaaatcatgaataaaatgatgagaaagtagtggagaatcgatttttgtaatcaattggagaaggaaacgcatgggaaggctgatcgacgtggcgatgacgctatggttttccttgacgatggaaaaaaaaccagattttttttaaaaaataaatccttaccggtgacgtacatccttccgcgtgcgaaaaaaccatgacgtagaaaaatggcgacgaaaaaaaccgcataggaaaaacccagaaaaagaaaaaaaaagtggacgaaaaaaaagggagaaaacaacgaaaaagaatatcaattaacatgctcgtgggttgcaatggaaaaaaatgcagtaaacatcggatttgtagggttcaagtttcgtcatgataaaatcatgtgtttctcgaatactccagcatggatgcacgcacctatcaattattgtgttctctcctactcctgtgcagacaacggacaaagcggatagtatgagaaagcgggatgacgcacaacgacgtaataaaggtcgacacatgtaaattttctagaatacttgtgtattgtgtatttttaagtaagtaggtgtattttagaccggtacgtgtagaattaaatctaaatatggtaagtgtttttattaaattctttatgattaaccacactctctagatttgttttttgaatttttcaaaactcaattgctaattttaataattaatttaaaaaaacaaactgaaatccctctcctaagtatgggccaaatctggcccattcttccttcctcctcccccgagccagcccgcttcctttcctccctcttgggtcgccatccctctatccgcttaggcccagcagctgccccgcttcctctgctccctcttgggccttcatctctatgtccgctcaggcccagcagccgcaccagcccatgaaaaaagtggacgggaataaaaccgagaaaaatggagaaaaaaagaaaaagagaggtgaaaaaaaaaagaaatcggcggaaaaaaatacactaacggacgaaaataaaaccggaagccttatgtattttttaattaggtatatagatatagatatagatatgtatctgtggtcatttacggatggaacttagtgaaagtagaaaatttagtactccctctgtttgataatgtaagtcattctagtatttcccacattctagatgttagtgaatctaggcatacatctatatgaatgtgggaaatgcgagaatgacttacattataaaacggatggagtaaatctaaaccatgcactgaacaacttcacaattcctcaagcaagatattgaagccagaaaaaaaaaatcgaaaattgcaggtttctcttaagagaagcggaatcgaagaagttgagccagaagaatacaccatcgaatttcttcaaatattttttcgtccataaaactaggcataggttgcagagtcagaaattttttgataaagattaaagaatatactcagattagttcgtaaaactaggtctaggtttgcaacagcctattacaaagtcgccatattgaaaatgtgacagccgccccactttgcacacatttattcccggcaaatgcaatatgcattttttggtgtgactggagtctatgctttcttggacggtttgttatctaaaactaaaaggtttggccaaccctactgaattagcgtctaccaaatgaactgccgaaagaagaaaaataccctctgctaagctgcaaaccaagcaacagctacctcagatatgtagccctacatcatggagctatcagataaccaattgtcaccaccttttctacaaagatgccaactcttcttcagatatttccaactcacactgccgaaatgagaagaagcctctnccngngcctctncaatgggctgatcttagntaagccg

SEQ ID NO: 14575 - DNA, 6723 bp, Oryza sativa
  unsure (1)..(6723): unsure at all n locations
gcagaggccattcgcatggaagaggatgagggagaagaaaaggggaactttagtttgggttggcaggggcattttggtattttctaaaaattctgacaacacaatacacggtgtgagcaacgtatctaatggaaacttaacgggaggggcatggaagggatcaaagcgaaatttcaggggtacacagaggatcgtgtaaaattcgagggtatagaagggattaggtgagttttcatgtgtacacaagggatttactcttcttttttggtctcgcctcgcatttctttgcttggtaaagtcttgatctgtctagagatttggtttgttggagggtattttaggatttgtttgtgccttgcacatgcatgctcactagtgctaaataaaacataacattggaaaaaccattatataacacttcagttttatttatttccctaaaatataattctagtatttgaaattagtaagtatgaagttatatccatcttggactctcaactagtattttcttattttaatctaaaattggaaattaataaataaatactccatctgtttcacaatgtaagtcattttagcatttccaacattcatattgatgttaatgaatctagacatatatatctatttagattcattaacatcaatataaatgtgagaaatgctagaatgacttacattgtgaaacggatgaagtattaactagatgtaattgcgtcgatcttttaatctaatctaaagcactacgatttagaaaataaccattgtattgcaacgtacatgtaggctatggcgactagttcacagaagggttctgataaaattattggggggagaggggttgggttaattatatctagctcaagggtgtgaaccagcggtccagcgcggttactgaatatgcttcaattctaaatttccgtgaacaggcaagtagccgtgaaaaagacagaccaagacaacgatattcacaaaggttgtcttactgttgatctattctattgcagatatatttctttgtcaagtttgattactggctcgacatggggaagtagctgggacgtctcgtcaatggagcagcaaattctacaccagcagcggagtttccatcgtacaaaaatagtgattctgaagtgctgagtgcgaactatcaatgatttggtaaagtaaggcctactgatagtctgatatcgatgcatataaaccgtatcatctctgatgtacctatacatagtcagatccaattaatactgtcgaaattttcagaaaatttcaggtaaagatcaggagaggagaaattcgccatggagttagagctggtgtatctgtatccggtgaccttggtgccggcagtcgtcggccggttcagcatccttgcctcgccgttgctgaaggaattcgaggaacacaacctgcaattcaccagcataatcccgctcttcttcttctactcctacatcagcaagttcctctccgacctgcagggtcagccactgcctctagtcaagctctatgcccgggcgctgcaccggtttaccagctgcagcagcagcaaaagccgtgctagcttgaggatctacatggacactgccgtcgtcgtggtgctgtcctacctgtctctgctcaagatcaacctgagctacatctggctcgccgtcttccccaccctcacgctcgccttcatcgncgctctgttcaacgagaagctccgcggtgacaggagaccccccgttgctgaggaagacgatgcaggaggaggaaagatccctcggctcgagcccaaggcgatggtggttgtgccctattaggtgctatgcgcgatggggcagtttcatggaggtgacagctttgcggtgtcccagtttcttctcttcctcggctccacgctgggggcgctggcgctaatggcggcgcggctgtcgcagctcgccggagcagcaccgggcttagcgccggcgtcggaacttctccgcagggccacgctcgtggtgatgctggtgacggcgcacgctgcggccgccgagctgctgggcgaggccacgatagcgctgctctgcctgccggagctcgcgccggcgctcttctggttcacccttcacctcgacggtgaaagctcgccggccgccaccatcgacggcatcaaatcgcacaggaatgtgctgtccgttctcgctgccgcagccgtcgccagtgttgcgtacctcgcggccgccatgggtgagcgtggcctgtccgtgagcaccatcacgatggtgtcttgcggcgtctcagggcttctggtccgctgcgctgtggtcgtgctcggtcagtggccggggcaagctgagacggccggtagtactgctgcctctttgatggaagttgtcctagtgctcaagttttgggggaacactttgctggcagtggcagctatgctgctgctgcttgcgttgctgactgctttccggttatgccttcaagaaccaatgttcgcgacagttgctaaatgtttcagcgactacattgacaaggtcccccaaatgatagtttagctgaaggggcacgttcatgtatttcctgtgttgacatatctgtgacttctcaagacaaacaaaaccgcatgttcataacacagtgccatacttgcaggtaccttaatccatatactgttatccatgattcgcagcccatagtcagaagcccactacaataccgtgacacaaacggacttgtttttggtaatcatcaggctgcttagcgatatatagcttgcctacctagcacctcacacataactacttgtaggaagtacaaaatacatgtgtttacccctcccctgttcacacataaaactgctagaaattggcaaaaaccctccacacacagatttccaacagactcgtcggacaaacatcccagttccactttgatgttggtattgtatcttatatcaattcctgtaactacttatatggcagaaagcaaaatgtttaacattaatatatcagaaagtataactaaaacaggaagacaaacctaatagcacatatatacgtatcaaaattccagcacatgcatgttggcagttttaccacaataattgtattaagctaaacccagagtacattaatccacctctatacaaacaaatttggagtttagcccttttacattcatcaacaaacagaaaatatagagtttatcttaatcagaagtgatatatcaggaattagaaatacagcacataaaggaactttgggaaaacatgaatatagaagcagatccctttgatgcacctaatggtaaaaaactgatgtcaaaagattaggtatcaacaatatgctcagaagtagtctccaagagggagcatagatcaattcagttttcaggccagtagtatccaagagggggcatgaatccagttttaggactaacctctttgaaagctgggtactaggttgtgaataggagagaagcagcaggtctaccaataagttaatagcaacatagcttattttaatactgatcatacacatagataccacccaaaaagaaacacattactttccatatttacaggaaacggggtagatagcagcattacaccacctgggaatgctgtcctggggatacaaggacattttcatcgccaccttgtataaacctctcgcaagtagcataccatattccttgaccccgttcctcgatcccatcaacccaggaacagaaactttgagcctatgttctggtccttaacagtgggatcttaactgatttgaagaatcataccacatgttgacaaaggatggtctactagagctcttaacatagagtagtttatattcagataaataaatgaataagacagtcttgtgagcttggtttttgaagataacaatcaaggccaacccctgttctgcttcaaaaaagataacaaatgaacttaccccatctctaataaagttgttaacgattgaagcctcttacacccccaaacaaaacaacaacaaaaaaaaagaaccctacaactgttgccgaagcctagatatcaaccctaaaccacgaagccagacattttacacccctttccataaaaagaactggttaaaccgttaaaggacccgtaaatgtctggattcacagctgaagagggacaaaacagacattactgttaacatattgtcagttcaaggcgtaaaataccacaagttaaagataactcgaattccctgtttattctcccttttcattagttacaatcattaccatattgctcaacatatatgaaccattattttatttacaccaatgaactaaccgtagatcaaaaggcatagccaaaaatcagactggtatggcagtacctgcctcaaaacaaaagtatcattcagcaaataatattaggacaaccacaattcttcaatcatccttttcaatcattgtaagcatgcctaaataacaatatctggaatggacattatggcaaactactatgtataagaatcagaccgcatcagactacattgtaaagtaatttgtgtcaagaaattcaacgaaaacaaaacaccacattcaattgttcttctatttcagttcgacgaaacaaagatggtcccccaaacccatagaatcacaggcgggagagcaattacccattttttatgattaactaagaaagaaataccagcttatcaagtattcgagtgcaattgtttaactattctatcagagatgcaactcttaaatcacacttctgaattattttaagcatgcccaaatgccagtagctgcaatggagattacagaatactactatgtacaagaattcagactgcatcagccatcaggctacatcctaaagtaatttgcattaagcaagcaatcttgagtccaacaaacgaagataaaaggtcatgttcaattgttcttcagtttcaattcgacgaatttgtggctgttccacgattcgccagaagcgagtaccacggaacagagatcccaatccccccaacctatagaatcacaggcaggtacatatatacagaagcggcagcggatttcagacaagagtgacgaatccgccgacaccagagacgggatcaaggcaggaggagaccgaccgttgcgaaccccaccccccttcaccagacggtggggacgaagcgcagcgccgccacgcgcgcggcgaggaggcccgcgagcctccgcacggcgaactgggtgcagttggagagcgcgatgaggcacatgagctcgtacaccaccccgagcgccgcctccgccgcggacctccgcggcgcgggcacgtngggctngnnggcngagtcctcgcatgcagcccgccaccccgaccgccgcccccgccaccacccccctcctcctcctccacccccgccaccgcccgggccgaagaagccgtcgccgtcgtccccggagaagggcccgcccgcgtcggagggaggcttggatcggcgggtgcgggggcgggtgcgcgcgcggcggcggacggtggcggtggccgaggcggaagggcggcggcggatgatggtggtggaggaggaggtggcggtggcgggggggacgggcgaggaggaggcgagcgggcggaggaggaggagcgacagcggcggcggcggcggcctggaggagggcgcggcggcggagatctccatggttggtggggatggccgcgcgatcggagaaggggaaaaggaaaggaagagacgaagagtaggcaagtgggggaaaagttacgtgtggcgggtggtgagtgacggtgaggagaggagaggaggacgggacgggcacgcggcggcggagagggggatctgcgtgggccgtgcccgtggtgggattccgtcctcaggattcagacgctgctgggatctttctccgtctcgtgtctggttgctacaccataagtttgattttgtggttgtggcaaaccgggaacgactaggatttattatacggacaggtttatagtggagatttgggtttgagcaatcggaagcaatccaatcgaggcagattgaaggcgggataaagcttgagacctcgtctttccacttatgtttacatttatattatctaaaatttaaatttttaatcttaaatttagtgattttaagattttttttatcgaagttttttcagtttttatttttaaatcgctgaaaacacgtatataaaaattttattcacaaattacttttcgtttgtaaatatgccatttccgatggctccgtaaccctcgactggtttttccgacaagttttggtgaatattttgcccctaaaactgaacagcacattttcattacttagacatacatgaaattacattcatatagttcaagaactatagaagaaacggttagggactatggattatacattaaaaacacacctaccgtctcttcacatatttacattatcccttaaaaatatatacaactagaattgatgtcaaatatatatgagttctattttattatagccaggcttggagtaataatttaaataaatgttggtgtcgaacagtatacaatagaatgtagatgcgtgatcaactattgcatcacattgaaaattttgatagtacattttcttaatgataatagaagttactccctcctagaaaagaaacctcgtactggatgaatgtgacatatcctattttatatttatagtactagaatgtgtcatatccatggaggaagtaccttttagtcatatcacg

SEQ ID NO: 14576 - DNA, 2058 bp, Oryza sativa
cttcctgatcttgctggtacatgcattcgatctggtcttccccggaggcggcggcggcggcggaggaggagaggacgatgtcgtgaagccggcgtcgctggagctgagcaaggtcgcgttcaccgggttcctgaccgtggcgatatctgccaggacgaccagccgtggcccgctcagcacgtccacccagtggttcctcatctttgcagcgtcggccattgtttcgggcttcgcttggaggctcctgacgcaggccaaagttgggaaaagtgccaatgtagcttccttctgcacgcatttgtgcatcgtgcttgcaacggtgccatttacagttatggccggacaagctctgcactgattatttgtttgtactacagggtaatttggagggttattttgacaggcaaaaattaataaccctttagttgggtttggatgtttggtccagaaaacttttctcttcagtgacaggagtaggactatactataccgtttaaagtgttcagactcaatacgacataattttacctactcagttattttataaaaaaaaaattaaaaaaagacctctttttttacctgaagactactttggattgaagtactgaaatacatttttttagcaaaaaaataaaaaatcttgacatgggatgatcaggttactattcatgttttgcccttttgttatttcttcctctccttaggcctggtttagtttcaacgatacatctaatctttggacacatgcatggagcagtaaatatagataaaaataaaactaattacacaatttgcatggaaatcacgagacgaatcttttgagcctaattactccatgattagccataagtgctacagtaacccacatgtgctaatgacggcttaattaggctaaaaagatttgtctcgcggttttcaggcgagttatgaaattaatttgttcattcgtacccgaaaaccccttccgacatctggtccaacatccgatgtaaaacccaaaaattttcttttcacaaactaaacaaggacttggtacaagccatatcttgtgcattaaaacaactggagaaagattccatgtaatcaactcgcacttcaatttccctgaaaatactactctacaagtcacttgttcaatattccacctcataagccattttattacaaatatttagccctactcaattttgttgtaaaaaccactctagtatacacatgtttagctgaatcaacatgttttcataaattgtgagctatcaatgtgattcattaccatagttaaatacttctaagagtagtatcaatgctttttggagattccataaatataattgttgacgacaggttaaacattatcacactaagtctcgctatatgcaaaaaaaaaaatcaatggaacttgaagaataagtttaatgcaagcacttgaataagattgactcgactagtttaacaacaacagaaaaacgagttgatttcgttaagcctgtggttaagcagtcgaggagctagaggctagagaacgcgaccggagctcacgcagttttagtagacggagtcctcacggagatgaccgatgcaggcggtggggctagacggtgttggagctaagaggacggctagcaacgcgaccgctctgggcagtgggagggggcagtagtgggcttccgccttctgtttggtttcttttttgagtaaatcccttgtgtacacatgaaaactcacctaatcccttctataccctcgaattttacacgatcctctctgtacccctgaaattttgctttgatcccttccatgcccctcccgttaggtttccttcattttcacgttatgtgtggttccaaatgtctaaaacacccttgtagatggaagagtgccagctagagtggcatcaggagggagatggccggcaaagcccgcgcggcaagaggagcggcgaccggtggcccgcacggtgggaggggcggtggccggcgacgcccgcgcgacgggaggggcggtggccggcggcccttgctgtgggggcgcggtggccggcgacacccacccggcggg

SEQ ID NO: 14577 - DNA, 7434 bp, Oryza sativa
ttcgttgctagataattttttggaggagcttcaagtaagaaaggatgatgtttcggacaccaggattgcgttcaacaaagacccattccttgatgatgctgtcttgtcaaatccaagcaccagtaatggcaacaagtaaatgaggtggcaagtcttattcatccccttttgtaacaatgaagttgtaacattccttcttgtttaatatactgtcttttgttttgagagaaataagagaattagagaatttattatatgttacaatggaaatttgaaaagcatatgcacatgtatggtgatcctgaagatgcgatttcaggaaacaacaacgatgacactagtcggtgacgtagttgttccccacatatgagctatttctacaagggagctcctatcactgtagctatagtcatgcacccccatggtgcgcatgctgttgctgttgtcgatgttgacctcatgcacctctgccttagaccccacttccaactcattctcttgtgactccaaaggcagcatgctgttgtctttctctatcgtctgtgccacgctactgctcactcccgggcatgggcctagattgggataactgtcattgccaataagagatggagctcgattaaggcaatttcatctattaattagaatgttgagtcggtttgttagagatttggtaagagaccgccgtatatggtcttatttgtattaactttaaaaataatagactgagtttgtactcggcatataaatatgaaccccatagcattgaaataagggagccaatccaatataacttcggcgcatcgccatccttttacttttctcgtttttagtgagttcttcgcaagaggaaacccgtctcaatggcctgcgctatcggggctaacatgttaggctcgatatcacgagtcattgctatcatatctcttagttaatctattcttagcttctcaatttagctctatcggctgctgctcgctttagggtttatgctggtttcggttaaattgtcttggtagattagattagctaaggcatctaccatcctgaaaagtgcctaattgcttgattgtttagattgtatgtttcttttcatactttgagatgcatcatttctagtcgtgcttagaaccatgcaaactagtctgcaattagacataataaggatagtatcggggtttcagccgatcttacctaatatgcatgttcactatctgtttcatgtatattcaccacttatatagatagatcattttatataagcatatcaagctttagtcggtatcggctagattcttgcaccttcatgcttgatttctgtttgatatgtttttatggatcaatttgtttatataagtttgtactagagtattagctagtgcattatcttttctgctctaaatattgtcacataagctactttcataatattgtcttaaatcaatctattaaactcgatagatagtattatagccgattaggtgtgtttagggtttattattctttgatatatccagtccatagccgatttggtccaactccatcggctaagaccatcaacgatatgctatcggcctatcggccgattggctatcggtcgactaattctgcttttattcttttttgctgattgcatgatcaaatcaactagcacgcccttgacacacttgaggttagccttggacctgcacaggagttaagcagatatcccaggccgccgtgctttcacatcaaaacaagcgcaccgataagtagtacctctcatcgctcatgaccagcatttccctttttttttataagagatcagttttttctccatcggcaacccttgattcacccacgttacataggaagttaggtgatgggagatttgctcgagatcttgtgatcaacgacatcgtcttccaggctgacgtccctcgttgtcctcaacttggtcagcctcgtccaccataacctccctggcatcctccccgtggccagtcagatacagcctcaatgactgacgtcttgaccagtttgcttgtcttagtagtagggtccataggggtcgatgtttgtattccatcctcacaattcagcatgggaatctttctccgcgtcatgtatagatgctatgccacttgtgcttctcgtatgttgatcatgttattgcctatgggcttttgcacaacttgggtaccatatagatacatatggggcactttatagtagatattatggttttgatgatcaaaatcctaaaccaagcgacatcacacgacttggttttggtttttcatgcgaatttggtgaacattttgctatctcaatctgtaatttttatatatccccttaaactgaaccgttgagttagggtgcggcacctcttaattctcttgcaaccaattgcaaagctaaagacatacattaacttacagtcatatagtggacaaaagctgcatttttctaatataagtgtttgctatttgttgtagctttgtgaaacatctagctaaaagttgtaaaaacaataattttaacaatatgtttgtagttttatgaaatttactctttatttgactcatttatgctctaaatctaaagtttctaccaacatgcacattacttctaagtactaacatcacatcattcgattggtttctgtataaaccaatgattgcgtactactcttaggccctcttaaacttattggcttgaacttttaagctaaagttttagcttataagatttactagatgttatccagtgtgttgctgcaggatagctacacatataaaaaattgaaaattttccgctacagaaaagaataaagcaaagcgcaattttgtcgacgtttgcgatcgcgactacggtatttggatggtatggggatcgttggtactagggtatatgcaagattgaggtaaaagagatagagatagagatttttatacaagttcgggccccttatctgataggtaatagccctacatcctgttggcagaagccgatgttgctctttattcatctggatcacacaaatacaatatttgggacaacctatttagctgtcgtcgacttggcggctagataaccaactcatagttgatgacaaggtagtcttcctcctcgaatctgtactcggcgagatcagagatagtactaaatccctcttgccggtttccgtaggcaccggatggggtatagctaggctaatctccgatgtcgagatctaacggcttgtgttggcttgtggctttgtggcttcgtagattgtggtgggtgtatcccctctccacctaggggggcttgtatttatacccataggtgcccccttgtccaagtaaaactagggaaaccaatatggatataatctgattagtccgtcgtttccatatagaactctactcgtccttccttatccagaactccttctatatacgaggtttgtttccatataagacatggtatgtggtgggccctaccgagcttagtcgattactattgggtatgtggtatccataatcctgacaaatttgtagttaaaaatttgaattaagattttaatgtgttagcctatcaattttctatataccaaaatcaataaacagtgccaactacataggcttgcaagagaaacaacaaattccacataaccaagcagacaacaaaggtcaaatacactaaggatctagtcaaaaaataaaataaaataaaataagcatcatatgaaaacgatgaaagtgcatacatataattattagtgccatgcatattaatccctggagaaatatatactgccataacaaatttaaggtattacattaaacataaaattaattaaagactaatgtacatgagtaaatggctctttgttgatggatgaaatggttgactccttcaaccttgttgcaattatcattgaaccatataattctctacagaataatcgatgaaacatgaataatttcttttaacagaaaataatgtttcaagacgtgtgagcaagcaagctaacctgttaattaatggcaatccataacggggaaacgctgaccatggcagggacctagctagtacacagtaagcaaatgtttggacacaaaaggaaatcaactgaagcatggcaatgcaaaacaatctatatattctacgcatgtctgtgaagttaattgaagattcaaggcaatatatggagtcaggcgactgacttgagtttatatggtgttgttgaggttaagtaatacatgtttaaatgccgtgaataatttcagaagaagattaatgggaagaaaacaataaagagaatacaaatcaccggatggactgtacaattgtactaaaaagatgatccatgcatgaagatatatttaagttgaagtgccataattgttcatcaaaacgtaccaaaaattagagagcaaagggacgcagcttgtctgctccccccgtgtgctcccatccgtactcccgtatatgtggcaacatctccatcgttttggcccatgtacccgattacaaacataaatatttttctattataatataattatgtaagattttgttgtaaagatttaattgcaacgaacacaatggtataattggattgtagatcagataaataatttgaaagaaaattttataagaagagaaaaaagcatgcatacttaacgctcttatgcttctcaagtaaatcggatggctggcagatcgagagacctctcgttttagattttacgttaacaaataatgatacagtcttcttattttgtctcttttcttttactttcggaaatttcggcagcagtttttaaatttgaattcaaaatttatttgaaaatttcgtccaaaatatttttgttgcccccggattaaaaaaaggcaaaccaatagttgaaaccctaattgacactacccttaaatttaagaactaatcatgtatatttcactctcttggaaaagtttgagatgaagacggggagtagtttgtaatccgtacatgactactctgcttttccacctcttctgcctcctatcatgcattcatgcgagcacgccacctttctctctctctctctctctccctccctccctccctctcccctcttcttccccttccattcccgcaaacttcgccaatctgcaacccagccaggctccacacgatttcgcgaagaaaccgaaatccactcggttttcctgcggtagcattggaatatggaagagggattcgtggaatcaggatccttctcccgctcctcctccttcgtaagtgcgtccgaaatgatatctcagaacagggaaaccatctctttgcttggtcttgtttgattgttcttgggaggtttcgttaccctcgatctcggtttcttgcagggtgggttcgaggaatggatggcgctggtgaggaaacgcaatgggagtgggacgccctcctcgtcgtctccgcagcagcccaggtctggtggatttgctgcccaatcttcagtcaggtatatatcatttgtctcccgttgatgtattaacgatgaaagatttgcatctccgttgtactttcgttttccatgtctgacccttacatggatatagattgtactattagattagcatgattcgtattgtgatattttttttttgtaattgtgtttagattatcaccaattcaccatatcagagaaaatgaacaagatacttgtttatagatgtactaaagcatgatttctgctcattcattgtagaaggatacagtgacatgatttcaactgtggcattatgggcacgatgttcttagattgcctcattggatgaggttcttgataaagctcatatcattcagtatctgctaattaatatggtttctgtgcactatatttttcagttcagaaggactagaacttggtcacccttatagcgatgcgattgactatagcttatcataccaactaccaacaacaagcttatgggataggcttgggagggttactatgatggacatcgagtcaagtgacttcaactggagctctctctcttcactgcaccatacaaaacatactgatactagtacagaaccctacgaggatgacaccagcagaagttttgaggtctattgttttcacttgtatcttttacagattatgttttgcattgttggaaaatgttgtcaatactagttataatatcattttttttagaaaacaacagcaggagctctgccggaatttgattagagatataaaaacatagttatactgtcatttcccaacaaaattttattaccatatacttttatctgttttcgaattccattacaaagtgtacatctttgcaactgcatcgtagatatgtatctatcagcataagcctaaaggccagtgcattatcctgcgagagacttcatgtccattagcattccccttcatatgaatgttcaaaataaatataaattttgtttatttgtcatgtctctagctcattttctacatgtatctttcttcataggttacagtaaattctggaggagttgttttcattgcattattcaaaacatctgaatatgatgaccttccgtccaaggagactgcagcggtcattaaaatagcgccttcaaggatggccactcaatcagaacgctttggctatgaacttgcgaaatggcttggagtgaggactcctcaggtgaacacccactttgcttgctggaattctggttaaccataaaaatattacattgcactactctgttggccaatgcagggcagagtgattcacaacttctcatctgaatggcatcaaatgaaggatgcagttgagaacgctcgggatgcagcgatatcttcttgtgatgaactcgaggaaatgatttgcactgagatgctagaggcgctcgaattgagccgatgcttattcctaatgaagtatacacatcaagctaccagtaatgtacatgacggaaatggtccttccttaacatgaaagaatttttgtgctgttttgcagttatgtacatggctcccctctgctagagaacacaatgccatttgattcacatgattctgctgaaaaaactgctgaagctttaggaagggtcttgatactggaccttgtactgagaaatgaagacaggttgcgatgccgcccccttggttggcggggaaattacgcaaatttacttgttgccgacaggaatgcttatgcaaacctcgattcattagatgatgtttatgattctgcaatcattcgttacaagccagagatcatcagaagccctcagaatcggaagccgagaagagcagtttcaataagtggcagtattggctcagatacatctgatctcatgtggccggacaatcctagtcagcctgagatttccagctttcacatcatagccattgattcaggtgttccacgcagaccgcctgcttgcaaacgggcgaaagatcaagagagctatcc

SEQ ID NO: 14578 - DNA, 2679 bp, Oryza sativa
cacctctcctcctctcccgttcctcccctccacctctcctctcctctccccccttcctcccctcatctctcctcctctccccggcggtggctcccctcgctccctccctgccagatctgcccggagtggggagggggaggctggtggccagcggcgtggggtggacgccggcggggcgcagcagggcgaacagtggcggctcccctccctccatccctccaagatctggccggaggggggaggggggaggccagtggccggtgtcgcggggcgaacggtggcggctcctctcctccctccctcccagatctggctagaggggggaggagggaggggggaggccagtggcgcgtccgtgcgacggcagcggcggatgcagagggcagtcatggcgaggagggtggaggtagggtcttctcccctccctcctcccagatccggcgatgcggagggcggtcgctgtggcggctaccagcgaggatggtggaggcggcggcgtacgtctcccctccctcctcccagatccgatggcgtgaagggcggtggcgtttgttttgattttgaatgttaattggcgatgcgtttgttttgattgtgaactatgatacttctatgttaatttgtgatgcttttgtgaatttgatatggattgatggagcatggaaactggattggattggggaataggaactggatggagcacagataacgggaagctgctgctgctgctgtgggtggtggctgccaatttttttaatgctcagagctcttttctcaagcggaccagttggaactatgatgcttatatgttagtttgtgatgcttttgtgaatttgatatggattgatggagaatggaaatgggattggattggggaataggaactggatggagaaccgagaacggtaagctgctgctgccgtgggcggttgctgccaattttttttaatgctcggagctcttttcgcacgtggaccagttgtccgcctgtgaaaatcaactatttttttcgtagatgctcatttgcaggcggacagctggtccacctgcaaaaaacacttatttagtccgcctgtgaataccttttttctagtagtgtaatgagtaaaatgtatggagcttcccttaacttgtttagacgtgttaggtaagtcactctactttcaacatatacatcaagatcactactactaaacggtgtgtttttttcaacaaatatctataggaaagttactttaaaaaattatattaatcataaaatacaccgtttagtacttttgaaaagcgtgcaagcggaaaatgagggttgggagttgggaaccctggggaacgaacagagctaccagaatcgcgaattcgattggctaaatccatcagcatgtgtgtatacgttcagttttacccaacagtattgtcagtttgtcacgtctggactcacgagttgatcatggacaccatgaggaagcgagtacaagctttcacagaaggcgtcgtgctaatggtgtgcccggttcttctcgccgtctcgctcaagaaagccgacctgaagagcaacgggaacggatcgcttgtcggaggcggcatctcccctctcgccgccatcactctcgaagccggcttgctggccgtcctcttcctcggcatcaacgatagcctaccggcgtcccacggcctcctgctccgcgcctccaagctcctcgtccacctctgcgcccttctcctgatggcgctggccttcgtcatcctcctcctcatcgacatggacaggcacatgtactgcctcgccggcctggttcttgcgccgctggtgcctctcactctgttccgctgctaccgaggcgcgcgtgacggcggagacgaccacgcggcaggaggaggcgacgccgcggccacgctcgaggactccgtgaatttctcggccgctgtcacgacgcttctgttcctggggctggaagggctggcgttagaggggcagagcagcgccgcgtgccgcgggatggagcgcctgttcaccgcctccctcggcgtcacgtacctcacctgcgtgctcggcgtgttcgtcatgctggtggggacggtgcctgatccggcgatggcgagcaccgacgaccaaggcgacagatcagccaaggtgtgctacttcgccgagttactgaacgccacgttgtccgtcgccttcgccgtggtcgtcgtcctcatcacggccgcgccgctgagggagcaggcgtggctggtgttcgtcccgctaatcctgtcgttcgtgacatggatgtacagagctatagtcggcgacggcgtcggagagattaagccggcggcgtcgctggagctgaccaaggtcacgttcacagggttcctggccgtcgcggtgccgaccttcagtaacacgccggttggcatctcgacgcgcggcttcgttgcgctcagtgccgcggccgtaatgtcggaccttggatggaggctactgatgacgggccggatggaccgtaatgaccagaggagggcgtcgccggccatggtgtctgtcgccaacgttgcttctctatgtgctcatctttgcgtcgctgctgctgtgctcccattcgcaacgctggctgtcaacgccgtcagctcaagtgagccaggtagcggttgccactaattatgcacgcacgggtatgcggcagcggcactgctgaa

SEQ ID NO: 14579 - DNA, 1224 bp, Oryza sativa
tcctgcagcctttttcctttttctttttttcttctcttttttccccttcctctgtgacccgtgcagaggaaagggaaaaaagaagaatgagaagaaaacgaaaaagaaaaagaaaaaaagaaaaaaagagaaaaggacatgtcacgtccatgtggcattgccacatcagcgccacgtaggattctagagtggatgtgtcaatttgagacctagatgatacactttgacaagttatagaacatggatatgcattctgagagtttagggatctatatgacacaactctacaagtttaaggaccgccgatgcactttactcaaaaaatttcacagaggtcacgcgtaagatctcgatactagccaactaaatcatagttgaatgcaagttttatataagttattttacaattataatgtggttataatttagttacagtatagttacaatgtggttatactttaattatagtcaattacactatacttacatccaaaacttttttttcactcaaaaaacatgatgaagttttttttagatactcccttttgtcacaccctaaaaatcctaaatatataaattgttgtttaattggaattattagaatttattttaaaagcctagaagagaagatctaattttaattaataaattccaatataaaatggggccagataaaatttcattaaatactttgcttaactctataattcctagatttttctgggatttatttgagctaaggaagtatttttaataaatggaattgcatttcatgaataatttaaattgaaaaggtttttaaaatcctcttttggctttgggccgaaagtcggcccaaaaccttctctctctcctggcccaatccggcccgcagccgagccgcctgctcgcgcgcgcgcatccgcccgctgacaggtggggcccacctgtcagggccgtcgtcttccttcggccggccgccgcccgaaccctagcgccgcgccgccgtcgtctccttccaaatcctaccgcccctttccgtttccggtgaaatcaatagaggggaaatgatccccgggatcccctctaccttttctcttttggaatcgtcggctaaaatcgtttgaaatccgtggattcgagttcgattcggatcgatctctctcctccgaaccctaatctttccttctcgtcgccggtcgccgtgggccttcgccgccgccttccaacccctatacaaggacc

SEQ ID NO: 14580 - DNA, 4564 bp, Oryza sativa
gtggagatgatcaatcaagtgccacactagctctacaaatggaagcaatgcacttgaatcttggctaattaaccctctaacacactagatggatgaacacaaagctcaagtggatgtgaggcaggtgcaagaggtgtatgcaattgaattgggtgccaagagagtccccttgctgctggcgggggagtatttatactcccacccaccaaaactagccgttgggggcgaaatcccccaatcattgtgctctgccggtcagaccggaggtatgaggccggtcagaccgtgctactctgcaacggctagaaaactagccgttgtagtgctgtcagagggccccatcggctcggccggtcagaccggcgttgagtgggcggttagactggcctcggctcggtttgaccgaatacggctccgtcggctctgtatcgaccaccccgagtagcaccatcccggcctccagggggccggtctgaccgcgcatgagccgccggtcagaccggccttatgggccagtcagaccgccgttgtgaggacggtcataccggccagggcacgccggtcagaccggccacatagtggccggtctgaccgcccctggtcaggccgagctcagtgaaagcaaaggtgagtgtgtgtgtgatgaaaaagtgagcacaagtgaaaatgcaatgacctaatgtggcaatttaatcatctctttgctaggtcataacccctcttaatagtacggcgaaactagaaaataaagtagcaaatttgatcgccctacacctcgatcaattctaaattaaagcactagttttaccgtcttctttctctttgctttgcaccgtcaattttaatccatcgatagtcattgtcacgcccagaaattcactagtaatttccgaacttatttgtgcataaaatcctcgtccaggaatcagccgaggtacacaaactgacaatttaatatacaaatccattataataataacgttacacacttacaaaagaaaagaaaacaacagcgaaataacggtctagcgatggcttcagctccactcccacaggcagctcaactggggtataagccaaacgtcttctacttctggatcctttttcttcaactgaggttgattgattattgcaagaatgagcatatgacatactcaacaagccatacagcaaatatgcaagtgcacaaggataccaaaggatggcataatataggctcatttgcaaaagcagcatttagcaaaacatttaagagaagtaaaacagtggagtaattaatcagaaattttaatcaacactgaacaacacacccatgctgcacaggcctaaccatcctgaacaaccatactcggctgtacagatctaactccaaaccaggagctaaacaaattattaccagttatagcatcaataattattgtgagaggtgtgagactaatcacgaaaaacattgctcaacccgcccataaccgcgggcacggttattcgaatagttttactctggccagaggtgttccactgtacccacaagacacagcctcaacatcatgtctaccatgcgtcgcgatactggaaagtacccgaatagaggctgtgacaataccctctgcacaacacaactcaccacagtgcaccattcctggatcataatcacccccttataaaacaaggcatggactcccaagcgacccccgtgggcttatctccgccacttctcagtctggtgctccgcaatgaatcatgttatacaaaaggtaaagccgttgcccacgctggcttgtggttggcacggttaatgtttcacaacagtagctcgcgaaccggtccttaattgccatgagcacgactctcaaaaccatgtgctcacaacccaccattatcaagttttagttggcaagtaattaattagccaatcacgattgaccatcgtgaactatcattaagccatcattaaataatagtgagtcataagttatcccaatagagtgctaatgtttctaagcatggctaagcaatcatatctaatatctagctgaaccaatatataaaactcaactagtcaagttataataacccaaggtatcaaggaataaagtaatcaatgcaaacaggccataacaaaggaatagattcacaccacccagtgacattcgaaaataaatgcacagttaaaataaatagagaatttaaatataggatcaacatactcaaaggattgtgtttaggatctgtgtgacttgccttgcaataatcggtcttcaattaatcttcttgaatacttccggcgcactcacgaaccttcgcaacgacggaaacgacaagctaacacgcaaaacgaagaaaaagactaataaaaaccaaataaacagtacaaaaacaagcataaacagtacataaggatatttttaacatgtagatctcgattttagatgaatttagcaacttgaaccagtcgaaaccgagttacgatgatttagttatgaatttccgaagattgaatctattagaaaaacaggaaaaagaaaaacgatgatgacgtcatgatgacctcatcaatggccggaccaagatggcgacctcgccggagattggatggtcggttgcgactttggaggacatgtacacgtagaggacgacgagatgaacccaacggtactcaccctcgaaccaaacgacgaacgacgacggccggcgacgaggtctagcggcggcgcggcttcggtcgacggcggcgacggggctctggtgaccggcgacagcggggagagagcggccgggcttctccaccctcccgcgcacctaacggtggtgacggcgaccggcggcgacgacggaggcggcggcgcgacgcggatggagctcggccggcggcggcggcgaacttggcggcggtggcggagaggctacggggcacgggagaggggcaaacgaaagaggaggactagggggtcctatttatagccatggaaggccgggatcgagcccacaacgacgggaaaaactcgggaaagtttagatcttcgccggaaaaaggaaaggttgaaccgtgaaattggaaaggatttccatataaacttttggggatttcttggggaaaaggaagaggagattgagaggattccattcccacaactaatttggagaaaggagcacgatgtggctggattggtgggaggaggcggcggcactgtgcacgggctggagagctcgggctctgcctgagctggaaaatgaacagtagctcagggaggaaaagtagacttttccggctgggctgagaggagaggaggcagctcaggttgggccggcggaagagagaggaaggaaaggaaggaatgggccgaaaatggcccaagctgaggaggaggatttttatttacttttccaaataaattaaccaatgagatgatctttcaattgttaaaaatacttccaatgctcaaataattccaagaaaaatcttgaacatacttggacactcaaagtatttaatataataatatccagatcatttaatgattaatttattatgtgggtaattactgaaatgctctttgtaagattaaaattaggaattgagctccgaaaaatccgagaatattccagagagtataattaaccatggagaatttaataaaaattaaatccatccatgctttatatttaggaaattttatttcccacatttaacttcacttgaaaattaatgaacatttaatataaattctaataataatttattaaataatttataaatcctgaaacaaaaatcaggatgtgacagtcatccatgcgcacacatgacgtggacctaacttaaaatattatctcaatagcaacggttagtccacaattagcacttgtcattaattaccaaaattaacaacgggggcctagatgcttcaatctcccccttttttttaattgatgacaaacaccacaaatatatatataatcaaacatagaacacatggacatatattgcaatgacaaccaaaagctcccccctaaacatgtgcatatcaatcatagacaataaatatggagccaatgcacatttcaatatcacattccaaaaagcacaaaacacattagcaatatatcaatgtgaacttcaatccataggaataagatggtcacatatatcaatatcacatacaccatccatcatcacacaagttcacatcttaaccatccaaaacacataactcacaaatcatcctaaaagggttcacaaataaacataggctattacaagactacgaggggtccaaatgacatagagtttaataaaacgacaaagaacacacaatatagagaaatagctcatacccatacaaaatatagcccaaactaccttaacctattagatatgagggcactatcctcactactactagtcccaacccacaaaagatagatgtcacgaccggaaatcacccaacaggcgttcccgacgtgcgtgtattattccttgtcccaggaggcaaggtacaccaaaagttgatacaatacagagtttaacaagcggaagcgtatatagaattattacatgggcaacgaa

SEQ ID NO: 14581 - DNA, 1092 bp, Oryza sativa
  unsure (1)..(1092): unsure at all n locations
accgcgtgaanttgannattgattnccnnctggcaganggcttctatgcgtattttattcagcacaagcagcgaaattcccttatctggctgcctactgatggtgacgccgaaaactttatgaagtcgcatgttgagccgacgattcgcgatattccgtcacttctggcgctggccccctggtatggaaaaaagcaccgggacaatacgctcagtatgaaacgcttctccaacggtcgcgggttctggtgtctgggtggtaaagcggcgaaaaactatcgtgagaaatcggtcgatgtcgccggttacgatgaactggcggcattcgatgaagatattgagaaagagggatccccgacgttcctgggtgataaacgtattgaggggtctgtctggcccaaatctattcgcggctcaacgccaaaaacaaaggggacctgccagattgagcgtgctgccagcgagtccgggcatttcatgcgttttcatgttgcctgtccgcactgtggtgaagagcagtaccttaaattcggcgacaaagagaccccgttcgggctgaaatggacaccgggcgaaccctccagcgtcttttacctgtgtgaacataatgcctgcgtcattaagcagcaggagctggatttcactgaagctcgttacatctgcgacaccaccgggatcttgacgcgcgacggtttatcctggttttcatcaacaggcaccgaaatcgacccgncagacagcgtgacgtttcacatctggacggcatacagcccgtttaccaccttggttcagatcgtttaagacttgctaaaaacgaaaagggatacanggaagcgtaaaaccctcgtgaacaccactctggccgaaacatggnagccctaaaatggtgaaccggcctgacccgnactcatggcccaaccccaaagagtctttgggggcatccgtacccggacgtgtggttatttggaaaccggatcgactcccaactggatcaaattgaaatgcgctcttgggatgggggcccgtgaagaaacttgcttatttaccgccaaacatatttggccgccatgatgatgacccgacctctctaagg

SEQ ID NO: 14582 - DNA, 607 bp, Oryza sativa
  unsure (1)..(607): unsure at all n locations
ctgggcaataagggccctttacgtttccccaattgttccggcaaaagtgatccgctcccgtgccggcagcacgtctgaattcacgccgggttatgtgaagccgaaacacgaagttaacccactgatgactctccgccgcctgccggatgaggatccgcagaatctcgctgacccggtctatcgccgtcgccgcattatccttcagaacatgaaggatgaagagctggcgattgctcaggtcgaagagaaacaggctgtttcggcggtgctcagcggtaaatacaccatgaccggggaagcgttcgagcctgttgaagtcgatatgggccgcagcgctggtaacaacattgtccaggccggtgcggctgcatggtcaacccgcgacaaagaaacgtatgacccgaccgatgacattgaagcctacgcgctcaacgccagcggtgtggtcaacatcattgtgttcgatccgaaaggtccgccctgcggcgttcttnaaggctaaagaangaagatggttgggggtcggggtttttacccctgacgctggcnccctcccttaaannnccgggtggncgtagattgtaggcctaccgttnnnncacttccg

SEQ ID NO: 14583 - DNA, 2315 bp, Oryza sativa
  unsure (1)..(2315): unsure at all n locations
aacaggccagggaccctgacttctccccgtgggcagcgttgaaagagttccctcccggaacggggcacggcgcgcgcgcgcaggtcggggacgccgccgaccacatcgtccacagcttcgagggtacggcccctcagctcgcgttcgcgctcgactccgacgaggagggcggtgacgacggtgcggacgacagcgacgacgaggccggcgacccgggcgcgtcggagtgagcccccaggcccccgccaatcttaataacttttccttcttcttccgaggcctttgagcccccttcttgtatagactgatttaatctgtaatcaagtaacgaggaaatttctgcatcagttctgtttgttgtgtgtatgagacaaggatggtctgtgccgcggtccttctgtgtcttggcttgaacaagggctcgtgcccaggtcccagcctcaaacggcgcgggtcggggctagtgcctggggagatccacgtgtcgagactggccaggccgggagtgcggtgaccgagggttatggatgacccgattgtgggcctttgccgattcccccccggagttcaccacgccccggggcacggctcggttctgggccccgtttggcgattttagccggcccgtgccaccaagggtagggtcgagcacgagcgtgctaattcaagccaagattcttcaaaaggaaacaatggcacagacacagtcctcaggaaatcgaaaatgcttttatagaaatacggaagagaaaaaaggtaagtatatgcatgtggtagcccccggccaaccctgcacgcccggggggggtgcggggttggcccgagcccgagacatgacacccgacccccactaggggtagaagcgacgaaggtgttcgatgttccgcgggttaggcagctctgtgccgtcgcctgtggctagccgaacggagcccggccgggggacgccgatcactcgatacggaccctcccacattggtgagagcttgctcagtccagcacgcgtttggacgcggcgtaggacgaggtcgtcgacgcagagtgatcgggcccggacgtggcgctgatggtagcgccgcaggctctgctgggagcgcgcggctcggagggccgcgcgctgccttcgctcttccaaatagtcaaggtcgtctcggcgaagctgatcttgatcagcctcgcaatacatggtgacccgaggggacctcagggtaagctcagatgggaggaccgcctccgcgccgtagacgaggaagaaaggcgtttccccggttgctcggcttggcgtggttcggttcgcccagagcaccgctggcagctcctcgatccacgagtcgccgtgcttcttgaggatgttgaaggtcttggttttgaggcccttgaggatttccgcgttggcgcgctccacttggccattgcttctggggtgggcgggggaggcgaagcagagcttgatgcctatctcttcgcagtagtcaccgaagagctcactagtgaactgggtgccgttatccgtaatgatacggttagacaccccaaaccgagcagtgatgcccctgatgaatttaagcgcggagtgcttatcgatcttgatgaccggataagcctcgggccacttagtgaacttgtcgacagcgacatacagatactcgaacccgcccggggcccgcctgaacggacccaggatatcgagcccccaaacaggaaacggccacgaaagaggtatggtctgcagggcctgggccggctgatgggtttgcctagcgtggaactggcacgccctgcaccgccggaccaggtcgaccgcatcgttgagagccgtcggccaatagaaaccctggcgaaaggccttgccaaccaaggtgcgtgaggcggagtgggctccgcactcgccttcatggacatcggcgagaagctcgacgccttgttcccgaggaatgcacttcaggaggactccgttagccgcgcgccgatagagggtcccttccaccagcacgtagcgcttggagatgcgccgaacgtgttcactcccttcgcggtcctcgggtagagtcttatctgcaaggtacgcctggatctcagtgatccaagcaatcaatctaggggagctgggagcgctcccctcgggtcccgaggcttggactccgacgggcctcgggggccgttcaggcgcatccgtctcccctagggggtcgggtcgcaccgatggctgggcaatcctttcttcaaaggcgcccggtggggtctgggctcgcgagnnnnnnnnnnnnnnnnnnnnnnnnnnnnnnnnnnnnngagagctgcccacgttncactct

SEQ ID NO: 14584 - DNA, 732 bp, Oryza sativa
  unsure (1)..(732): unsure at all n locations
agtgtggnnnagtggatcatnnnnnnnnnnnnnnnnnnnnnnnnnnnnnnnnnnnnnnnnnnnnnnnnnnnnnnnnnnnnnntggcgcccccaatcgtcgggaacggacgcgtctttcccggccgccttccatggccgccggccgggtttcccgtcgccgttccgccctctcccatgcccggcttgcttccctccgctataaaatggaaccccctctttgcgttctctcgttttagccccttcccgagctcccccgtggccacaccacctttccccgccttttccttctctctctccggggccggccgggctccagccggcttttccttctcgtccgagcgcccttcggctgtgccgtcgcctcctccagcgtcgcaacccgcttcttttcaccgggcttgccttccgttcgcgcggggacatatgacatgcacaacgctgatggagtagaaaaggatgagcatacacacaaaataaagggtgcaatatttcaatagctctagaattagcagatgcttatctagggggacagcaaatattttatcagcaagataaattcattaattactttcctaattctttcagctatggtttcttctgtatgtgaaacatttattaacctaaagccctaaactcttttttgtaattggccatcttcatcaccaaatgaacaactacgcttaggaaattctctctagctctactacttcatatatcttgagtaacacaaac

SEQ ID NO: 14585 - DNA, 1158 bp, Oryza sativa
  unsure (1)..(1158): unsure at all n locations
gctgtccagggtaatactctgtctnnnnnnnnnnnnnnnnnnnnnnnnnnnnnnnnnnnnnnnnnnnnnnnnnnnnnttggctgccgcgaacagcacggtgctggacgggttaagtgcccatatggaggccctgcaggcggagcgggcggagctcgacgcggtgtgggctcgcgtttaggaggggtggcgctcggtggaggccatggtggaggcgggccgcaaggcgcaccgccggcacgcctcacagctcgaggcccatcgtagggacctggcgaagatcgccagggaggtggaggaggagcgggagactgccctcatcgccaccgccgtgctcgacgaggcgcgggacgacctccgcctacaatacgggagccgggcgcggagctagaggagaagctcgacgccgcccggggagtccttgacgccgccgctgcccgggaacggcgggcggaggagaacgaggcggcgtcccggcagcgcgaagaggccctcgaggctcgcgccacggcactggaagagcgcgcccgcgccctggacgcgaaggagagagacctgcggaccgcgaggccgccgtcgccacccgggaggcaacactggcggcgcacgaggccgcctgcgccgaagaggagtccgcactccgcctccgcgaggacgcgctcaccgagtgggggcgagctctcgaggaggccaaggccgcggcgcaacggctggcggacagcctgttcctccgcgaggcagcgcgggaagagcaggcgcgccgcaatctgaaaggcgcccgcgccgagagggccgcactggatcagcgggccgctaagctcaaggcgcgggcgaaggagctgaacgcgagagcgcacagcggcggagcggccgcgggcctcggcgacctagccgcccgcctcgcagccgccgaacacaccatcgccgagctgcagggcgcgctggactcgtccgccggggaggtcgaggccctccgcatggcgagcgaggtannggcccgcatgcttcgggacgccgtcttccgtctagaccgcgccgggcggcaggcgggccttctgggcgggcggtacgcgaagtacgccgnncaacagggggggcctcgcccagggctttcagagatggccgggccctcgagcggctccccgaggagctcgaagaga

SEQ ID NO: 14586 - DNA, 743 bp, Oryza sativa
  unsure (1)..(743): unsure at all n locations
cgcgccatgaanacctgatnnnnnnnnnnnnnnnnnnnnnnnnnnnnnnnnnnnnnnnnnnnnnnnnnnnnnnnnntgtgccctacccttgccgcactcgctcgctctcaagctcctcctccgccggcgtcatggcacggggctgcgcaccgctcgatggtagcgtgctgccgccttcccgcatcgtgagcgagaggcaggccgggctgccgcacctattcatgccggaatctgccaccggcccggaggtggtgacgctgggcgaggggcgcccagcgccacactacccggggcggtccgtcttcttcctctttttcgcaatggcggggctggtcccgccattctctatttttttcatggatattctcgagttttatgatctacagatggcgcacctcacccccaacgcgataatgacgttggccatcttcgcgcacctgtgcgagatgtttatcggggtgcgcccatctctccggctgtcccggtggttcttcaccgtacagccggtgtcgccgccgacggtagtcggtggctgctacttccagccgcgggggcaggtgctgaaccgctacattccctgcgtcctccgcaaaaagtggaacaattgaaaaacgatgggttttaccttcctttgccgacaaagcgcgcttcaacttccggagcagcccacaggaaggcctccatttggcgccgcgggtaaatctgagaacggttacaacgccttttttgaccgtcgggcggtt

SEQ ID NO: 14587 - DNA, 718 bp, Oryza sativa
  unsure (1)..(718): unsure at all n locations
aaaaaaaagtgactgcntctcttgtatacccatattgaatatacacttgagtttggaatttgttattctacttcatcttctatatgcttaagtggatattctgatgctgattttggaggttgtagaattgataggaaaagtactagtggaacatgttattttcttggtacatcattgattgcatggtcttctaggaaacaatctagtgttgctcagtcaactgctaaatctgaatatgttgctgctgctagttgttgttcacagattctttggcttttatctactttgaaagattatggtcttacttttgagaaagtacctcttttttgtgataatactagtgctatcaatattgctaagaatcctgttcaacactcacgcacaaagcacattgatatttgtttttactttttgagggatcatgttgagaagggagatgttgaattgcagtttttggacacaaagttgcaaattgctgatattttcactaaacctttggattctaatcgctttgcttttctttgtggtgaattgggtataattcatccttttggcatggtttgagggggagtttgtacctcatggntttatcgagcaataatatgacaatgagaaaaattgagaaaagagagncttgttatacatatgagattttcttgacatgctagcaatctttgaaagttatttgtctaagctagcttgatgtatctaatctttg

SEQ ID NO: 14588 - DNA, 1213 bp, Oryza sativa
tcttaagcatggtgataatcaactttttgctcagatttatgtggatgatatcatctttagttgttcgactcacgctttttttgtagattttgctgagattatgcgcagggagtttgagatgagcatgatgggtgagttatcgtactttttgggattgcaaattaagcaaacacctcaaggtacttttgtacatcaaacgaagtatacgaaggatcttttgagacggttaaagatgaagaattgcaagccaatttcaacaccaattggttctacagctatgttggatcctgatgaagatggtgaagctgttgatcaaaaggaatatagaagtatgattggatttttgttgaagctaactggctttaggccagacatacaatttgctgtgagttgggtgcacgctttcaagcttctcctcgtgcttcacattgtcaagcggtcaagcgaataatgaggtatttgaatcatacacttgagtttggaatttgttattctacttgatcttctatatgcttaagtggatattctgatgctgattttgcaggtggagaaatgaactggaaaagtactattggaacatgttattttcttggtacatcattgattgcatggatcgtgtttatgaaacaatctagtgttgctcaatcactgctcaatatgaatatgttctgctgctagttgatgttcacagattctttggcttttatctactttgaaagattatggtcttacttttgagaaagtacctcttttttgtgataatactagtgctatcaatattgctaagaatcctgttcaacactcacgcacaaagcacattgatatttgtttttactttttgagggatcatgttgagaagggagatgttgaattgcagtttttggacacaaagttgcaaattgctgatattttcactaaacctttggattctaatcgctttgcttttctttgtggtgaattgggtataattcatccttttggcatggtttgagggggagtttgtacctcatggttttatcgagcaataatatgacaatgagaaaaattgagaaaagagagctttgtttatacatatggtattttcttgtacatgctagcaatactttgaagttatttgtctcaacatagcttgatgtattctagtcttttcatgagatttagattttacttttaagggagatgatgcatgacacttaaattctatacttgaatt

SEQ ID NO: 14589 - DNA, 21103 bp, Oryza sativa
  unsure (1)..(21103): unsure at all n locations
tactagaaacaaaccctggaacagaatcatgcagatttttattagaaaccagcaacatgcatttagtttacagaaaagtagcatcagacagacggtcaaagagagagaaattgaatgagcacaaattgaaaaacacaagcagaagtgcaaacacaaatacaccaccataagacattcaaacagacacatgattgaactagttaatactatgtagatggacaaataacctgatgaaagtgtggagataataggaaagtgaatgaaataaattaacttcgaaaactcagggttcacacttaccttgcagagagtggaatgcatagaacatgacatatgtggaataaataaaggaggtgctaaaagatctatcagtaatttctccacaagccattttgttcccatcatttccttattctttttatgtaactttttgtgcattttctcaacccaaccaggacaatcaaatgaattatgtccacaaatgcccgatgaactacttgaaggtaccacgtatcaatgcatggtgaatggtataatggtagtgctgagctactaaaaccacatatgagttatctcatttgtctcttcttcccagtattatcggaaacggacaagcgagttggctcatgtgtgtgatttcggaaagagaaacggcatgcaagatactactcagaagacgacaaggttgctgaatccgagtacgttttagatttggggtgctcaattcggcaaaaaacaattggccacatttttcaggtaacactgcttctttcaccagacaaacttaaccactacaattcttgatcagcacggcaagttcactggaaccaaatatactgatatgctggaaacaaactaagcaaaggatgcccaggtaggattgaaatctgcctaaggccagaactaataaccaccttttcctattagagctgatgagaagacagctcattctgcagtggcatcgttaataattaccaatttcctacagggttacataccacattagccctagacaccaataatacacatcagatggaaattttattaaattattcattcagccacccttccagtggttagaacattgcattattaattggatgccatatttgtaaatcaaacatgtatcctatgaacacaagggcagaatgtgaggcaactgattaaatgtgacaagttcataaccacttcaaagtctgcactagactaaacagaatagcatggaagaacagcatgcaaaaattatttgcatgggcacactgcttcactcatgccggtagctcacgcggtcatgtcctcgcaccactccaattcaggatgcatgccaaagaagctcgaccaatcatcaatcgcatctttatccctagcactgtcctaaatccacacaactcctacagcactgaaacatcaatcttgcctatacctacaagtactacgccaatgattgaacacagtaaaacttcaattgcaatcatgacgctacaaaattggacattattcctaattgatatgctaccgcaacctcgaatacacgcagttagctaatcgcaacaagctgttaatcaactaacatgttctcctccaactaacggaaagagtaacacaccgtggtctttggcaaagctcaagaagccgcagaattcagcgagaaaaaaaaaatcagacgaacaaccgaatcaaacgaatcaggcgcagcaatcacagctaaaaacgagaggagctagttcttcttccccctcacctcacagtaaacgctactatcaaagttgaccaaccaagaaagggaacccaacccaagctccctccagattcagagccggcaacccaccaaagaaccagccaccaaacccacccaaatccccaaccctgaaccgccccccgagggcggagcaaccaccagcgaaagaagaagagatcacaccgagtccaatccatccatccacccacgagagattccgggcacagatcggagcaaaaagcagcgaactttcggggagggagggcgagagggcgccgaatccggcgtcaagatcgcaccttttcgcgtgccccggcgccggggaagaagagaaagccggcggcggcggcgaaagaaatcgcggcgaggatgggatgtaagaggaggagcagtagcactggcagcacatgcagcacagcgtgtgtgagctggtgtggtctcccgcggtgcccttaaatacaccagctttgctagttgctactgctacagaagagagccagccacatggtcgtcgatgcggcagattcctctatcgtctactctatctttatctatctccgtgtgttcgtcgtcagaacgcgcgtgttagaagaagagggggggaaaaggcgtgtgcttttctctcctggttgtagcttttccttttttaattaagttaattgattgattgacagaggagcaaatgccatgtgccaatgtatgtgtgtttgtttatcaggaggatgtagagggttgtttctataattttttttatttataaaagtattatatttattacattcgtattataaccatattataagtagcggaactcaaaactatgtatatagtttgtaaatgcgagaagtcaaggtgttgctaggagtaagggtgtgtttttttaaagttataggtagattttcggcgacacgtgaaatacaagaaaccgcatatgattaattagtattaattattgcaaatttaaaaattagatttttttgatttttttaaaaaagaacttttacataaaaaaatttatgtgctaacggagatggtttgaagttgatgaaaataacgcaggataagctagtgggctgggttcctacccgggttgctcaacagcttcaaaattaaattctggactgaattatgttgcttctttctcaatactaatatttttggtattttacattttgtctgatgtagtttatgggcgtcatcatttaaaatatttataaatatcattgcagctcgttgcgtgagtctgaaaagttggttccactctaacgtggcttatgttaaggtaaaaattaatctaacaatatgaaggtttagaaggttcaaaatttctagggtataatttgacatcagggaggtataaaattaaattatatcagttcttatggcatgatttacacacgtggcatggatagattcaatgcatttgattgattcatccgacttttgacttagcttctatcaaaacaacaatattgaattggtcaaattataggagattgggccatcaaggatccacgttgactgacaaggcttagaccgatacctcaagagaacatattggtaattaaagatcatttatgcatttctagagcctttcttgtatggataggtcaatgtcaaacatttagatgataatggtattagggtgtgcaccaccatatgatagaatgtgaaggaaaaaagtttcacaaaaacgggtcatacagattcaaagttgaaatggactcatgatgtccaaaatgctcattttaattaaattgcggtaaccgatatatataattaaatggttatggagattactgttacacattgatcatatcctctaaatgccattttaacattttcatgatatgatatttgttatatgcttagaaattacggagatttactgtaatagaacctacaaaagagttgaaggtaagatgatatgggtaacatttagacgacgccttttattttaataccaatttaatatgtacacatgtaactctaacatatatatacctgtagcgtattacaaatactatacaacatatggttgtaataataacctaaaatatttctggtgtttcgatataacgatgcaataaaatagagtgagaggggagacaggggaattaatagaagaaagaatatatggtcttgatggctgtgtaccaaaattcctgtgaaatcgtaggacagagagggagatgtaatgggttggtgtgtgagggtgaggtggcaggctgagccgttggtgagggaggaggtaaccacaccggcgctggcacccggttttaatttgactgaccaaacgcgccgtcgggtcgggtcggctttgcattgcattggttggttcacatcacatgccactgccctgctgtccctgcccctccaattcttctcctcctttttcttttcttttgtttggaacacaatcaaaacgaaaagttcctccaattctttaattttagtccatagatgtgataacacaaaaatacattatattcagcctctttaagattatggtttttatttaagggaagatattctgcgtatataagttttgggtgtacttatgaatgttattaaagttttagaaaaaaattatacatatactttcaatagtattatagcctcatcttcagtagttatagttggcttctgaactttagttatactttggcggagtatatcattgtctttctttcttcagactgaatttggtaggtttgacatttttttaacaaacaaaaactagttcttccactcttgccagcctctacattttctgtaggagaaaaaaagtacagattgtgttagtttagttagttgcatgcttggatggtagaacaaacaaacacctaataggatgaaactattctgaaatgatcatcatagggatgaaaggaatagacagccatgagttggaggagacgcgcggcacatccaatccaatcatgatttgcatgtgggttagctctcctggctctgaattttttaatctcatttaattttcactctgcaaacaagcttgaagagaatgtcttatgatcagcttagattctgtttaagctgacggagattattgtgattgaatcttttgtatgcactattattcagaaaatccaaactcctcttggttgtcagtctcttgtagattgttggaattttgggttgtgtggacgtttcctgggaacaaaatcaggtgtttgatactccaaatgaatgcgaccgacaaattgagaatgcactactccgtattatctttttgtgtagctctgaatcaattgacagagtgagaatatcttctacactctttactgacatattgttgatcagacatggtctacaatatgtgaaaagtttcttactacatcagatcatttcttgaggatatatatgatgaaaagtagaaaaccactaactgttcagttgttcctgcaaatctatgaacttgttcttgataatcttctcctcttatgtccttgcaccttttgtgtatgcaagcgtgccagttaagctctacttaatttttttcacccaatgcttgcttgcacacgcataaagttaattcttcttttgcctttttgtgttagtacactaatgctagtaagatcattgctgtcaatttcatggtatgcttgtgagaccagtaactttaaatctctcatgtcatgtcctcacatgggcatttcggaaccaggatatcactggattaattcacacaaaaggagagcccgctatgtcaaataatttgtgaatacaacatgacatgttcttcactatctaaaagtaatggctttaaaaataaacttctatgaaaaaccccccaaaatcaactctaaatttaaggttgaaaattcaaattggttgataagcataagcgaaaagatgaggttgtaatttgtttgagatccatttttttaacactattaaatggcaagttcagcttattgtgctggattgcaacctgaaatccgactgcatgttcggcccaaagacagtcttgtgctttctatggcctatggacatgaattaggctgtgcccaacatgaggagcagcagcagacgactgataaaatctttcgcaaatcatcatggttggcaactgtcatgaggcctaaggcagacttaactgtcatagatattctaagatatttgagcaaagattaggaaagacaagattaagtgacaggccaaagcaggcctaagaaggttcagatagctcagcatggttggtaaaccaaaagcatcttctttaaactccaagctagtagcatgacaagttggattgccagcgacttggacaaccgattttatgggatgcattctgagctgtcagtgaaatcgacagcttaccttggatgcactctgagctgctagtgacatctaaaccctccttatttagtttgatcaccaaccaccatcagacttctaacattcaacatgtgtacagcatcaatcaacaagtctcagttggaatagcaaaagcaagagtcctaaagggcgtggtatcatcatggaccaacaaacatgttgcatgctcaacttcaaaaggcacaaaggtcacttccagcttcagcaaacacatgaactgagcactcacagatcaccagggaaccatatagggatagaataaccaaaacataggaggtttcatttcttcttctcaaagtagtgtagcatctttccttctttcaccattacataagcttaagcaataacagataacaaatcctcctcctcctctaggtaaaatattcaaacacaatacccttataagtacttattattaggaaagtagcgtgcatgggcataaatggcagcggggggcaggttaagaatcacaatgctgagcagcgaggaaacaaaacaccataatgggacagagcaaaagcctccgaaagggagcttttaggcagaaggcttctcccacttgaggggcttcaccacctcccaggtgaagtctgggtcgtcccttccgaagtgaccgtaagccgccgtcttgaggtagcgtccgttgccgcctttcttgaggtcaaggttgatgatgatcatgccaggcctgaagtcgaagttctccttcacaatcttgaggatctccttgtcagggatcctgccagtgccgtatgtgtcgacgaatacggacagtggctctgggacaccgatggcgtatgatacttggacaatgcagcggcgagcaaggccactagcaacaatgctcttggcagcttgccttgcgacgtatgctccactgcggtcaaccttggttgggtccttgccagagaaggcaccaccaccgtgagctccccagccaccataagtgtcaatgatgatcttccggccagtgagaccagcatcaccatgaggtccgccaatgacgaagcgaccagatgggttaagatggaagattgtcttctcatcaaggtactgctcgggaatgacaggcttgatgacatgctccttcaggtcagcagcaatctaatggtggggaccgtcttataaggtgggtagagatgaggacggtgtggacacggacagggaccctggcaccgctctcattgcggtactcaacagtcacttgggtcttcccgtcaggcttgagccatgcgcaggtcccattcttgcgaacctccgtaagacgagcgcccaagtttggtagcaaaggacatggtgaggggcatcaaatcaggggtctcatcagttgcatatccaaacatgtgtccctggtcaccagcaccaatctcctcagggcgcttggtgaagtggccggtgcacaccctgtgcaatgtcaggggactgctgctcgatgttcacaagcaccttgcagtggtcagcatcgagaccgacatcagctgacacaaaaccgatgttacggcatgtctccctgacaatcttctcatagtcaacgttagccttggtggtgatctcaccaaagaccatgaccatgtttgtcttggtgcaggtctcacaagcgaccttgctgtcagggtcctcggcgaggcaggcatcaagcacagcatctgagacttggtcgcagagcttgtcagggtggccctcgttcacagactccgaggtaaagaggaaggtatcaagtgcggccatcttctcctatctgcataaaatggtatttcacatactttagacaaagaaatatcatgaataaaatggacatggtgagcctatgagaaaaaaaggggtataagtgatagctaatgtgagggaagctgatagcgacaattgatttctggaaatgcttacataacacactgagaggacaatactgatccctagaacaaatggtttatgcaacaaaatttgtcctgagtaaacaggttaaaaaaacagtagcaaggaacaaaacattccttttaatcctctatatagcttatgtacgccaagatgctgttttgttggcacctgacaagaccacaattttgggctaaaatagttgtccctacaaagagttgactaagttcctaagttccttgggcaagtgttaggtatttgtaatattctctacaagcgcaacaagcaggtatagagcacaaggaatctaacaattttctgccggaatcagcataaacgcataatcaatcgtggtgccactatgtattgtaactatcacataaatataccacttttaggggtaaacatatcatggagacctggaaaaaaagagcgaaatcgctggctagcttttaggggttctactatactctttacatgtaatctttccacaaagacaaacatcataaatcattgaacatgcgcatcaactaatcaagagcataaaacaacagcagaaacatatcaattcgtcttggcatatttaactttgaagtggcaccaatcaatttttttttccattttccgttcatttataagaattccaactcccaagaccaaggggatgactcgaatctaccgcagaacagtcaaatgagctgacagccaaagacataatactagcactaaaaccactgctctagcatgttgtttatcagcaagccgtttgataagcatcaaggtattaaacatctaaaaggaagtcatcctactgcttctctctccatctccatccataataataagcaagcatgacaaaaataaaacttacaacacctaaatccaaccaaagaaaccccatctaaatctaccataccacaagatcgaaagaaaagcaataaaccctccttataaccctcccaaaccagcacaaacaaatcaatatctaggcacgatgatacgtccgcaagacaaccaaccacgagctcagatccaacctgagagcttgatcctaccaagaacgctaaaaccctcctctcccttttcaagccgcaagaatgaagggagaagccggacagcagcagcagcagcagcagcaacacacacgcgacaacgctaccagcaacgaggacaggggaatcggcggctcacctgcggcggcggtggcggcggcggaggaggaggagccgggccgatccgatcggggggaggaggaggaggtggaggaggtaaattaattagatccgaccgggcacggcgagatgggccttggtctcgcgcggcccatttataggccccccctcaccacgggaggcgggtgggcgcggccgcacgatgggattcggtcgggatcggacggtgggcgccgcgcgacgtggggagggaggagttgggtggcggacagcgacccgcacccaccaacacacgcgcacacactgacactgacgaggtgggccccacctccgggcggccgctcgcccgccaccaaccgccggtgggccccccctgcactggccgtggtgctgtctgcggccgcctcgtccacgcgtgattcggtcagggactttcttttcatttcgcctaatttaattcgatttttatttttcatttagacactgttgaaatatattttttttcacagactattgagacggattgtttaattgattaataaaaaaatatattttagaaaataaacttcagaaataacttcatatagtagaagaaaatattttaggaagtaaatatttttataagcgtgaaactaatccatgacccaaaatttggggaaaaaaaggggggggtgctgttttggttaagcgagagtgcatctccaccggttcataataaaaaagacaagaaaagagtgcttctctaccggttcaaaaaataaaaaaacatgagaaagtgcagctctaccggaaggtttgagagctggtgataatgcagtacgatttgagtcagagctagagagtcaacttctcataaacagggggagcatgacaaggtccaagttgctccttcgcctttcttactactagtgcctcttgccttgtcgcctttcataaattatcacggctacatattttcttcatctaaaaatataagtcatattttgtatctttaaaacaaaactttgacggaggatgttgcatataacaataatgtgaaaagtaatgggaattgtactagcaacactacttgaagtcaatatgccccttattccttagcatataggccgagtttagttccaaacttttttatttaattaaatattttctacacatacaaacttccaacttttccatcacatcgtgccaatttcaaccaaacttctatttttggtgtgaactaaacacacccataagcgttcttggataaccaagtctagaagaactactacaccccatcacgacactggtacttctcatggcgtgtagtcaaccatcaatgccgaacagcgcgacaaggtcgaggtttgtcgggtttgcagaaatgtatcttatgtgaccaacacgagaaaacaatcgaccacattctaatccggtgtccaaagacgctccagctatggtggatgatggtcttgcgtggtattggccggcctcaccgctttcaggcaaacaagcaatccttcctcctctcatggtgtcatagccgggaaaaaagcgcaacggctagaagacgaggattggacactgtcgatattctaaagcctagacaatttgaaaggagcaaaataaccgagtgttcagcggtggttgcaaaaccatactgaaagtggcggagctagagggaagcaagagtgccaatctaggcccacttggtcgccaaatgaactgcaagacgtcgacctatgtgtatatagttgatttttctttttctccttttatatggttgctgcgcccgtgtgaaacatctaatttctgattttaatacgaagatacggactttgcgtattaaaaaaaaattgggcatgacaagcagcgaaaagttcctataattcacggcagatggtaatctcgcattttcaggatgagttgcataagcatttaaaacacctaagatgatcataatttagcttgggaataaggacagaggactctgtccacttgaaaatgttgatataggtctacatctccatttaaactggagacaggtgtaggcaccactaaatatcgcatctgtgaaggttgtgtcgtacatagtataaattggtgctgagatcttgcacatgcatccgatcctacattccagatgcccccttagttggtgacaagcactgcaattgccagcctacgtaccacaaatcgaattgtctctctaatatttttcaaagttattttgatgacaattcattcatatcgtgttactacatgaactaaaattatgtgttatcttgacaaattcccaactcttaatttatttgtgtttgcttgatttactcttatctgtttagctaatctagggtctgagagaagaaaatataatctgacttttctactccattcatgcatgatttgttagtcatccattcctgtcaactcatttgtcatggatcaatctacaccatcacgtgtttcacgaggcagcatgaattccactaatcccctttctgccgatcgagcttggcannnnnnnnnnnnnnnnnnnnnnnnnngaaaattccattgattgctccatcaggttactgattattttttatatatgcttatcttctgttttgacattgtctatagtttggttgctacaatttctgtaataattggccttaacttctgctgaagcaaagactgggtttactcgttatctaaaaaaataaaaataatcaggctatcgatcagcggcaaaatgcttctcacaatccgttgctagttactactgaaattcagagaaagaacagcagaacagcagtggcgatgcattcagacgccagcaggaggtccagcaactggaactgatgatgctggtgaaagatcccggaatccacctgattataatctggagttttggaatcataattatacagatgacatgacgccacgtgtgcatccaccagattatgtggagtgagtcattgtgcatctcaactaccaactctcatcaatcttggctgcaaattgaccataaacgaatgcatgattggagaagaaaaaatgttgcaggcgtcagcccaagatgacggaccggcaatattcagtttcagtttctctgaacattgttttctttcccaccttgtgcaatgatccacatgtaaactgcctcaaaaagaatcatcaaagcagctactacttgaatttctactgttctatcagagaaagattactgcatctatatatatatatatatcagctccaggctgtgcatgtaaaaatgtttgaaatcaacaattatatgctaattttggggttttattgggagagtagtgggctttgcccccttcccgctggttggagtcgtagtttctgagtctttttttcctttggtcttttgtttcccacctctcttggtataagtcggtctggcttaatgcgttatgtaacaaatatttttttattctaatatattgacgtgtaatttttttttgtgcgtttgagaaaaaaaagttcagacttgaagctggcgatgccttttctgaagtcgtctccaagctaaggtaatcagtctggtgtggtgactggtgttgcgtagctgagttaggtagcatcatagaaaagtacactgaactgattaaccaacaaacagcgagttcacctaccaaaccaaaccaaaccaattcagatattcagagaagctggcaaaaatggaccgaccttacatgaacgtccagcaagcaggcaaaaacaatctcaccttcttttcttttttaaaaaaaagaaatcaaaggctttccatgcatggatgaatcaattagaaaggcaacaagtgatgaacactaccaaagaaagcttcagcatacatcagcattcagaaaattcagagaaggagggttttgctagagttggagcaggagctccaagagatcctcctccaacccactctcacctactgcatattcattacccctgtcttattcaatatcactcaaaactaatcaagaaagctaattaagtatttctgtcttaatcatttcactcaaaactgaaccacttggtagttggtactcccatttgtcacttgcatacaagaagcccaaacagtggcatttttcctgggctgttcttggtttggggtccagtggaagaggtgtcactggatcaatcacccaccagggcccatctgaaggcccaatctctcatggccctagtagtttcccgtggatcgggccaagattccagtttgaagtggaccagataaggcctccaaatgacatgggcttcatatcggcccatttactcttatggtcggtatctgttcaatatgtgggccacaccagaaagaggtctaaaaggctcttagtatgtgggccaacccatttacgtgattgtctaggcccaaccaagttcttgctgctttttccttctttatttctttgattctctctctatgctcttctttcataaagagctgccccttttatttaaagcactgcagtagaaacaaaataccgtgcagttaaacttaaactagaaattatgataccttctaaacttacacggtacacaaatgatctcttcagaggagaggaaaaaaaattaaaagatacgcaaaacgatattagtcattacgtatgattaatatagtattaattattttaaactttaaaaataaattaataggatcatttaaaatatatttttctgtttttaaaacacacatggtttataattaaggatcaaaatatagtgttacattcttcagagaccaaaggaatttgtgtgcagatctgtagaagttcatacgtactagagataaaccaaaggaatgacaaattacagcaaaaataatctctctttaattttccaggccaaaaatctctctagctaatttgtgaaaaatacgacagcgaatgcgatgcatcgaaatatcaacggaggagtgtgtcttcagccttcacggtggtctgggcttttcaattgcgatgtatctgattttatatatgtcgggttgtgcaaaatttcaattatttcatcggtgaaagctagactgaataacaagctagcttagcatatggttggtggccaggagcttttcttcagtagtagtacgtacgtgctcaaggttcttcgttgacaggagaaaagatttttctaaatggagatcgacgctgcaagaaaaagtgacatccgacctgttattcttgattaatcacccattagatcgcatcgtcgattcttctttagtttatttaacacgtagtgcagtgatgatcatgataaatttggcacataattaagtatgtattatgtcaaatcatagctgaatgcatgtatatagctgatggggcagttcagaaatggtattgctgaagctaccaacttagtgcaattccagagaggtaacttgttgtcatgcacacaaagagtcacatctgaatggttaattatgttttctatcggtatcaaagagagagatggtagtttttgaagttcactttttatttttcttatatatccctatagataataaccatggcaaactcatgagagagtaccgtttcctttcaaatctaataactattttctaggtaaaatctgttgaagtatgtaggttgttggatcaaaatcacctcacatcctaccttttctatagtcatcggtcctactcgaagtcgaagtctgatgaccattagctggcctcacttattggtcatcgatatttatcatatttcactatcgttttaattactcccaccgttctataatataagttgttttgagttttttctagtcaaacttatttaagagtttactaaatttattaaaagaataacaatatttacaacaccaaattagtttcattaaatatgatattgtatatatttgatgatatgtttgttttgtgttgaaaatattgttatattcttttaaacttgatcaaattttaaaagtttgaaaaaaaatataagcaacttataatatgaaatggagggagtagcgggagtcatgacgtcgtgtatatataagtaggacgattatgttagctagtcctatattactttttcagataataagattaatcctttaatttatccacaggaagcaattgcacctgaattcaggctgtaattaacaagatcggtcactcattcagtaatgccagatcatgtttaaaatgtggagctgaaacagcaagcaacttataatctgtaccattttcgcaacgaaaaagaaggaagaaccaccattatattgttgatatattggggaatttggtggctagtgctttgtcaacaggtcgaatctgatggccaattaggtgaaaggcagcgtgttcgggcttccacatccaaaggatttcaaaattcaaccgatttttaaatttccaatcaaataattaatgtggtacctagctagaaatgaaagaatcaaatgaaatctttaccaaaataaaacatgaatagcacacattttactccttgaataaattcacccatatatatggtcagaagcacaatttatttttgcccaattggcacactcagcatcaaaaggtaaaaaatgaaactgaaaataaaaataaacaaaagttgttgtagtagtagtagtacattgaatcatgcacaaacatataaggaaaaataaatcaaatgagcctcatgcatgcatggcaacagggcagtagtgtttgtatatatgagaatcacaaacttcacgcgaatttaatttgagttaattagttgatcctggagcagttgagcctgatctccccctcgccgccggtgagcacgtcgagcttgctgaccttgaccagcgcggcggcgaagcgggcgagccaggctgcggggtcgccggcggcgtagagcctgacgagcgccgccgtctccggcgtgtcgaggagggccacgtcggaggcgaacgtgacgttcccggcgagcacgttcctgtagtactggttgtccatcttgaacggcgtcacgtcgtcgagctgcaccatcgtcgcgtcctgctgcgccgccgtctccggcgggcacttgctcttcatgtccgccgcgtacgccgccggcatcgacgggtccgtgccgtacgtgccgtagtacttgtacagccggtttgtgaacgatgagcagtgagacgtgccgatagagtgcgcccccgacagcgtcaccatctcctccgccgtaaaacctaagtaatcgtatatcattaatatggtattagaggatatttctttgttggttgtatgtcatctaaatagttactaaattttttaaaaaattgacaagataatttaatataaaatatagatatctaaaatatatcactctataaacataaaagtcaaattcgactctacgagttacaaccaaaagaacaaattaaattgaaaataattattgaacatttgcagttatatttaatacaacttgtaaaagttaaattttaacttgtatgtttatagagtgatatatattatattaatctatcttgttaatttttttcatacttttataactatttaagtggcaatcataaacgttgggatatcctctcgagggataaaaacactttccgtatatcagagctaaacaactctcactatcttgcattcataactcgctctatgatgatttatgggacatcggtatgagggagagcattaacaagactttagataaactggcaagtgcatatgatgaccccatgaaattgttaccgatgatatgcgtatctatgtagtacaagtatataatatgtacctttagcggtgaagtttttgaggaggtctttggcaccgaactccgggtgagggacgttggagaggacctcatcctccttagagacgaagccatcacgacgacctgttgggatctcgaagtcgagcccaccagcaaggtaggcgctatcacgagccacgagagagaggatgtcggcgcaagagacggtgtgtggacactccttctcgaggaggtccttggcatcatcgacgacgtcaaacccatccaagctagggttgttcgccttgttgtccctctccgccttgttccctggtgtcgactccagcaacaccgatgcgtcacatccctagagagtcatatatagctgcctagttagaacacatggcacgatatggtgcgtcaacataagctaagtacacgtggcacgacatggtgcgtccacgtaagcacaaagctgcctagtgagcacacgtggcacggacacgatgcatccacgtaagcggggtgctatacttacgcggacgaagcagtcgtggaagaagaggcggatgaggtcggccggcgtgccgggcgccttctcgaacgccttggtcaccgtgtcccggacgatcgcctccgccttggggcacgattcggcgtagaacccgacggacaacccgccggccgcctccaccttcatctccggcgccgacgacatcatcatcagcatccctaatagtgccgcagcggccatcggcacatgcagagacgacggcgccggcgacgagactgccattgcttatcttatcgtcgccgtgcagagatcgagatcgaaggaactctctcagctacctgctagctaagctgtctagtgaaatggctgtgagatgttggaaaggacaagaggtatatatatagacaaatggttagcttgcatttgatagttcatggtgccatggcgatggagcgccattgattggtagaaaggtagctgccacgtgaacaattcgtttccttgtgcgagatcgatcgctatatcggttgttggagaaaggaccaatgcatatgtgcatggatggtccacacacgccggatggtgtgctgggcatatctgcgaaacaaagctgccatccagagctagctagctgaactctcaagctattaattgattttaattgtaggtaacttgttctgaattctgaaactaatttattgtttcaaagggatctcgacaactgtattctatgaatattaattctctctcaagaaaaacagctctagaggagaggacactctatggtacaattagctttctatgtgttcttttttccattctaaatagttgaatgaatgaatagctgaacgatctatgataaaatttgagagtacagacgaattaattaaatattatatttttgaaagatggatttaaaataattttaaaataaattcatatatatatataaagtttttacgaaatctgcaccgtataggagttcggaatgtataccgctgaattaaatagttcaattccttttttttctttaaaaaagaacacgctagcttatcatggtttaggctctcttaatttgccacaactccagatctaaatgcacattcgatttgaagtttgtatattaaactataatgatttaaaattttatatttcatttaagatagaaggggaaaaaaaaatccaaatagcccttaattataagtcagctgtttttctactcttctcactttcgtacatataaaggccctctacaagttcagtttctctttttaattttccctcttctgctagttttcattgatttatcaccgttggttcaactcctcgactcctcatgccgcctagcttccaacatagcgagatgaggtatccccatgccgtatcaacaagggagaatacctcttgtcaactagggatatcacactgagttgtagatgttccgaatagccgtgttgtgttttctgttgaggtttattgtcgccgtcgctgcgctcgtggaaggtagaaggaaccccacccttatcaagatgacatggccagggcaactccatttctccatgttggatgcccacatggcacaagaacctgagcaaacaatgatgaattgtggaaaattagcaacatgcagaactttggaagagaaatctaatttgcagagggtcttttgtatcagagtgggttgcagggggagtgtaaaaaaatagtgacttataagggggttatttgaattttcccaaaaaaataaagaaaacaatgttccatccagaacgtaatcgcatattcatatatatccatgaattttgaagttgtaatacaccggtccaaaaaatttttagattcggagccgtgtcaaacataacattaatttctgaagttcaacttctaaatctggcaattattgaaaagtaatttttcatcaagacataattgagcagataactaaaaggtagaatattttgaaaaagtagaatctatgaactagcgcagtacagaagaatgtcagggtgacaatggatgtagtgcaaggtgtcaccaacttgtcgatcgatagagcccaacccctctgcgagaattgccccggaaatatcttgcttttccttttctttttttcgttttcgtaacaagcagagccagcacagcatgcacttgcttttacttaaatcaaattgactccttgatcaatctatatattttctggcctgctggttggtgctccatgtccgtcatatcttgctttattttatgcttccttctaaagtgcagggactgagttgaaaggcatgtagtatgcacgtagcttgcttgtagtaacctgcattgttttgtttttaaaaaaatagaaatgtgacccccttggtcttggaatattgttaatgactaacctattaaacatgaaacctgtacgttaataccataccgtctgcataaaactatctcggcatatgtattgatgtagtacatactcgtaggccatttacgtgaatggtttacagttcacatggaagtatgtaaccatcgacaccattgaagaaaccatcggcaattgattttttttgttctctacatgccgcgtaggctatttggttatttcacagctgaccttggtttgtattagtgacttgtagtccgctaactaaaatggtatagggaccttaacaattatttatttctttctttttaattataaaatgtggctctaataagcaattaagcatagtatctcagtcacacaatcgaacatacatcatagacttggattgtatgcaatactcaaggaaacagtgttgttccctgaaaaaaagaaggaacagtattgttgacgagataggttgaacttaattgtaagtaccataaaactttatgaagatccatccatgcacaaacatattgttgtgatcatctctagttggctttgacttctaagtccggatcgttacggtcttatatatatggaccgtttattacacatagacacaggcacacaatacacataaaagtcgtattcatagttgtgagatactacaaatcatccgatgatttggttgcattctataactatggtgtaaaaacatatatatactccttatctcaacatcagcgtctaataataatccactccattcctcaactacaccacgctcagatccacattgatcttgtatttgtacccatctacatctcctttctggtaccgacattgtctcatatttcttgtccatatacatgattcgtgccatcgaaacagatgcaaccaaatatccacacctttgtcatcctagtcacaaaagcctcgcccatttccgcttcccttttcacgctctgacagcaccaactcaaccatccatgacttaaaatccgatatacttttggattccactcgaattgttctccaggatttgtgcaaattgtaaggctcctcctgtagctagccctgttaagtgtgtcaccatcattggcatgctccataagcggcaaatgcgttcatctggtgatgtgttcttttcatatggaaggaaagcttggaacataatagaaccatacgaaaagacgatagatatcgagctcaaacagaggtgacacattgggtgtcaacgacactagtagctagggttaacttgcaacttgaggaagctagctagctagaaaaaaaagagagaaaaaatgtctctatatatctaaccttgtatggccgagtttagttccaaaatttttcttctaacttccaacttttccatcacatcaaagctttcttacacacaca

SEQ ID NO: 14590 - DNA, 16566 bp, Oryza sativa
catgcttaattgatcgatgccactaaatcaagatccaccataattagggagatagtataaagctaaaatgcaccaatcatatatcaccaaactgcagttgagtgcatgcatgatcgatcgagctcgtcagttacacgcacaagaaatgggtctcagttcatcatcatctccacaggaggttcggtcgatcgatcgatcaaccacgcacacgcgttatcttacatcgatctcagatcatctatatatatgtaataatcgtatgttttgtactttggtctcacatgatgtaacaggacatgcttgtagcccagacaaaccatgagagggctctcgtgggtctcagacagaaatagaagtgtgtgtattttttaaaaaaaaattagaaaaaatgcccatacgttgcagtgggtgaaggctattttaattttattatttttattattgtaattcatcgtgggaattcgcttgggtttttttcttttacaaaatcatgaattgcaattaggagtctgatcatctcaatttagcatgcgttagtattaaattgcatgcatgctgggtgtaatctaattttagggatgcaagtgggttttttagcccgcttatctcactattctagttcattttttcttctaaattttgtaccaccatgtgagaaataaactagcaagcgggtttctatgcgggtagtgggactacccacttgcatccctttaatggaactaataataatatgtgccattgtattttagccacacaatatacatatttgtgttttgaaacgcgcattttgcaggcaaagtacggttagcacaatttatttactttctattttactcaaataatggccatgcaaatctttgctaattaatcatggatgaagatttagaaatagattttttgacaggaaacagtagtagagactcctactgtgaaaatatattaaaaatacaagaggttatttacaaagggaaacaaaaaatatttacaaaagatttacaaaaatattttaaaatgatttagaaatagatgcatgcttcctgatttttattttttcaagttttcatccattttatggtttgttttgttccttcatcttttctattgttatataagagcagatagttgtcctgcaaacttggtagtactagtaattactataacttctgttgaagtaaagtctgggatttcttgttatctaaaaaaattaactcaaatatccaggattcaaactccagatatgtaaatgatatacccttcagatttacatcagttatgtcattacagttcaagattatggatgagagcccagccaattcactgaacttccatagcccagtacatagctagcccttcctgccacgttacaattcattcggcccagattgatttactcgttgttatgtgggatttatagtcataagatgggccatggtatcaaaaaaaccattctacctttacaatatagcattttcctcatttctgatgtgaactaaaatcttctgtttttttagataacagtaaactaaaatattttctccactctgatttgaaacaatataagaaaatcttctcttgtttgagttaacaatagaatcttttcttaatcacaatttgccacacaaaacaacaacaaaaaaatttccacatgatgaaatttgggcgtgtaatattactaattctacatgtataaaccagctgcagatgaaattatatatatactataatataagcttaattattgattgacaactagtagtggttgttgaccatgaagcacttctctctgatctctccctcgtcacccgtgagcacgtcgatgttgcccatcttcaccatggcggcggcgaacttgacctggaacaccttctcgacggcggagtggagcttgacgacgccggcggtccacgggctgtcgagcagcgcctggtcggagttgagcaccaccctgtgcttgagcacgttcttgtagtactggttgtcaaagctcgccggcgtcaccgggtcgagcggcacggtggtggggtccatctggtcgtcggtcgctggcgggcaccggcgcttgagctccgccgcgtacgccgggtcgatggccgggtccgtcctgccggcctcgccgctgaagttgtagaggcgggcggtgaaggaggagcagtgggagcggccgatggtgtgggcgccggagagggtgaccatgtcgtcggcggtgaggcccttgcgctcgaagctggcgacgagctgggcgaggctgaaggtcggggcggggacgttgtcggcgagcacctcgtcggagacggagacgcggccgtcgcggcggccggaggggaccgggtagtcgacggtggcgccggcgaggtgggcggagtcgcgggcggcgaaggcgaggatgtcggcgcaggagacggtgcgcgggcagtgcgcctcgacgatggccttggcgtcgtccaccacctcgaaccctcgcatgctagggttgttcgccaccgaatccttctccgccacgtgtcccggcgtcgagtttatcagtatcgacccgtcacacccctgaaataatcaattaaattcagcacaattagtttaatttcgtccctctttataatatgagtcgtttttaattttttccatagtcaaaaattaatttttaatttaatcaaatttacagaaaaatataataaaactttcaacacgacacaatgatattatcaaaaatgtattcaacgttacatatatagtgaaactaatttggtgctgtagatgttgttctatttttctataaattagtttgactaaaacagagaaagtatcatctaatcatgactaattagaggccttaattaattacacgccattgacagcttcttcaagaatggcacgtgatatatgtgtacttactctgacgaagcagtcgtggaaatgcatgcggatgaggccggcggcgaggccggggtcacgggcgacggcgcggcggacggcgttgcggacgatctcctccgcctgcgggcaactgtgctcgtagaaccccaccttcagcttcgtcggcaccggcgacgccgccgccacggccaccatcgccgccgcccatgcaaacaccatccacggcgacctcatcatgatcaatcgatcgaagctagctagcttagctattgatcactatttatctcactatctagctagctagctcaattaattacttctctcttgaggttaattaattgagagatcgatggatggatttagattgattttgagatggaagacgatgatatggagtggagtggtatatatagggaggctaccaaaagatcgtagcagttgggagttggcgcgttttgcatgcgtcctcttcatgtttgcaattaaccgagtcaacaacacgactaaatctttgtagtagctaatgatctccattaattagacaagctaacaaacttgatttgtttgttaagaaagcgtgtcagacgcgtgcatgaacctgtccatggactttgggagaaactccaaagtttcgcgaatctcgaggagcgatggacggcttgatcttgattgatgatcatatattcatattagctgaatgtccgtgctttgctatggataaaagaaaattttaacataatatttttttcacatcttttttttttctatgggaaatgttcaccttaattctattttatatgtggctatccatttagatttgtttgcttcttaatattaaagaagttcaaagagtaatttgtaaattatattaaaataggtgaggtggtagattccaataaatatttccatgcaggtctatggatcaagaaaatttccaactttgggtcggctgcactgagaaagtgagaaagggatatgggtatgaatgcaaattgcatcgtgtcatatattactatatgcttggaatcgaaggaagaactagtaatagatagctgtacatcaattaggccgacaaaataagtacaaataatattgtaattgtgtgtcaccatcacctaatgttgctcagactttgtagtaacagatcgatcgatctacacacaatcatttgcgtaagaaggaattagaaatgggcaaagatgtgtgtgtagattacttgtaaaacattcttaacccacttaaagacagaaagcttttggttgagagatcaatataataaaatttgacaaggtcgatggggtgaccgggacaaagtcgtgtgagtttggaggatgacgcatgatgtatatatacatatgtttagtaagtgtacatttcgttttcctaagtttaccttttgtccctgaagttaattacctggtcaaatgatatctcatgatcatctagcttaattagtctaccaagtagctgcagatatatatgtaataaattagatgcatggggatcatggcgtcatgcatccaagaaagtctccaaaggcaactagaaaagtattttagtagtgtgtatgcatgctctctgcaatagttagttagttcactaggtgatatacgtacagattattgtcgttgcacagtttgatgaagttggtgaattaatttgaggctcccttttgactatatcttagcacaaatatacaactccaaaagtcaaatttaaacaatacgtactagtagaaatggtctgcctctaactctaaggttagcaaacaacttgtcctataacctatgtatatcttcctttcaaaacatagatataggcaatgtattttgggtggttaccaatttaccatgcatgaacatgtcttgcaaaaagttagctgcattgctgcaggtatgaaaatacaccgatttgcaaacattaaatttcttatgtaattaagtatggtagagaaagaaattaaatgtaaggcgataagtgaatgcacaattaatttacagggacgcgtttacttttgcagctgttgcatcgatcattcgcatagaactttttggtggggtaggtgtagaagtcaaaacatacacaataaactttttggtggaatacatgcttacatggtgtagagatgaatgtttcttgtttgtgttctttgtttttttccgtgttgaactttcatctccatgtctcgcatggtcaagttgtcttaattcgattttcagaggcgcaaacaactgattagttagcgtgttgggccggagtagcatttagaagtccattagacctagctgatcagagttttgttttgaatgggctacagaattgaacgtgccagcccgtacacgtggatgggccacaattttggcctatacaaacgaggccctaacgggctgatgtttttattcgctcggcccaactaggcccaattaggttggatctgctcatacgccgaattttttgtatttttagattttttttttttaatatttacagaaatattatagcgccgaaaaaatttgcaaaactagaccctgccgcccttcgcaagggcggcaagccgacgtggcacacggcgcgctggacggcgcgggacggccgtcctcctgccccctcctgccctcttgccgccctggcaaagggcggcaggacccccttgccgcccttacagaaggcggcaggcctggccgcctataaagcccagccggctcctttgaggagcccattccctcctaacctctccacatcaaaaaaaaaaaaaaaggagaaggggaggagaagaaaagaagaggcgaagccctgccagtttcaaacttcgatttcaggtaatattcgtagattatatacgtgactaaatatatgataaatgcattgtatgaaatagagttttacctgtggtactatataaatatatattgttagatgtagccatgtaggtaacttagtagatctgtagtatttgtagttattaggtttgtagttttaaatgttgttgagtaacattgcaatagaatatataaaaatttaggtacgttgcaaagaagatattacactgtagtcgtttattatgtaaaataacggcctagtaattaactttgcagatatgtccagtaaacttatatttcaactataccatggtcaaggaaacgtccgttatgggccaactggggtagatctgtcagaatttattgtaacagcaaggggaattgataggccagccgagaggagtgtaccttctataaaaaaatggttgatgcggggcttgggagttgatccacagactagtgacattacaatctatgttgtagtaagtcgggcaacagagggtttttattgggaactaatgccggttcaaaactctgggatgtggagatggtatgtggagaatgcattgcaacgtgggtggcctctagctatggttccgtatgttcatccgaaggatccaagtgtacagatgaacatggatgatggcgaggggccaagtgcagaagtgaatgagattgaagtggatcaggtcaacgcaccagaggaagatggagtagctccagtagtagctccagtaggcatgcaacctggtggagtggctgacgagggggagactgtgggtgccattgtggacgaaatggaaaaagaggatagtgacaacgagcgtgtcgaggaagatgattcgtcagatgatgacgagaacaatattaatccagctgaatgggctagtgatgatttttctggtttggtcatctctgaaggggaaaatgtgagatgggagtacaaggaaaacgagattatcgagggagcgaggtatggtaatggagaagacatgaaggaggcggtgaagcattatgcagtgtcacttcatagggagttttgggttgccaagtctaaccggacacaatatgaagttaggtgtgttaatgaaaaagatgggtgtccgtggagagtgcacgcctataaggggaaatggaaggactactggacagtgtcggtcgttacgaaacatacttgttatctacctggtgttcaaaaataccacaggaacattacatgtgcatttgttgcatctgagatgtatgcgcatgtcgtggacaatctggcatatgaaccgaagtcaataatccgacatatcgaacagactttcaagtatacaattagctatgccaaggcgtggagggccaaacagaaaataatagagatgagatttggaacttatgaagcctcatatgacaatttgccacgtctgctatctgttatccaacaaagaaaccctgggacctcttgtgcactcaagacattcccctcaattgaacatcctggcaagactgtgctgcaaagagcgttcttagctctacatgcatgcaagatggcattcgtgcactgtcgtccagttctttgtattgatggcacatttttgaccgggaagtatcggggccagatactaacggcaattggggtagatgggaacaatcaggtattgccgttggcatttgcttttgtcgagagcgagaacaccgacagctggtactggttcctccatctggttaagacagaagttgttggtatgaggcccaatgtgtgtctaatacatgacaggcacgccggtatgcttcgagcgatagaagagttaaagtttgggactatggaaagaggataccctggccagtgggaagatgtacaaagcaggtggtgcatgcgtcatatgggagctaatttcttcaagcaatttaagaacaaggagttgatgaacatgttcaagaggctatgcaatcagaaccaggagaaaaaattcaatgagctttggaagagattagatgagttgacaggcaaatgtagtgaccagcgtgcaacaagaccagcggccgctgtacctgaccctcctcaagcactcggagctctcccaacagacagtgtaacattggttagaagaactggggagcaaattcgaaaattttctcagtggattgagaatgagccaaaagagaaatgggctaagacttatgacacaggtggtgctagatatggtataatgacaacaaatttggccgaagtttacaactgggtgatgcgcggtgtccgtggactcccactagttggtatactggatgactacggttccgatggtgttcgacatctgtgtcgagccgcacgcaccttaccgcgtgatgcggcagttcggcttccgtcagtcctttccagtcccgtttccggcgggcgtcacggctgccgttcaccggtaagccgttttactacgatttaatatgttgcattaacatcgggctgtccataataatttgctttgtttgtcgtttgccctaatacaatacattaatttgcaggtactcgcgcaagggtcagcactcagctggtcactggcctgccaagttggggccttttctcgacgactggttgcttgctaccgaggaggtcgtggaccacgcgggagagccacacacggaggaggggtatgaggcgtacctacgttggtatcagccacgcacccgtactagagtcacctacgctccgacggagcaacaggcccacgccgcgagcgccagagacctctacgccaggcaccgcgaccaggacttcgctcgtgcggtgagtaccttgcatcgcaccatcgtctcatcatcctttctgttggacaaaggctacgaatatttacgttgtaattaaccgtgcaggccgttgagtgcaacagggtcgtcgttgatgctacaacggcgatccaacggttaggcgcggggattgaggtgggggcagacgagcacctgtcgacgtacacgcggatacgggactcgatgcgctcggttctccgtgcgctgacctgtcgtgctgccgacgttgctcaggcagacgcagcaccacaggtgcgtccccgaccgactgctcctcgtccagctgcgcacgttcctacgccgacaccccctcccttcggaggtacgtatattcaaggtctatttgtacatcatcaatcaattgatactcaatttatgtgtaagcttacaagtgtcgcgtcgtcgatgtgtaggcttcgctcagcctgggacgacgccgggcgcccactcctggcaggctgcggggtcatcgtcacaggcaggtgtgtcggcctcgctgtctgcgcagttctggcaggacgccgggacttcgtcacagccgcccggcacgtcttggcagggtcctaccgggacttcgtccgagcacgggtgggcttccgccacgcacttcgacattagtgacttcgacttcccggacattatcggtccctcacagcttggaggcgcaccgccggtgcacacgcaggagcagtcgccctccaccccactcccagaccctcgcgctacccgtgctgtcccaccggatcgcttcacgtactcccaggaccacgtgcgagcacaggcccggaggaccaagcggggtcgcggcgcgagtcacggccagtagagcagacatctctttatttttctttacattcttgtactatatggttgtaaactgaatatgttgttgtttatattcgggactcgcattcctacacttcgctgttacgttttccaaaaacaggagtcctttccagccgttgtgcagagaggaagctgccgcccttgcagagggcggcaagccctcggctccccgcggcccgtgcgcgccgtcaagacgcacacggcgccgtgtgccacgtcggcttgccgcccttgcgaagggcggcagggtctagttttgcaaattttttcggcgctataatatttctgtaaatattaaaaaaaaaaatctaaaaacaaaaaaaactcctcatacgcctttgcactagggcctcctagctgggggttgctagttggcgcgcgcgctggcgcgccagctgctcccggcccatcagccctttttttcttttttttcgtaattatttttcgtttttcttttgcgatttttttcactttttttccttttttttctgattacttttttttaatctttagcacacttattttttaaaaaaatgttttgagttgaaagttttcaaatctcgatttgaaaatttataaatctgatttgaaagtttttaaatctgagttgaaagttttcaaatctcgagtcgaaagttttcgaacccgagtcgaaagttttcgaatcggagtcgaaagttttcaaatctgggatgaaagtttttaaatctgagtcgaaagttttcatatttttttcaaatcttaacttaaaaattttcaaatctgtacttgaaagttttcaaatctcgagttgaagttttcaaatccgatttgaaagttttcaaatctcgagttgaaagtttttgaatctcgagttgaaagtttttgaatctcgagttgaaattttttaaatctgagttgaaagttttcaaatatgagttgaaagttttcaagtcgaagttgaaagttttcagttgaaagttttcaagtcgaagttgaaagttttcaagtcggagttaaaagtattcaaatctgggttgaaagtttacacatgtatggaaaaatttggaaaaaagaaaaactaaccgtgtcttgccgcctattaggccgtgtgggccggcgcttacgcgccaattaggattcctgctcctagctagcgcgtgcgcgctactggcgcgcacctccccctcttaaggccttaactacctctattagttaacacttgatactaatgatagtaattaggtaagattctgaatatttttttagagattattttactaacagaattaaaattttttaagttagattaaaaaactttcgatttaagtttcatgttttaaagtcaaattttgaaaactttcaactcagatttgaaaactttcaactcgagaatcgagattcaaaaactttcaagttcagatttgaaaattttgaaaactttcaacttgagatttgaaaactttcagctcgagatttgaaaactttcaactcgagattcgaaaactttcaagtctagatttgaaaattatcaaaactttcaacttgagatttgaaaatttttaactcgagatttgaaaactttgtcctaatttaaaattttgaagttaagatttaaaaactttcaacacaaaacatttgaaaaacacgtgtcgttggaagattaaaaaagcgaaaaaaacacggaaaaaaagaaagcaaaaaaataaaataaaaagtaaccgaaaaaagtgaaaaacaaaaaggaaaaaatcacagaaaaaagaaagtgaaaaaaagagaaaaaacagcgcgaaaaaaaagaagattcgcgcgcgcgtgttgggccgtgtgggccagaatgcgcgccggcaacgtgcgcgtgcaagttaggattctcgctttgcactcttggatgggtaacactaccactaatgggcagttgactatcagagatggatttattttcagtgaaaatatataatttttttaataaatacgctctcttaactacttgtattccatttatgaacgggaagcatatagcaaatatttgctcgagggattagaattcaattccattgagtttattgtgctaattttacatagaaattttacggttttccagaggtaccaaaagaccaattttttttagcttaatatctaagatactgagagacatcaaattttacagtagaaataccttcatatcgctctttacataatgttttaaggcagctcaaacaaaggaatcccgggtagttcgatggtttggcgccaaacagaggcacacgaggatttgctagtccagtttctcactgtcattcatcatatcccaatcttcacagtgacaaactgacaattattaattagttggtactacttgttagcaaacatacaaaaaagaaaagcacacagatgagttctcttatcaagacaaagaacagccatacacagtgtaaagcatcctacattattctgaagaaagtgaatcactcaagtacagtctagagagagatacacacataaatacagttatgcagatacacaaaaatgcataaacttgcatacatgttcatgaatgattgagctgatgagatgagcgtgctatgtcgggccacaagaatccaaagtgtcattacattatttggcactcaatcgcatgcgctcctgcagcgattagtggctacaccaacacaagcatccaaagatggcaacactgctgctctgacgattcagaaagttaacaggaggagattccccagccaccatcgccagcaacttttgttttgttatctgatcatcttcttctagcccatctcgtagtaaagctactgtcagagaagcttcgcatgctgtcctttcacaagaacaataatctagtcagagtttcagaggaacaataatataagtcagagagtttgttccaatcagaacacatgcatcgagctgatcgagctaccaatattttaaaacagcaagtgatgatcactcttgtgaatttactaccatatggtctcatgttctaagttgatccagcattgatcaagttggggggtgaaaagattcgcgtagaaaaggttggcgccaatatactgcagagttgtggtcgatcggccgggtcgtcctgctttgcttcagacttcagagttgaattttttttccattggaggctacatgcgactaagtacactactagtagagtagtggagtagtagattattaatctaatcgagctggtcaattgcatccagtgacactaaaattttgtctctcttccttgctgcatgcagatcccgatgcatatgccattaactttcagtgcagactgcagactgcagtttttgttactgttcagtagaagtttccatagcaattagtcatccccgttcacaaatctaacaatttctatttatttttagaaaaaatcaatacaggaaaatttcttacttagacgtaaaaatatattaacaaggatttcaaggttatttaaccaaaatttagattgacgagaaaaaaaaatctcaatgtctctgttatgcgataggtaggtgggagccaaaggatggtagagataagatataaaaaaaataaattagaggtgatcaatgagataagtagtactctatttttcttagataaactttaaatgtttagaatgcttatatacttttagataaattttaaacgtttagaatgcttatatctgtggggagagagggcgagagtttaagacagatggttttgttctccatccaacctgtagcccaatgctgtccctgcttgctctgactctgaatgtatatggactgaactggaactgcacttgtattttaaggcagaaatgttgagcagctggtgcccatattatttgcacatgcacgcatgttagccctttggttgatcccatatgtgtaaaggagaacgaaatgtcgaaatgtagagagagagagagagagaaggaaacaaaacatgcaacacgttggtttgtgttacaacatgccacatgtgcatcaagataccatgtgtctcttccattgggcagcagctggaccagttcatcttcctcttcttctacagccaacaaacatctcagtgatcgatcgaattatatgagcaagaaatttcagcaatacacactgtaacagtaactgaaaatcaatgaactatcatgcaagaaaattcagaccaaaggtcatgaataatgaccctgttctcactttgctgtagctgaatattgaatatttgaacttgaaagtgcataattgaaacttcagaattagaagaaacaaaaagacgaagaaaaagaaaagtgaaaagctatcaacacctgaactgaacaaatgccgatgtgataattctaccctctcttatgttacaacttacaacaatgtcatcaagtacacatgatcattgtgtgaagcagcatgaaatcgaaggtgatgttgaatttttcgatgaaattttgctgatcatgtcatgtacaataatcaatcaatcaagcagtatcgaagtgcgtgcatggttggattgaatatcgatcgattttttttaaatataattagttcactttgttgcagtattgccggatctcgccgggtgggccggtgagcacgtcgaggttgcccatcttgaccatggcggcggcgaacttctgcgaccacagcttccggctgccggcgtactgcgccaccagcgccgccgtgtcggggcggtcgatcagcgactggtccgacgtgaacaccacctcgtgcgtcagcacgttctggtagtactggttgtccagctgcagcggcgtcttgaagtcgagctgcacgacgcggtcgaggcgccccggcgccgcggcgcacttggcgcgcgagcggacgccgagcgtggcgttcatggcggggtcgatctgcgggtagaggcgggaggagaaggaggagcagtgggagcggccgatggagtgggcgccggagagggtgaccatgtcgtcggcggtgaggttcttggtggcgaagcgggcgacgagctgggtgaggttgaacgacccggggggcaggttggcgagcgcctcggacgcgctcgagacgcggccgtcgaggcggccggcgggcatggcaaacttgatcccgcccatgatgcgcgacgcgtcgcgcgccgcgaacgcgacgatgtcggcgcaggagaccacgcccgggcagcgccgctccacgacgcgcttggcgcggtcgatgacgccgaagccgcgcaggctggggaagttgggcggcgccatcttctccaccgtgccgttgctcgccgggtcggcgtcgagcagcaccgacgcgtcgcacccctacgtacacattcgcattgcatcgaacacctctcgatcatcagctcaaccaaattcgaccaagtgaattcaaccaaattaaccgcaatgcgatatcagtatcactgaccctgacgaagcagtcgtggaagaagaggcggatgaggccggggccattgccggcgtcgttgcggacggcgccatggacgatcgtctgaatcaggtcctcagctccggggcatgagttgttgtagtagcccacctgcagccccgccgccgtcgccgcgtaaccaaagaagatcgccgcagcagcgacgagcacactacacgatcggcggcgagcaccgccgtctctgctaccggcggccatcgagcacacacacacacacaaactatctcttctagatagctcagctagacgaggagtctaactgatcaagtgaaggtgactaggaagaagaagagggtggccatccaatttatatgtatcagctgccatgatcgatccaagtggggattagtataatctgatagtgattcgtagctagtgacgacctgcactgggtgattaagctaagctaagctaggtagcagctgcatgcaagtgttgatcgatgctaactgggaacatggccagtgtgtcatgaggagacaagaacatggggtcacaagttgaccggcctgcctctcttgagctaagctgatgaagctgatcacactgacactgtctgttcaagtgtagtgcatggtttaggtgagtaattaattggcgacgattagtttagcagcagcttgctgcagctagcgtgcatgttagttatggacttatggtaaattgagatcttgttaatttgcaaggcgccacgggtgctgacctgcagcagtgttcgtcgtcgtcgtcggcggcgatgggatggatggatctggactgaacatgtctgaactttcttgcacatttcggataccggatgaacatatcatctctgaattgctgatgaaagaagacgcagcatctgatgaaaacgacgacgaggatgcggtcagtcaatttggcagggcgtgtgtacagatgaagaggtatctagcacgctatgcagtcaccataaattaattgaagagtgatcttggatcgatttcgtcagtttttcaacttcactgtcatggtgacttaattcagatccaatgttagcttctggtccaatttattattattgtttatatataaaaaaaaaccatgccattgcatggctgtggcacgatcgatcgagatggatccagtagtttgacagaaagtgaaaaaatgtttggattgagtctgatcagattgtgctagctctgcaattctgcagtgagcgattgaccaatattgccgcaaggcttcaagacgctgtcctgcgaattgggcgaaattgaagcctaacgggctcgagacaatactttttggcccatcacaaacttcgtttatttgaggccttaacacgataaaatcctttagcccacataaccttccttactatgggcccaaaaattgtctaatctgttcggcccataatatgaacgatcggtagcccatagtaggaaagattgtgggctaaacatctctgaaatttggaggaatacgtctatattcctccctcaagtagtgcccctggttgaatcacatccttcaaccgttaaaccgggtataacccatcccctaactcttaaaactgttgcaaattgactccctaggcggtttcgtcctatgtggtagttaactcgttgagtcatcaagtgggacctatttgtcagcggcctccacctcatcccatcttctccctcatctctcgcgccctctccccctttcatatctttatcagcgtggtggcgatggcgcttggcatacatgggaggagcttctcggccggctgcatgcgggggaggagcgcaaggagctcctcgttcactggccgtccgcgaggaggagctcgccggtcgggcgcc

SEQ ID NO: 14591 - DNA, 944 bp, Oryza sativa
ctttgaatatgaaaatgtgtttggtatggtatggacattttaacagtattgactcttacaatccattaaaatatttagtattcaaagtgtttgtgtgttaattcctatcaataatgacttatacagttttcagtgtataaatgtttgacttattttgttaaatctattaggaagtattttattatttttgatgctattgtaaatagtatggttttttaaatttattttttggatagttctttgttagtgtgtagaaaaataattgatttttgcatgttgattttgtatcagatactttagggaatttatttgttagttttaacagtctttttagagtcgttaggattttttgtatataagatatatgtcatgtgaaaacagatcaagtttcataacttcctttgtaattagaagcgcactttctccatgatctccaccttcctcccctcttccacctccttcccatcgccgctcgccccaaaccctagcgccaacccaccgtcatcaccaccaccaccaccgccctcgaagagcgcgacgagggcgtcgagccggtcgggcgagacgccgaaggggcggtcgggcgggagcgacgccccgaaggcggcggaggcgacgaggcagcgctcggagcagaacttgcgggcctcctcgaggtcgtacacgcggtgctcccggagcgagatgcggaaccgcggcgccgccttgccgcgggcgtcctccgaggggagcgggttggggcacgccgggtacccgcaggcgtcggcgatggagcgctccgtgacgacgtcggcgtagtccggccccgagagcagcgaggccgccgcgcggagcagcggctccctcgacgccgcggcgccgtcgtagagcgccatctggacgcggtgcaccgccgacgcgacggtcgtgatgaactactgtaccgtcggtcatcaatggccgcg

SEQ ID NO: 14592 - DNA, 702 bp, Oryza sativa
  unsure (1)..(702): unsure at all n locations
agcgttctncaaacanngtgaaaaaccannnnagaaggaggaaggaggtccccatggtgataatcaactttttgttcagatttatgtggatgatatcatctttagttgttcgactcacgctttggttgtggaggttgctgagattatgcgcagggagtttgagatgagcatgatgggtgagttatcgtactttttgggattgcaaattaagcaaacacctcaaggtacttttgtacatcaaacgaagtatacgaaggatcttttgagacggttaaagatgaagaattgcaagccaatttcaacaccaattggttctacagctatgttggatcctgatgaacatggtgaagctgttgatcaaaaggaatatagaagtatgattggatttttgttgtatctaactgcttctaggccagacatacaatttgctgtgtgtttgtgtgcacgctttcaagcttctcctcgtgcttcacatcgtcaagcggtcaagcgaataatgaggtatttgaatcatacacttgagtttggaatttggtattctacttcatcttctatatgcttaagtggatattctgatgctgattttggaggttgtagaattgatacgaaaagtactagtggaacatgttattttcttggtacatcattgattgcatggtcttctaagaaacaatctagtgttgctcagtcaactgcttaaat

SEQ ID NO: 14593 - DNA, 2531 bp, Oryza sativa
  unsure (1)..(2531): unsure at all n locations
gcggcggtggccggcgacgacatgattgaaccgtcggcgatgaagaagaatgtggagcgtgaagactagtgagtcgtcgtcggctaggagttgacttgatctgaacaagtcagtgcgaaggcgtattattcgttgttacgtaaacgttctcagaaagcggaggcatgcttgttcgtgtcgtgtgcatgaaaagcgtgctttccgtatcaaagagtgggtatcatttactagtccgtttcatgattagtgctaataaaccatggatttttatactttgttctatcttaagcttcttgttgcaaatctttgccaacaacataatatttcatctacaatcacttatgaagtctcctaaactttttttatctccaaatatagtttggcaaaccagttttatttgttgttaataactaaaattttgttaacttaaaagacatatttaagattacttagggcccctttgaatcaaaggaattatgaaggattttcataggattgaaatcctacaggaaattttcctacgtagccctttgattcaaaggattgaagttttccaaatcctacaaaattcctatggaatggcttgttgcatataggttttggaggaaacttagggcccctttgaatcgtaggaatgaaaaaacagaggaataggaaaaacacaggattctgacatgaatacaattgtaaaccagaggattgcaaaacacaggaaaaacacaggaatgaccgtttgattggaccacaggaaaaacgtaggaataagatgagagagatagactcagaggaaatgttctaagaggttagacctcttgctaactttcctccaaaatgtgcataggattacctattccataagaattttaaaggattgaataggattcaatcctttgtttcaaaggccttcacaggattttttttcataggattaaaatcctccaaaattcctacatttttcctacaaatcaaaggggcctttagcaagaggtccaacctcttggtaaaaattctttgactctatctctctcatccgattcctgtgtttttcctgtggtccaatcaaacgatcattcctgtgtttttcctatattttgcaatcctctgttttacacttacattcctgtcagattcctatgtttttcctattcctccgttttttcattcctacgattcaaaggggcccttagtaattcccgtaggaaagtgtggggaaccacctaatattatttacaacaagtgccataatagaggtgactactaccttcaattttatccatatcactcactcataaataaattaagagacaacatatatgatgtgtcacttctaatacataaatatcgataactttaatattttcacactatttttggagtttgtgtggaggtaacatgtgtaaaagaggtatattgtaggtgtatgttaatgtgagtgtggtatgaatgggttgtacgtactccctccatcccaaaataagccaacctcatactaggatgtccaaatttattgtattagaatatgtcatattttaatatgaggttggtttattttgggatgatgagagtatctaattgtaactaactaaatatatagaccctatatcatatatgggtttaaaacaaggggcaaagtttgttacatgacattgaaaaaatgtgtaattagctggtagataccgcaagaacgtgaatttgctgttgggcacaaaaactggtaattagctatccgacactcacggcaccaaaataggagagataaacactcattaaagacaagtttgcccttagtcgaacttgctccctggtcgacgttgcaatggaggaggtggctagaggaggagcagagcgaagccgaccggcggagcgatggtgggtagagtaggccggcgaagcttctggagttaggcggcggacgcactcgcacttctcctcctcgaattcgtcaggggacctcggcaacggcttggctctatcgctccttggccgtgcgctaaagcgcctccatctcctcggcctccttgagccgccgcgccatctccgcctcccacttcctctgcgcctcgtcctccgacggctctccagtctcctcgctgccttcctctgaagcagaggccacgaacctagccacatggccatggccacggcggcacccacgtgcacgagagaggagacaacaagaggccgcgtcggcaccaagcaaccgccactgcgtcctggggggctagttgtagaggcgaaactacggcccgtggacggtgaggtcacccttaggctggtggtgtcaccgaggaggaggccagcagcccgcgttgcgcgcgggggaggagaaccaccatcgctcgccgctgctccgctagtcgccgccccgcccagcgcgtcggcaccgagcagccgccaccgaggcctgggggcctagttgcagaggcgaagctatggcgcacagatggtgtcaccgaggaggcactactagaaaataattttnnnnnnnnnnnnnnnnnnnnnnnnnnnnnngagcatgagacaggactcac

SEQ ID NO: 14594 - DNA, 9794 bp, Oryza sativa
  unsure (1)..(9794): unsure at all n locations
taaaggcgggaccttttataatgtcccccaagcaaaaatcggcggttttcgcctggggggctacttaaagaatccgctaagttaaaaaccagaacccccgcaaaaaattttgcccggttttaaaaccccccggccgccatttaaaccccacccaccccaaggccttntggtgttcccctttccctgcgcccctactggcgacggcgacgacggcgaccacaacgggccgagccatgggcggcggatgtgtggcaacgggagggggcagatgaaccccgactggagggcntcctcctcctcccctccctcccccagatctagctggagggagggggcagcagccgcagcggcggtgacagcaggcgggcggcgcggagctgacgacaatgacgatgctgtcggatggtgcgatgcgggcggcggtgcttgagcacgggtagggagggcggatccgccaccgccgggccacggggagagcagatctaccgccgctggaccacggggaggctctctcccgtcgcggtggctcggcgacggcggcgacgaggcggaggcggtggcagggcttggcagcggtggcatcgagatggaggtggtggaggccgacgaaactcggcagcggcggcgtcgaggcggatccgacggccacttcaaggacgacgacggcaacctcgagtgcgacgacgctggcgatgggtttgcttgggccaacggtggccgtaggatttttgtgatgacgatgtcttgtaatgctgctgctgttgatagttgtaatgcttgaatgatgttcaaatttttgttaatgtgttgatattgtgatgcttgaatgctatgttaatgtccattttcaattttttttcaactttctggatgagatggtagaaagggatttatttttttatggaaaattatttttactggcggttagcataacacaaccgccagcaaaaactattttcactggctgccttgataaggcaaccattagcgaagataactttcactggcggctgtctccagcgaaaatttgtttttgctggcggctgacttaagatgccagtgaaaatatttctttgctgaccgtcgataaccgctagcgaagatcttgatcttcactgccctttgctttgtggcggctctaaattccgctagtgaagacccaaaatggccaccgcgaaagatggttttcatagtagtgagaaggccatcggccctcgccacaccgggggggaggggggggagaccaccaccggtcaagaaccaccttcgcccgccgccgtcccgaccagcgtctacccactctatatggcgccctctgccgcgttcgctcgctgataaagagaagagaagaaaagagagctgaagcaggaagaagaacaatgtccaggggcatttcggtactttcaacgctctttctctctctatcttcatcgaaaataataaaataatgcattgggtgtccagctgctaattaccacatttttatagtgtccacgagaagatatatattttttgagtgtctcacaacaaagactaaaactttgagtgtccttaacagattttgccaaaacaaaatgaccctacaccatatagtaacttagggtgcgtttgttcctgggggattgggtaagaaagcctatcgtattccgcgcgcacgcttcccaaactactaaacggtgtattttttacaaaaattttctataggaaagttgctttaaaaaatcatattaatccatttttgaaatttaaaatagttaatactcaattaatcatacgctaatggttcacctcattttgcgtatcttcccaatccccttctccactcttatagtactccgttaaattcatgggtgcaactgagtatgtaagtcatcgctacgagcctgagcctacgatcacatgggcggtcaaattaaatgcacatgttctccgttgcagacagtaaaatgtcaactcccccgtatataggaataattatttttagttacttaggcgacttgcaagcaaattaaattgctgaagtcaagtcaattgcttgctcatctcaccctcactctagatcttcaggttataaaatgccaaatgctccaatcgatcgatcagagctccaaatcagtaagagacagctaggtaggtaccagcaaaattaccactaatataactacgagaattagcaaaatttgattagcaatgagaatgagaggcagtaggattgctctcctgctgctgatgctcctgcagtgcggcggcttgccggggatcgccgtcggcaggtgcgtcgtcttcaacttcggcgactccaactccgacacgggctccctccccgccgccttcggcttctacctcggccctcccgccggccgccgcttcttccaccgccaaaccggccgctggtccgacggccgcctctacatcgactttatcggtaagtactactccatccgtttcgaaatgtttaacgccgttgactttttagcacatatttaaccgttcgtcttatttaaaaaatttaagtaattattaatcattttcctatcatttgattcattgttaaatatatttttatgtaggcatataattttacatattttataaaagtttttgaataagacgaacggtcaaacatgtgctaaaaagtcaatggtgtcaaacatttcaaaatagatggagtacaaatcaatcaaactatcaaagccaggtttcaaatctccagcatatatagctgccgctatattcgaagataattgtttgagcaaggtctagctaatttatctagtatactatatgacgtcattgactttttaaatacaattgatcattcatgttgtttaaaatatttatataatcattatttattttattatgatttgatttattattaaatattcgacttaatttttttatatttacacaaaactttttgactaaaacgaatgttcgagcatttattaaaaatcaacggtgtcatatattaaaaaaataaatatagtacaatttagtttattattaactgtttgaaagagtatacctctaattaaatatcttaacccgttatttaaaacacggatcaaagctaccaacatcatgaattcatgatcaactctgatcattcgatcatctgaatgtgtgtagctgagaagctcaagatcagctacctgagcccgtacatggagtcgtcgggctccgacttcacctccggcgtcaacttcgcggtggccggagcggcggtgacgcaaaagagcgccatcccgctcggcctcgacacgcaggtcaaccagttcctccacttcaagaaccgcacccgcgagctccggccgcgcggcgccggctccatgatcgccgagagcgagttccgcgacgccgtctacgccatcgacatcggccagaacgacatcacgctcgcgttcctcgccaacctcacgctgcccgaggtcgagcgggagctcgccgcctccgccgccatggtcgccgacgccgtccgcgcgctgcgcgcgagcggcgcccgcaagttctgggtgtacaacacggggcccatcggctgcctcccccaaacgctggcgctgcggcagaagcccggcgacgagctcgacgccgccggctgcctcgccgagtacaacgccgcggcgaggtcgttcaacgccgagctcgccgccgcgtgccgacgcctcgccgcggagctcgncggcgccgaggacggcgccacggtggtgtgcaccgacatgtacgcgatcaagtacgagctgttcgccaaccacagcaggtacggcttcgagcggccgctgatggcgtgctgcggccatggcgggccgccgtacaactacgccaacctcaagacgtgcgggcagccgacggcgacggcgtgcccggagggggagaggcacgtcatctgggacggcgtgcactacacggaggacgccaacgccatcgtcgcccgcaagatactctccggcgacttctcctcgccgcgcaccaagctcaaggcgctctgcaagtgatgaagaagacttctgcaccgacgaccaaattaattaagttgataattaaccgaggttgcatgttaacctgtgattaattaagaaattaattagatgaataaaatgactggaatttgctttcggtcacaataaaatgcgaacaatctcgattcatatcttacagtgcatcttatgtattgccgtataaaaagggcacatgtcatagttccatgctgggttcacaccctctgctactattaggggtaaatggtagagacaaacagtaaaatgtgaggagcgaaacagtgaagagtactgtttaattattttattgaaattaccgcagcaatttgatctcgtgtatccaaacttgatccaacggctataaatagctaatggcatggatcactgtagttctatgcgatatgatcccttccatgcttggtattcataactactagtagaattttattttgttgctagaatatttttaacaaacatttttaacgagttcgaattgtaaaaagtgctccattatatgattggaaaactaacagtactaatgcgacacacttcccagaactggacgatttctacgcagctttctttatatactaatttctttgaaaatgctttaaatccattttatatttcataacagttaattaattcgtttatatcctcaaacgctaatcacaaaatcatccagctagttttcggtctcctcatcatctttaaaaaattatagtttaagtttgataatatacgttatatattaatttagtgattaaatatcggttaatatgtcttaatggacaatttaatatgttcctcttcttctatcttcccccttcttcctcattaccttcattattttttctctacgtctatcatagtggacaacggtaagaaaacagacggctagtagttgccaatcataacccatttcccattccttgtacccttaagtgcgccgttggctatgtctctctcattctaccaaaggtcgtcaccttccaagaaacctctaccgcctacataggctctcccatacttggtagtcactaacgatgttaagtattactcggtttgtgcttgttgttggcttagggcatgtctattgcaggtgatgctaaatttgccacatcattacaatatcaaacaagtattggatttcatttttcttatctagtgtgctcgcaccgatgctaacatccgatgatgctaatattaggtggactcattggtgcaaggatgagttgagcttgggagaaagaaaacggataaaccaaatgggaaaaattattcataagatttattgtgtctacatttcacaaagtagatggtattttgtatagggaataaaattttcagaaaacttgatccttttgcaagtgtcctaagttacaatctaattctctctatcaaaactacagtagaaaaaaaacaaatgccacaccactatagtgatctctatatccaaacacaaaaaagaaaaaccacaagaccatggccctatttggaagattagcccatggctaattttgagagctaatgtttactcttgaattggtaggctaaacattagtctatggtgatatgtatggattcatgagctaatttagggctaaaaggtggagagaaagtagagaggagagagagagggtgatagggttgccttttgatggtcctcacagaaaattagccccattagcatcccttgtaggggctaatgttttgaggtggggctaattcactttagccacaaattagtctacctgtttggatccttggaggctaattcaggactaaaagatggggggggctaataattagcccatggaaccaaacagggcccatctcgcatctatctctttccacccaactaaacgtgcactaacatcccatgtgagttcacggtggatgaaggttaaagttgggcgcgaaaaaacataagtgcatgattaattgagttttaactattacaaatttagaaaaaacatatctgttttatatttttaagtaatttctatatataaaactgtttacacgaaaaatatcgttgaatccttggaatgaaaaaatgaaggaatagaaaaaacacatgattataataggaatggaaatgtaaaacaaaagattgtaaaacacataaatgatcatttgattggacagtaggaaaaacacaggaattagatgagagatatagactcaaaagaaaatttccctcttgctaagtttcctgcaaagtctctataagattgtcaatttcttaggaattttaaaggattagatatgattcaatcctttgattcaaaggcttttataaatatcctctaaaatcctatatacctatacaaatcatccccactactacaattctctgcttcctggtgcttccacgtcaccctttttatccccaccgttggataagcatcgagcgcttccttctttccgcatcgctcctctcctcccctctcccgcatcgctacacgccggccccaccttctctcccgcatcgctcccctcctcccatctcccgcatcgctactcgccggccccacctcctctcccgcatcgctcccctcctctcctctcccacatcgcgctgctccgccggcccacgcgcatcgactcccttctcctgcatcgctcctcccctctcccacatatcgcgcagccgcccccccccccaccgaatacacgccgcaccgcatccacgctgcattccactttaccttctcctcttgcgccactttttagcctccccctttcccccttaaggccacccagcccttggtttgtgcgacccacaccgcccccaacgacggttgcctgtccttctcccgcgccgttccgattccatatccgagagaagcgaaacgaccgccgcccactaaaaccagacttcatcaccgtcatcaagacattaattttgtttgctcataacgccatggcgatatcattgtggcccttcgcttatattgccaatgaaattctgcaatccacctccaccaactgcttcgtttcatctgaatctcattgcatagttattcggagtacaatgatcttctgataggttttttcatcagtttgaatctttcatgtctacagaagggtatttgtttatgtggtaccgatggccttccttttgaatttgttttgtggctcctgtggattttcattcaggaaagataaatctggtatgtgcctcttctcccttatgctttcacccggcttttgtttctttctactcttgatgatgaatgctcaatttgacctattatctttttgtaagttcaacaattgtttacaagataagttcagtttgattttattcagtaatagtacacctatttatttcgacttataggattcgttggtttatgctctcgggtagaatggataatacggcaggttcttctcaaccaattatacgtcgtcgtggtcgaccacgccggcagccttctaatatcccgatcccacgtcctaatcaacctgttgctgctgaatctcgacgtaggcgtaggcaagttatcgatacaaataggaacagaggtttgttagaagattaacattcctacaagttgtcagtattttatgcagacaaaaaaaatgactcacattatcaatttcatcatttttccctagcatcaacctctgcagatcaacgaatattacgcccacggttaattggtgaatcttctaattctaatcatatagcacaaaatgaaccccatattcgtattggttcatctacatccaatcaattattcaatcacaggcgtaagttgtcttttttactcctaggatctaaccactttaaggtatccatttgctgtaaagattccttcacatatacccatgacacacctttcaggcactatatttgaaccattgaatcttggtggtccacatcattcttgcagccactgtggtgcttttttttggtatgaggagcgaatacgtagagagagacatacttcaaatccatcatataatttgtgttgcaaaggtgggagaatatggctgccaccctaccaacctcctccacagccattgttggatttattgacctcacaaaacagcactctttctaaccacttctttgatcatattcggcaatacaatagcatgtttgcaattacttcaatgggagctaaaattaatgagtccataaatgatggaagagcaccatatgttttcaaaattagtggtcaagtctgtcatcgaattggttctttgctcccaccacaaggtcatcgtccagaatatgcacaattatatatttttgatacagaacatgagatctcaaaccggatcaatgttgcttcatctccccatgtcactttccatgctaatgaacaaattgttgcatccttgatagaaatgttgaatacaaataatcccattgttcaactattcagaacagcacatgaaagaatatccctagacgcatctgatcaattttgcataaggttatttggtaagccggatgcacatggagatatttatagtgctccagtcgcttctgaagttgttggcctgattgttggtgatgttggatcagctgatgtagggcgagatattataatccaagatcgtgcatcacgtttgcagcgaatcaatgaaaatcaccgcaagtttatggccatgcaatatccactgttgttcccatatggagaggatggttatcatgaaaacctcacatatcgtacaatagcacgcactcaatccatgcaacggaataaagttacaatgctagagtgctatgcatataggttgcatgataggccaggagacttcaatacaccgttacggtgtaaaaggctaacacaatcttatgaagtagattcttattgttgtgtcgaggggagccggatagcacattattgcacaccagccttccaaagtaaatatagatcatcaccattcaactcattgattaattctgtctcaagaggtattacatctggatcttctattgggcaaaggataatattgccagcttcatttaccggaggacctcggtatttgtatcaaaattatcaagattctattgctatttgtagaaaatatggttgccctgatctttttttgacattcacatcgaattctgcttggcctgaaattagagaagctttagcattaattcctggccaacaaccttccgatcgtccagatattgtcaatagggttttcaaaatgaagctcaatattttaatggatgatataaagaagcacaaattttttggccctataaatgcaggtatcaaattttacattggtttccaaaatataaattttcctttctcttccttttgtaggtttaaacatgcatgttaccaccatgcaacccttaaaacatatcttttttcatgcagttatctatacaatcgaattttagaaacgtggtttacctcatgttcacatcatcatatggttggccaaaacagaacccttagattccaagaagattgatcattatatttcagctcaattaccagatcctgcaattgaccaaataggatttgaggctgtatcttcttttatggtgcatggaccttgcggtcctcacaacacttcttcaatctgcatgtctgaaggaaaatgcacaaaattctaccctaaggaattctgtgaagaaacaactatattagaaaatggttttacacagtatgcacgtccaaacaatggaagaactgttacaaaaaatggagttgacgttgataacagatttgnggntcctcataaatgttgattggntgtgaagnttcacgccccatataaatctagagaaaggtattatgatggcatgcc

SEQ ID NO: 14595 - DNA, 6494 bp, Oryza sativa
  unsure (1)..(6494): unsure at all n locations
cgcgcgctgggttgaanactgaatatcntcttcccnnnnnnnnnnnnnnnnnnnnnnnnnnnnnnnnnnnnnnnnnnnnnnnnnnnnnncaatcatcaagtgaaactatcaatgaaatagataattatctagaatgtcgttgtgtcactccaaatgatgctgcttggcgattgcaacaatttgacatccaccacacagatccctccgtagaacgccttcttgtccatctcccatttgagaataatgttattttcacagaagatgataatcttgaagaggtcattgaagatccaaacagctctacaaccaaactaactgcatggttagaagctaatagggagaacccttctgctaggcaacttacatatatagaattccctgaacattggacatggcacaatcaaggcaaatattgggatggtcgtcgtggttctcaatgtagaattggccgcattgcttatgtaaacccttcacaaggagaagcttactatctgcgaatgctactgcacatcgttaagggccctagatcctttgctgaaatcagaactatatcaggtcatgaatatcctacatttcgggcagcatgtgaagcattaggtctccttggtgatgaccaagagtggtcaaatgctttgaaagatgcagctcaatgagccttaccatcccaactgcgacaactttttgttacaatgttactcttttgtgaggtaacaaatcctacaagacttttcagtgaacatgaatcatatatgagcgaagatatatcatatagaatgccccgcaacacttctcaggccagcagctccaccaatccttatgttagatctgttcttctcattaagttagataaactgctaagagatgctggctatgacttatcccattttagtttgccactaccagatgatattggaagtgttttagcacagaatagacttatactagatgagctcagctacgatgtttataacatgccatccactatagatgaagctatttcaggtttgaataacagccagaaggaagtttttaatgctatttataattctgccatcaataatgaaggacggactttctttgtttatggatatggaggaaccagaaaaacattcttatggacaactttgcttaattctataagaagccagggaaagatagcattagttgttgcatcatcgggaattgcatccttgctgcttcctggtggaagaacacctcattcccgtttcaaaatcccattggaaatctctcaaaattcaatgtgcagtataaagaaaaatacaaatttagctgaactgatccaaaaaacatctctcattgtgtgggatgaagctcctgttaatcataaatattgctttgagtcattggatcgaactctacgagatatattgtctgaaacaaacccaaattcattagacaaacaatttggtggtataacagtagttcttggtggagatttcaggcagacactgccagtcatccaaaatgctacaaagcaacagattttgagatcatgcattgttaactcttatttgtggaataagtgcatacttattgagttaactgaaaatatgaggcttacctctgcatctatttccgcacaagatagagaagagttaagaaatttttctaattggcttttgaaaataggaaatggcacagaaccttttgttgatgtcccagagcaactaacgaacatgttcatagagatgcctcagtcccttcttctatcaccagactgtaggaatctagatggattgatttcttttgtctacaacttaggatgtcaaccatcaaatcttacatcatatctgtgtgagcgtgcaattttagcacctacaaatgaggtggtttcagaaataaacaatagaatgattgctcagttagaagcgagtgagatgtcatattatagctcagattcaattgatgacagttctactaactgtactgctatagaggcactatatccaacagagtttctaaacacaatttctataaatggacttccagaacatgtgctgcacttgaaaattggtgttcctataatgcttttgcgtaatctagatccatcaataggactctgcaatgggactaggctcattgtcacacaactaacaagccgtgtgatagagggagaaataaacacaggaaaagcgaaaggtacaaaagcatatattcctcgcattgttacaacattaactcaatccaagtggcctttcaaattgcggcgtcgacaatttccaatacatctttcatatgctatgacaataaataagagccaaggacagaccttgagcagagttggagtctatctaccttcacctgtgttctcccatggtcaattatatgttgcattctcgagagtgacttcacctaatggtttgaaagttctaatagagaacagccctgcttcttatgaaaattgcacacacaatgtagtatattccgaggtattcaacctaataaatagaaacaggaactgataaggtatattgtgatgcataggttggtttcgttattagttttgtaaatataatgttttactgtacttcaatttccatattttgctcagtacgtatgacggagcgtggggctcctcaccaggagactgcgcaggcccccctttgccggttcggccgggggcactaagtgaggttcctcgccctcgatctgaggaacgtcagcgagagaagaagtgcacaagacacgggcgacgtagacaggttcgggccgctgagaagcgtaacaccctacttctgtgttatggtggatctgtgcgtgaaggaataccgagagccggagagcgagagagagttcagactctagaacccccccttcctcccttttttcttttcttcccttttttcctccttttttttcctccttttttttttctctccctcctaggcctgggcctcctttttatctggtcaggggtcaccacaagggcctctagctgcctaagaagggaaacatgctttttacaatgagggctagtctacagccggaagtgacctctgatgtcacagcctgaatttccgttttaggatttataaattatttaataaattattaatagaatttatattaaatgttcattaatttacaagtgaagttaaatgtgggaaataaaatttcctaaatgtaaagcatggttggatttaatttttattaaattctccatgattaattatactctctgaaattttctcggaattttcggagctcaattcctaatgttaataatataaagaacagtttagcaattatttaaataataaattaatcattaaatgatctggatattattatattaaatactttgagtgtccaagtatgttcaagatttttcttggaattatttgagcattggaagtatttttaacaattgaaagatcatctggttggttaatttatttggaaaagtaaataaaagtcctcctcctcagcttgggccgaatccagcccattccctcctttcccctctcccttcctctcagcccagataaagtctgtttgacctccctgtcgctacagtactccatcttcctcctccagacagagccgagccagccgtgctcgtgcacagtgccgccgcctcctcccaccaatccgaccccccgttgctcctctttccaaattagttgcgggaatggaatcccctcaatctcctcttccttttccccaagaaatccccaaaattttctatggaaattctttccaatttcgcggatcaaatccttcctttttccggcgagaaccctagactttcccgagtttttcccgtcgttgtgggcttgatcccgagctcccgtgcctatataaaggaccccctagtcgtcctctacccatcccctcaagtcccgtccgccgccgtcgccggaaacgctctccccgggctctccttctctctccaaacgccggcgccgctccagccgtccctagacgccgcctcatctgcctccttcgtgcgccgccacctccatcggctccgcaaggtcgagctccaccccggccgccgttccccttgcgcggaaacttcgccggaagccgtcctcgccatgaaccattgggttgctgtcatgttccgatctccagccgcagctagcagccgccttagccgcggcatttggtcgccgctgccgccgttgggttcgcaagaaggagagggagcccggcagccatctccccgaagcggaaatccaccagagttccatcgtcgccgtcaacccgaagctcgccgtcgcgttttgatctccggcgaagccctgctgctcctccggtcatcgccaagcttcgccgctgcctccattggattcgcagctgcgaagtgaagcccggccacccctccgttgtcgccgcacatcgccggaaagtcgtcgcctccgtggacagtacctcgccgcccttcgaagctcgtcgccggttatcttccgttgccgttcgtcgtcgcataaatggtggtaagagtcactttgatcccctctcgctcccggtgccctccgtttgcgttattgtgccgtggttcgcttgcaagattaatcttagccgtccaaaattgatataaatccgttctttattttcaatgacatattattcctttttaatatatgtcatctaccaaatatgatctaatctttttccggaggatgttttaatcttctgtctcagctataaatcatttgtaaattgtttgattaatttggaatagtcttttctttaataggtttaattggaatttaatcttgtaaaatttgtaactaattcatatgaaatcagaatgaggccgttcaagtctcataattcatctaaaattatagtctacatgtttgtttactttttatgtattgtttatttggtttttattagtcttttttcctcgttttgcgtgttagcttgtcgtttccgtcgttgcgaaggttcgcgagtgcgccggaagtattcaagaagattaattgaagaccgattattgcaaggcaagtcacatagatcctaaacacaatcctttgagcatgttgatcctatatttaaattctctatttatttcaactgtgcatttattttcgaatgtcaccgggtggtgtgaacctattcctttgttatggcctgtttgcattgattactctattccttgataccttgggatattataacttgactagttgagctttatatattggttcagctagatattagatatgattgcttagccatgcttagaaacattagcacactattggaataacttatgacttactattatttaatgatggcttaatgatagttcatgatggtcaatcgtgattggttaattaattacttgccaactaaaacttgataatggtgggttgtgagcacatggttttgagagtcgtgctcatgacaattaaggaccggttcgcgagctactattgtgaaacattaaccgtgccaaccacaagccagcgtgggcaacggctttaccttttgtatagcatggttcattgcagagcaccaggttgagaaatggcggagataagcccacgggggtcgctggggagtccataccttgtttataagggggtgactatgatccgggaatggtgcactgtggtgagttgtgttgtgcagagagtattgtcacagcctctattcgggtactttccagtatcgcgacgcatggtacacatgatgttgaggctgtgtcttgtgggtacagtggtacacctctggccagagtaaaactattcgaatagccgtgcccgcggttatgggcgggttgagcaatgtttttcgtgattagtctcacacctctcacaataattatggatgttatacctggtaataatttgcttagctcctggtttagagttagatctgtacagccgggtatggttgttcagaatggttgggcctgtgcagcatgggtgtgttgttcagtgttgattaaaatttctgattaattactccactgttttacatctcttaaatgttttgctaagtgctgcttttgcaaatgagcctatattatgccatcctttggtatccttgtgcacttgcatatttgctgtgtggcttgctgagtatgtcatatgctcaccttgcaataatcaatcaacctcagttgaagaataaggatccagaaggagaagacgtttggcttataccccagttgagctgcctgtgggagtggagccggagcttcgctagattttattttccgctgcagttttcttcatggtgaggactaagagcctcttaagtaagtacttatcgttttagttaatttgatgaatctatatattaaattgtcagtttgtgtacctcggctgattcctggacgaggattttatgcacaaataagttcggaaatcactagtgaatttccgggcgtgacatctgacaagcagagcccatgcctcctgccccgctnnnnnnnnnnnnnnnnnnnnnnnnnnnnnnnnnnnnnnnnnnnnnnnnnnnnnnnnnnnnnnngagcttctaatngnaacacg

SEQ ID NO: 14596 - DNA, 14063 bp, Oryza sativa
accggccaccggtccacccttccaagccggcggggggcctcccccctccccctttggccagatctgaagggaagggagaaggggaacctcccccgcccgccccgccacgcccggtcgccgaaggccccgccgcgcccggccgccgtccgcccttcgccgccggcggggaggtgaaggggaggagaggagagtgaggggagggaagaggagagtgaggggagaggtgaagggagaggaaaagacacttagaaaatatcagcccatgtgcctcatatatatacctcgctaattttcgcaggcgcaccttgtgtgtcgcaggcggacggcaaacttcacgcctatttgcatttctgtagacggctatttggctctaagggctatgtccgcctgcgaaaataaatacccaatgttgacgaaaatgctttttctagccgcgtgtcaaaagttgtagttcaatatataattcaattaatttgccattcattatattgatcaggctcctactttgattaacttgtctacataacggatgacatgcctccatagtttgggactaattaagcagctctctatccactgaagagtgtgctgggaagtggcatattagcataggtagcatattagcatagctagctagttaactaattaattgagatggagtttcttgcctaacttgtatgtaccaaagcgtaagctgtgaatcgaatgaaatatctgtttttttaataataacagtaatacgaaatttgttaagagagaaaaccatacaggtgaaaaaagagttaacgattatgttatctcgatcttaatttggtcgctatggtatcaccacctttgtactcgagttgtgatttcgaagaaactgattatttttgctgaaaatatccgtggtacaataatcctgtggtgagaagttgacaagagtttatacacaaaagaacctagatcgaccatgcaatacacatggcaagaaagacgctttttttgggggagatgaagaagattcttctaactaattaaccaaaatggatagctagccatggtcactgtaagagttctttcaatgctacatatatgtgcaagagttggcaggttttgttgcacttaattaattttcaaaggcttcatcgtcactagctgacttcttagcattctatgagcaaaagaataaaacaatatagctctgtagaaaattagcaattgcatgaaggtcttaattagtcttggcctagtctctgggattcaatttatcttggatacattcatgcaccttctcctcctttgcgacactaacaacaaatagctagtacttgtctacaagctgagtccaaaccaaatgatcctgcaaaaacaaaataataagtggcggcaattgaacttctagattagtactcttgttctttcttggctgcatgtgtgctgcattcctttattaaactaacaaccacgtttgagaattgatctctcctggtcaaagaggctgcaactactcccttcatcccataatataagagattttgacatttaatttgcttgcactgtttaaccactcgtcttttttaaaaataattgtaattattaattatttttttgtcttactttattatctaaagtattttaagtacaactttttgttttttatatttgcacaattttttttaataaaacgagtagtcaaacagtaccagcaaaatatcaaaatcttttatattatgggacagagagagtagtacataagtacattgatagtacgagatatgataatcgatgaaatatcaggtaaaaaccattaaattagtgaaaatccataaaaaagtagatatataagttttctaaatttatttaaaaaatactactagagattggtacagccatgaactgcattggtacaaaatctaagtctaaattagactcgacttcatgctgagagagaaaaaacaaattttagctgaatatacaatatttatgggatttaacttttttaattattttcaatggatattgcctcatgataataatccaagctgcctacatatatttgatatatatgtcagtgaaaagtacacacaagtttatttgctaatatttgctatagtttgtatatagctgcttgttgcagacacatgcacttttcaatgtcaggcatgattaatatccaaaacacagaggagatacagaggaggacaagctatgaaaccaaattttgtttctatctaaaataaataagaaacagaaaagacttaattactttgtgatattttatctgaatattttacttaattttaggattctgaattatataatacatgtcataatttaaataacaagaattcaatctcactcctatttcacttctaataataaccgaggaaaaactaatccacgtgggggtgcagtgttgaagtataaatgatttgtcttatcatttcctcaaggattaaactagttagttaatgaagctaattattatttcatctgtttcatattatgagatataatttgactttttcctaatcaaaattctttaagtttggccaaattgatataaaaatttagcaacatccagtcatccacaacaccatactggtttcatcaaatctaagattgaatatatttcgatagtatgtttattttgtgttaaaatattactatatttttaataaactaagtcatttttttttaaaaaaaaagaaaaagtcaaaatgtctggtaatatgaactagatggaataaaaaaagataatcatatatatgaattctatgctagtttggcacttatgaattttctatgatccgagtggagagaatatatggtgcgaaagaaacatgtgtgaacaatgaaatcgatttgtcaccttttacatgctcagtttttccttgactaatctcacatcaagtctacctctaaacaaactaattatgagcatagaaggagagacataaaagtagaaaaattcaatctttcaacatcaaaagacaaaagaatgcagcacacatgctgccaagaaagaagaagagtactaatctagaagttccattgctgctgccacttattattttgtttttaggggattatttggtttggactcagcttgtagacaagtactaactatttgttgttagtgtcgcaaggaggagaaggtgcatgaatgtatccaagattgattgaatccccagagactaggccaagactaattaagagactttcaattgttaattttctacggagctatattgttttattcttttgctcatacaatgctaataagtcagctagtgatgaagccattatctaaaaaaaaaaagctagtgatgaagcctttgaaaattaagtgcaacagaacctgccaactcttgcacatatacatgacattgaaaagtgcatgtgtctgcaagcagctatatacaaactatagcaaatattggcaaataaacttgtgtgtacttttcactgtcatacatatatatatatatatgtgtgtgtgtgtgtgtgtgtgtgtgtgtgtgtgtgtgtgtgtgtaggcggcttggcttattaccatgaggcaatatccattgaaaataattaaataagttaaatcccataaatattgtctattcacctaaaatttgttttttccctctcagaatgaagttgagtctaatttagacttacatttgcgcaaatgcagttcatgcctatatcaatccaataccacatgataaattttcttggacgccgcccctttttgtttctatgcggttcgtaagtggaaccgcacggaaaaatagggggaccggcgccggattgtcacccgcacgggaaaatgcattttcccatgcgggcgtcttaatccgaccgcacgggataatcctcattatcccgtgcagtcgacttaagaggaccgcacggaaaaatcgattttcgcgtgcaggcttttcaatggaccgcacaggaaaatacctccctcctttccctcccacccacttcaaatttttgacatcctctctcttccttttttttcccttttattctcgctcaaccactaccctctctctaccttatctctattctctacctcctcctcccctcattcgtcaacagcgggcatcagcggtggcctcgtcggcggtggccccttccgcgcgcgcggccaggcggcgagcagcgaggcggaggcgtcaaggcagtggcggcgagcgggcggaaccttctcctgatcgtcatcctcgtcgtgcacgtcgtcgctcggctcccttgacgacgacgccgtctgcgtcgtcaaggcaacgacggcgagcgggcggcgaggcagccgggtctggcagcggcggcctcgcccggatctggtggcggcggcggccggcgcgactgtggtggcagcgggcgggctcggcagcgggcggtggtgattttcgcatttttgtttatttttggttttctttttggttccgtgcgggcggtataatttgaccgcacgggataatcgattatcccgtgcggttaggtcacccgcacacgaaaatattcatttttccaaacgcctggttccagacggggaaaacctcccacggaaaaatcaatttgaccgcatggaaaaataggttatgtagagtgatctctagtatttttttaataaaaatttagaaaatttttatatctaatttttacggatttttactaattaatggtttttaccggatatttcgtcgattatcatatcccgtgctattaatgtacttatgtaagtactaagcacgtgagctgcagcctctttgaccaccaggagatatcaattctcaaacgtggttgttagtttaataatccactttgtctccatcttattctttacaatattttgaccagtgtagtagtgcaatggattcaatgccctgcatgttgtcattgccctgctactttagagtttagaccaactttatgccatgttaactcgtttactaacgtcggatggtaggacccaattagcataaattcaactattccatcgaacaattggttgctcgaatgttcttaagtcaactcactgtttgacttgagaattaatctaacattttttgttcttcatagaactaatgcatgacagatacaaacaaatatatatgttaattggttgaccatgcacgcatgttggtgttaggattgtgaggacttagcagaggcttagctacaggtttagtctgactttggtttcatgatctattcttataaaattgtcatgttaggcgactcacattaacactatatgcaaagttttgattgtgccattcttgacctggttatacacttgggaaacatgaagtagggtcaccaattataagatgaaacaagatgccaaatgatgatgatacatcaagcatattgagaattaattggtttttcaacattgcagtgttaacaataatatctgttgtcaaagctagaaatggctgctatagctggggtaatgcaacatgcatgagtcaaagcagttgtctgccaagctagcttgttgagacatcagattaatcaacataattaaaatggtattagcttaggaagtggattgttatcactctctctactttatgttttagaccaaacaaaattggtggattgttctctctctagttatctacaatgttagctaggtgcatagctaggtagactaatccacaacaaatatctccctagtagctagtctaatcctcagcattagagggtaggattattcagggatgttacacatcaataaagtgtgtgtagaagctagcatgttcctgtatattcggtttggtgatatagaaaaaatgtaactaacattctcatctaatctatatattttgtggcgaataattggaggactgatctgcagtgaagttggtagaaagtggctggcgaccaaactgaatatgtcaatttcctaattgaacagtgtaaatatgcatcatatatatctatgccaacacacgtgcaaacagattctctagctaattagctaattaattaacatcgtaaactaccaagataattttaagcgactgattaacaacaaataagaaaaaagaaacaagacaactgacaaatacctctgtgatttgatttatcaccaaaagaactgacaaatatttttttatgtttgtaaaaaagaataatacaaatggtcaaacatgtcaaaaagtcaacaacgatatattaaaaatagaggtagttccaaattggagctgatatcctatcaggttaacggctgaacatgcgcagcaggaggatttctttgctagggtgtgaaaaccagctgaaaacatcttgtctaaaggatgcaaccaaaagcacatttttcgaacttataagtggtacgattttcgtaaatactttttatatgtgatttttttaagaaaactgttttaaattcacttttcaactttgcgatagttaatatattcatttgtctcaaatagctatcacaaaattattcagccattcagttattcagagagaaaaaaaagccctagtactaattaggattacgtgctatgagttaagaggcttaggttgttgctgtcatcagtcactgcacaaaatcaaatcaacacggctcattcgatcaatcggttcaaaaagcagctgctgccacgattaagtagtcgacaattcaaagaccttttaccagcccaaaaaaagatctagctaagagctaattaaactgtatatgcttctttagtggtgcatgccggccgttgcaattgcaaagcccggttttaatcattattcttctagcctagttagcaagatgaacaagcatacgactttgtctgatgagttgcaaaaggaagaatttttcagctagaaagtagagaagaggagacccaaaaaggtgaagctgaattgcacatcatcagtctctctcatgctcccctaccaacagggtgtgtgctatgtgtgatccctaattatttttttcgtttttttttcttgccactattgatcactgctgttcaaattttgattgatgttttaacagtaattcataaatacctaaaattgtacaacgggaaatatatgggatgcatgacagctatataatcatatcttacaaattccattaattaagccggctatatatgctagattgtgttgtgtgtgaatactagcaaggccatgtatggaaatgtgcatgcgtgcatgagtgcatctgaggttgaaattgtacatttgtgtagctatcacaaagttgaaaaatgtagtacatgtgttaaagctctttgaaaaatgtagtacacatgtgttaccatcaatatgacaataggcaggttaattttgattagaaatgaggactcaagaggtaattatatgatgtttcattggtctcattatttcccgccttaatttcaggggtttggagttctggaaggcgcatgagctcgtcagaatttcagaataacgcacttgataaattgtgctttttgatgaaaaatacagttaattatatttggcttcatatcaatgaaaaaaactgctatatccttctgatggttttcataatacgcatatatttcaagatttaaactttatttttactaaacatttagtccctctggctctatagttcttaagttttgaagaagtttgatgttacacaatttgaactttaactatcaatgccttttaaaatttttgttttgaagacactaaaacatgatatgtagattggtctaaaaaatacttaaataaaattaaacacttttttacatattataatatagaaaatcatagtcagtggtaaattttagagaccatgccattgttcaaaatatcaagaattataacactagagggagtagccgaattgtatgtaaattttgtgaaaaaacatagaaccattgggctatcactagaattcacttacatttagagaaacctatggcttatgcacatagcatccaattgtcgatattaggatttaaaccttagtagattggagtcacgtccatagttccattcacttccttatatatatatagttccgtcatcttaataaagctgcttccccgaattcacttttatttattccgacattgctacccacggtacattataagacaacttaacagttaaagttttcagatcgcaatgactcaaaactatccttacaaaaatcaaccgagagatcagaaagcaccattacttgatcaaggagacaaaaaatatctcacacaaatgatcgatgtcaaactgtcaaaaagtcaaatgcacagtggcagatagaaaggtaaaaaggcagaagaaaaactgtgattaattatacaaacaaaatcgactcaaccgtgttcttgtcattaccgcagatgctttgctacaacactaaaaaaaattattcacagcctattggtcatatagctgtgaacttgtagctatgaacttgtagctgctttatatagttaattgactggattaattaagagaaattaacgcgtattaagatcgagatctcgcctgccaagcttatcctatacatgtcaccatcaaactcgtgtacacgatcgatcaaatcgaacatgcatggcgatcgatcgatcatcgatggatttgcagatcgagcagattgttgttgactcgttgcaaaaaaagttgtttcaactcgagaaattaaaggcatgcaagcacgcatggactggatttttcacattttggtccttttgaaaaacttatttcgcaagtagatccctagaaaaacttatcccaaaaacggtcctttttggggcgccagagtggctggcgccgtcgttcaacaggacggcgccagcctctttggcgccgtcccaccgccgacgtggcggggcgatgctgaggtggctagggggagtgcgccagagtggctggcgcccccccccccgaaattttttatttttgttttatttgtttgatatttttttcacgcttagggacacacaagaaccaaccatagaaaaattgaactcaaatggacgtaatatgtgacatgtagaatttttcctctcctctcctctctccgaactagtgtagaggagagagatgtgcaacttttttatttttattttttttaatattttttcacacttaggaactcacaggaaccaaccacgtaaaaaataaactcaaacggacgaaatatgtggcatgtggaattttccaaagctccaccgaaaaacttctctcctcgaaaacataatcttgcaagcggaatttggaggttttaatatcgccaaacccggcaaagcgggggagaatcggatgtaactttttctgtagatgtccgttcatatattatttgcctgattccgagtccgtatgagaaagttacgcctattttaatagatggcatattttgtccgtttcggtagagttttggaaaattctacatgtcacatattttgtccgtttgagtttattttttatacggttggttcctatgttctcctaagtgtgaaaaaaatatcaaaaaaatgaaataaaaaaaattgcatctctatgtactgtttaacttatatgtcatttcatgtggttatattttgaattagattaagtaatttatatagtggtagagtacattatgtttaacatgctgatcaaagggttttactaaaggagttatggtctaatttgagtgaaggtgcaaagtagactaagtggtatgctagatattttcagacttagctaagtggtagttcgagtttaattttttttttgtggttggttgtatcgtgatcctgagtgtgaaaaaacatccaaaaaaataaaataaaaatgacaccgttgcaactctatacaaagaaacaggaatggaggtggcggcaccagccatgctggcgccctcctccctggggcggcgccagcatggctggcgccctcctcttgccacgtcagttcgcgtgcgccacggtggcaggaggacggcgccagagaggctggcgccgtcccgttggatgacggcgacagccactctggcgcccaaaaaggaccatttctgggataagttttttcaggggtctatttatgaaataagttttttaaaaggatcaaaatgtgaaaaatccagcacgcatggatgcaattggcaaatgtgcgagttttgctgaatttgcttgcttgactggaggactctttagacttcagtcttcgtttggctaggttagcttattaggtaggtagatggatagcttatagtgtatagcttagtccaaagctagcaagctagccacttgttgtgtttacatcagccatgatccatgattttgagcttaattagttagcgagttaattttacattgatgtaccagagaaaaaaaatctaaattcattagtatgtaagagaatattactacatccgttccaaaatataacaacttatatctttgtatccggatattctaggatggagtagtaggatttgataaacaaaaatatttttttaggaaaaatgatattagtatagttgacctagaaaatacttcctatgtagttgaaaaaagtaatgataaagtatatgtgcatggtcctattagaaattatgttgatatcaaaacgtcaaacaaaaaaacgaagatgatacaagctaaatgtgaatacatagatctcaaattcttttataatttatttctttccctttttatcatctatagataaatctaataaagtatgcaaatgccactcattggatcaatatacaaaatatacaatgatcgctctaaatatttttattttcaatgaaccggaattgttttgtttttgctaggacttagtttttgaccccttgattttcgccgctaaagctatcactctaaacaaatccatttagctgctaaaataagttgcttagatctctgggtgatgctgtgagtcacccaaagaaaaaatgacgcaagctaagaaccgtgtattatccactacagtcgtactagcataccctagcgagaagccgcatcgtatcgaacattcgaacccgtagtacgtgtggccacgtcaggaattgacacgtcaccgtgccaaaaaaaatcgcacgcttgtatatgtacacgtggcaggctgtagcaagtacgtggtgacgacgacacgtacgatacgataccagctgcggctaaaattgcacctgtacctaccttgatcaattctggccggtcaaccgtgtacttgcacaagtggcatcgtgcagcaatgtaccagtatctgtcacgtacggctcatgtagtcaaacatgttttttatttcttcttctttttttgagaggagtcaaacggtcaaaccttgttggatgtttctcgatgcttccagtaactagtgtcttctagcatttccgtggtttgggccttgttgaagtgggccacatcaagcccaaaagcccagcccaatctagaattacttctgcccatcacccatcaaattctggcagaattcacatgaatttcccccatctttgttcataatgaaatccagttcatgagtttgtttctggcaacaacattttcagtgtaagatgcctggagccctggactggaggggcattacgttccagctttattattgctgctggagttcacacaggcatgatcatcatcatcactaatcaacaggggagtgcagtagtggtacctacaggaaacatgctctctcatgagatcggcattgctgaggacagcttgtccgccagccctccggccatcctctccgctcgctcccctcgttcgccggtgcgtattctgatcacgtccgacacgggtatcactgagaaaatgtaacaccatacaagtcaggcgtaatagcagagaaacattacatgatatatgcaaaagaatgcgacgtttggttgcacggaacattagtgcctttaggattgaaagggcgtttatgttggcatgtcgataaattcgttatagtagctgcctctgttgaaaaatcaattttaaataattttttttccagaatggtatggtgaaagcctgattagattactctatgctctagtgcaattgatactcaatatttttaagttacatatattttctttatgtcagagataaaatacatagagcacatgaagagaaacaacagaactcgatagatgcctgctcagggcaatagaagctcactttgatacaaaggtgaacagtgggaaactgggaaatgatctgaacgtaacaacagagcaataaaaggtcatcagaaacagcatgcacttacaaaatatttttccatcaccaatttctcctgttcttgccttttcaattatcttgtcaacaacagcttcaacctagagaatgccaaaagggaaaaagaaagaaagaagaataggctgtttaagctgttgtttttaaattgtcacaaaaacatgcagaacaggcagtaataatatcacggagggacagcaaaacatgtttagaaatgtagtagtagtgatcgtacccacatagtcaatgatctcggatgaatactgggaaagtttaggtatatgttttttcaaatttcaacattacaaaatagtcatgaagaaatcacctgatccttggacaccactatttccatcttaactttatcaataaatgtatcttctgcaaattctgaccctgcacgacaacaaaaaaaaaggagcaccatcagtacagattaatctagccttcacacaataatacaagcatacatgcatgctcagttgtgcagagaccaaaacttctttgaaccataattaacatgccaatgttgctattgatacaaatgcttaaactaccctcccttatcacagtaatcttcttattcctaacatttcccaaatccatgcttcttttccaatcatataaccgcagcaaactatttggataaaaatagtgatagtagttgattcaagtatgtgcacagatagtttatgccagtgcccagttgctccttgcaccagtggcatttaaagcatattgaagataatgaggatattgtgtgcatctttggctgtaacccgtctttgaagctctcaggagcgagactatggaaggtatgattagaacaggcatcattttaagtgcagtctgcctgtgctatcaacttcttggatacatcagcagccctttagtttgctactttactgcactctgcacgtggagaccttcaagatttctggcaagctcgataatacctaggtgttgtaacagagtacaacacaagatgctgctgctagaatgcctctttgagacaagagcacaactttaccaatcgtaagggctagcagggtgctctcagttcatctaggctccaacaggcgaaccttatctttttaactggaagcatacaatggtacaaaccatgcgaggaattttatgagttgagcaatccccattctggacagaagtcgtctgtcattgcacagacatagcaatatcctattccaaactacggtagaaatcaaagtacaatatacaaaatggaacacatcgcatcaacaatttttgatcagtttattcagtggaaaccggtgagcagattcaggtatatccattctatcgcattgctagccctacgaaacgtatccgtaactacaaatctaggctcacaatcaacaggatgaaatttctacacactacaaacaaccaccaacactaaaaaaaataggcaatgataaaaccatgagcagagccagcatgtataccttcatgcctctcagttgacccgccctgtgcgccgaaaccccgcacgtcggacaccgtcacgcctctgatccccatttgcagcaaaccctgcaaaccccaattgaccaacctaacagctcgagtgcaggaagaacacgatttacagcagtaacacacactatactcaccgatgacacataaggcaccctccatggcctgcaagaatcaacccggcacatttcatcagcaaccaaaaaatgtaatcacaatcaacacggatcacgatactaatcggtcacaaacgaatttcacctcaggattgcctccaccttgtagaactcggactcgcgctggtaccctgaaaaatgaacagacaacgacgaccaccacgacgatgacccaatcagcgataaccaatccaacaaaccgatctcgatggat

SEQ ID NO: 14597 - DNA, 4698 bp, Oryza sativa
  unsure (1)..(4698): unsure at all n locations
cgcgccgtgaancgcccacgagatgcgnctgtagacnagccgaattngagacccccgacagccggccgagctattgacctcgtggccgccgccgacaccggcgccggtgccgaaacttcgccggcggcggcggcgtccgcctggatccgctcgatgaggcgcggcatccagacgtggcggacgacgtcgcggaactccttgctgttgacgtcgcacctcagctgcttcgcgtgcttttgcactctggtcctccaataattctttatttcgttatcagtcctccccggcaaatactgcgcgatcttagaccacctggcacacagaagtattcgcatttaggtccctggaaaggactgaagtgtaattaattaaggtaattaaattaattaccggttgccccagcgagagtggaggtcgaggatgaggagctgctcgtcggccgtgatgttgccgcggcggacgtcggggcggaggtagttcagccaccggagacggcagctcttgccggtgcgcctcagccctacacgtgtccacactctaagtccatcagctagtgcaaaattaaccgatcgactaatcactgaagattaattttatatctttgattttttgcatgcagagattaattgatgaggatggagagagagctcgcgcaatgaagcttaactagctaaactagataagcttctagaatattccagattaagacgtgcactagctagcttatcgtgctcagtggagcaagccaaataggcaacacaacagtattggctatttggcacacagagatcgttaactatttaattaatctcaatctctgatcgatcgatcgaatgatcaactgattaatcaattgactgaataattaattaatcacctgcacagcgagcaagcgagttccagcgaccctcgccgtggttggcgatgtagtcgacgagcagcatgtcctcctccaccgtccatggccccctcctcaggtcgccctcgtcctcgctcgccgccgccgccgtcgccgacgacatcgccgggctcatcgccatcctcatcatctccatctccaaatccatcgatcgatctcagtagctagctagtgatcagctgtagctgtggggtgtgtttgagaatggaggagatgtcgagagggaggcagggtttatataggaggggggacatgtggggttgggaggaggacgaccacgacgatggctaatgatgatgcggatggatgctgctaatgactgtggttagagccgcaattagctggctggctgttaattgtatagagacagttttaaaagcctaaagtggaggaggggggtgtcgcgggaataaacaattcaagcggcttaagaaaacaacgtgtctgtctagctgctccgaccagtcaaccgttgaacgttgactccccatgtaatggtgtcatggccagcactattagctgtaaaaaccgtttagctattctactcgtttctctaacctaaacaccgtacccttaatttgttttgcctatttagggtttattatttcaaacgtataaatatttcagaatcatataaattagattattttatcaatcacgcccataaaatttggacgcaactagtggctgatatatacgctaggaaaaacatatcggattgtactccatcacttgtcaagaattattttagatgtttcatcgctcgatgaaaaatatttcaatcagatgcaacattcaaaaatattaattgcaaacctaattgaccaatatgcacataaacagtaaaagaaaacgataaagaaaaacaaatgttgccatgcaagaaccttcgagatggtgaagggtgcaacacggctttgatgagatcacgtgtgagcaaggatttaaatctccggctatagcagtagaagcaaccgctaagatatgtctaatttacagctacacgttctaaggcgctattagctgcctttagctggagatagccgctaaatgggctctcaagtagcggcagctaactcgttggtgggctgaaatcctgaaattggcgaacggcccatatcacctaacgaaaccctaactctctccatcttccactcagtcactctccgtcctctcctgtcgacggcggcttgcaggcttgcagcggctgctcaaggaggcagcagcagccgcgacggcggttgatcccgaaggcggtggctatgacctgcagtggcggcagctgctccccaaggtggtggctgcgacctgctgcggcaacggtggcggcggcggtggtgactctcgaagacaacggatccaccaatctcggccccaagcgacgactgtgacaggtggcggcggcagctattggtgttgcaagcggtgggcggcggtgcttgttctgtcagtattctttttcttgtgctcgagccaaccttgtgttgtttcttggttcaaagatgggttggtggcttggctgctcatgaattgtttcttcttggtttgttggtggcttggctgctcatgaattgtttcttcttggtttggttggttgcagtagcctcagggtgaggagtatggaggttcttgaattgttttttttgttcaagttcaggaattcacgggggaggaattcatgggcatgttcctcctgtaatttagcaagatggttgaggaagtggtgaggatttgatcctactgattatcaagcaattcctctctccctagtcttctctgctttccccaagttaaatagctttctcttccatataactgattatcaagttatttatgtctaatttttgcaaaaaccgcttaatagcttagctgcagctatagccagctatagctgatcatagatgatagagaacctagcagctaaatgtcttagccggagatttaaattcttgcgtgtgagtgcaaccttcaatcaatcagagtgaaacacttgaagacaacaaaatgcaacatgaaaagcaataaattcaaataaaaatccttaaacttcgacaaatagccttctatccgctttcttcctctactctagtggccgaatctgccttcttcctccactctggttgaggtcgatcaggagtgtatggcagtagccaccgcgaccccagtgatagaggaaatgagggccacattctccacggagaggttgttgtgtgagtaaacgattcaagcgccttaagaaaacagcatgtctgtctagatgcttcgaccgctcaaccgttgaatgtttaccccccacttttctaatcaaacaataataacactacaattttttgagtaaattttagagcccttatattatggttcaagttgcacaaaactaccacaaaaattttaacaagtggtacataatcaagattatgtattatggctttagtgtttataaaagcacactattgatcaatctgcttaatattgtagcagataaaaaataatactaatgaacttatatggctgcagctttcttgaattaaagtactcataaatttcagacataactttataactcatatgtaggggagatcaaagaaaaactaactataatgtatatatgggttaactcttgtgttttatgtaactacttgagcatagtatgtggggttttatgaaattattttttaataatagaaattgccacacagcccgttaataacactgtcggatgacaactcgatctaaagaataaaagatcagcagatggcaagaattaaaaatttaaaagtaagcagaatatctgctttgtcgacagaggaagcctactagtaattatactggatactgtggaatggtttcaaagatgcagcaagacttgaatggcattaattagtttgttaatctaatccatggaaggaataatgcaaaggccagaattattgcatatgattcctcttgaaccgcaaagtagaaatactttttctgtttttccagccgtagtagtgataaagagatcattagctgtttattttaagggtgagggatcgatcaattaccaatagctgcttagctaagttcgaattgatccggattgttaagagtaagaggagcgggcatctttgaacaccaaggaacttgtgctatatgcgatatgaattcaaaaggtcgaatttggtgtattcctagatatatccaagtagctgtcactactagaaaaagtattttcgcaggcggccaaaagtgatttttgcaggcggagggcaggaccgcctgcatcccaacgttttcgcagtcggggcaatggcccgcctgcgaaaatccgttgagcgagcaaaaaaaattgcaggcgccttgccgccgcccccatgcgccttgagtcgccgccgccaccacgcgcctcaccgtggtcgtcgccgtccacgccgccgccgtcccgcaccgtcgtcgcaccgccgcccctgtcggcctcccccctccctcctccggccagatctgggagggagggggaggggagcctctgcgccgcaccacgccgtcgtcactgccgccgcccccgccggcctcccccctccctcctccggccagatctgggagggaggggggaggggagccgccgccgccacccctgccgtcctccggtccgtgtttcgctgccggccgccggccaccccccctctggccagatctggaggggagggagggaggggagccgccgccggccgcctcgccggggtacgaattcctcagtctanggnggtnnntgcancgccagtcctctataagcaccg

SEQ ID NO: 14598 - DNA, 697 bp, Oryza sativa
  unsure (1)..(697): unsure at all n locations
gggcccgaggactacatgaggacccaccaggggcgcaaatgggactgggaccctgaggacttcaggatggtggtccaacgggtgctgaatctcagctccgtgnaggcatccctcatcccccaaggggtcctccccctctgctgcgatctagagcgcgccaagatcctggccatcatgcaggtagtcggggcgtcgggggagcgggccccccgaggccacgatggcgcgggcgggagccgcaggggggaacaatctaccccgggagggggtcgtgcttctgggccccgcgacaggggcccggggggcagcccccctgccgacgcccgggggaagaggaagcaggagggtacccctcccccttctcctccccaagggggcggggcggtgcgtgccagcagcaggcgcccggagggtgccgtgccgacgccgcagcccgagggggagcgaaagaagaaacggctccgcaagatggggggaccgagacatgccgggggaacctcatctcgcccccgaggtggtcgtttagccgacctccccgcaggttcgtccccgcgcccaccgcggccatattcactcttccatctcccaaggcgagttttcactcacccgtttccttttgtcttctggtttttcttctgnnnnnnnnnnnnnnnnnnnnnnnnnnnnnnnnnnnnnnncaggtgtctacgcagcggcg

SEQ ID NO: 14599 - DNA, 709 bp, Oryza sativa
  unsure (1)..(709): unsure at all n locations
ttaggccacgcaaagattactgaangtantacgtacagcgncttnnnnnnnnnnnnnnnnnnnnnnnnnnnnnnnnnnnncagggaccctgacttctccccgtgggcagcgctggaagagttccttcccggaaccggggacggcccccgcccccaggtccggacgcccgccaacccattgncacaagtttgaagggtccggcccttaagttggggttggggtcttaaagctggaattttttttggttttcgggttttgggatttctttacaaacaagatccaccaaaacacaggagtagggggtacgctttttaggggcccgaactgtctacggtgccggggtttgtgcactttttctctcgctgacgntcttaaatggaaggcgaggaacctcacttaacgcccccgggccgacccggaaaagggggcctgcgccggtctccggtgaggagccccacgctccgtcatctggcgcgccacagtagggtgcgcgtgtctttctaagccctcgtcctctttcgtgtgcgccaaagctctccccgctaagccaaatgccgaacgggcaggggcgcacagnctctctccgaacgctagcggtgacgacggggagcagaacccgcgccgtnggctctcaccccaccgtnccctctttgcgaaattttggcgggggaggcgctccgngaggtccgaggatccgcgacttcgtcgc

SEQ ID NO: 14600 - DNA, 711 bp, Oryza sativa
  unsure (1)..(711): unsure at all n locations
cgcgggtgaangcccaactgaatcgcctcgttgcgnnnnnnnnnnnnnnnnnnnnnnnnnnnnnnnnnatgccgctgacgatttgttaaacacccccgtttaagaggctatcatggcaattactgaagttttcacacataaccagccgctcggtaacagcgacccggcgcacactgcgtatggtcctggcgaactgacggcttccactccagccatgacgccgctcatgctggatgccacttctggcaagctgaccgtctgggatggtgctcatgctggcgcggcaatgggcatcctggctgtaaccgcagaccagaacagcgcggaactnnnnnnnnnnnnnnnnnnnnctttccgtattgaagatgtcctctggccatctgccgtcaccgacgacaacattaaacgtaacgcgttcgccggtactgcaatcagcatcgtttaatccgcatttctacaaccatcatcattcataaaagccgcttgcgcggctttttttacgggaaaaatctatgtccgtttacaccactgcccaactgctggcggtcaatgagaagaaattcaaattcgatccgcttttcctgcgtatctttttccgcgaaacctatcccttcagtacagagaagggttacctgtcgcaaattcctggcctggtcaatatggcgctttacgtctcgccgattgtctnccgcaaagtgatccgctcccgtg

SEQ ID NO: 14601 - DNA, 2577 bp, Oryza sativa
  unsure (1)..(2577): unsure at all n locations
aaaacggcactataaattggcnccaacactttctcggctggcanaagcttggccttctctgcttcttccaaacctcccattcactctgttcccctctcttcccctgctccagaaagccaagttcaaacatggcgcacaacgacgaagcgtcctcgtcgcgttccaccacctcctccgccgcccaaccctcgccaccatcacgcctcgcccccgcctccgccttcgcctctcccatggacgcggcggcgcccgcgcgtgacttcatggcggaagccctccgcctcgtccacaaccgcctcacgtgcctcgtcgaccgccgcaccatggcccgcgtctgccacgactggcgcgtcgccgtcaagccgctgcagcacgcgccgcatcgccgcccgctcccgtggatcctcgtcccgcgcgccgacggcccttccttctcgtgcgccctccgcggctgcggcggacacggcctcggcgtcccgcacgacgcccgcgccgcgcgctgcttcggcgcctacgacggtggctggctcttcctcgccttccgcgagaccttccgccacaagctcctcagcctccgcgacgttcagctgcgcctccgcctccccttctttgtccgcccggacatgacggctgctgaattggggcggcctgtcccttacattggtatggtcatgctcgccgcgaccctctcttcgccaccggaggacgaggattgcgtcggcgccgccatcatcacctacgggccctacgaggctggtcgacgcactcacgcattctggcgcgtgcagtcagcgaaggctttcccggatcaggctgcggcgatgggtcatggctccgatgccatcgacgagccagctctggaggatgtcatacaccacaagggggccttccttttcctcatcacagaagaagacctccatgttttcgcagtacgggatttccatgaagacggcaaaggcaacatgaagatggcgcccagggcgattcgtcgcttctcgcgaggtgggcgcgattatggcggagacatcgttgtccgctacctggtggagtcccgcggcaatctcctcatggtggtcaggcgcgttcctgatcgtctacacgcgccgccgaggacgtccgcgttcaaggtgttcgagatggtggagccgccgtcggggacgcgcatcgaggccctgtacgcgtggaacgagctggaatcgctgggtgggcggatgctgttcgtcgcgcgaggctgctccagatcgtacgacgcgggcgactatccgggcgatgagttcggcgagggcgtctacttcctggatgacgggaggctctaccgcgagtcggcagtgttcacggctcggcggcggcgacggcgatatccctgcagagacaccggcaagtggctaccggcggcggatgcggcgggggttcctcgtgtggacaagttcttgccggagcaaggcccgtcggactactcaccgccggggtggcttctcccctgagattgctcatgttacttttgatcgtcctggtacaggtatgattcgctgttgatttgatcctccgagatgtggtttagtttgcagccgttgtactttgtcccgtcccgtctcctcttgctgcgatggattagtgtagtttcagtcaacagttgcagtttcagtctagatttgatgtcataatcatggattggtagttgctatgatgctggagaaattctccttttgtagcagaaaatgttttcaagtcagaactacatgaatcgtgaacgcagtatgaaactatgaatttgtgtgatctgatgctgcagtgaatcaagaacgcaatatgcttccaatggttgccgttcgtcatgacttggattgcattagtacatcgttatgctgcagtcaataacaatgcaatgtgtcacttgcagtggctagttttcctgatagaagtatgttttgcatcaaacggttttgcagtgaatctgaattgcttctgcgtcctgttttgagtttcttgctgacagtccaagatgaactgaggtaggctagtgccactcttcagaggatcgagaaatgcccaggggtcttccggctagctccacaaggtggtgggctagacgacctggattcaaagcctcacccctcctaattatttgatattaggtccttccctaatattctagttttttttttctcttcagaggatctgttcctatgttatgtgcataatgtaaaatgtggagtatatttcttcagtcaagaggtatttcttcagatcctaagttatcagcatttcttcagtaacacagatgataggcagcgtgttaatatgatcactagtactgatcagatgatgttatactatcagcatttcttcggtaacacagcctgatggctgatggtaggttggtaggcatcatatctgttaatctgtacgggtagttttaccatcatatctgtgttactaaagatgatgatcacattggaccaataaatctctccttttctttttcctctcttttttatttttggccgggaggaccaataaccatctgtccaactctacatgctcccatgtgtccatatgaatcaacctagtgaatcc

SEQ ID NO: 14602 - DNA, 2988 bp, Oryza sativa
gctccttgtcgtggatggaagtcctcgtcggtggctccaccatctcgaacaccttgaacgccgacgtcctcgtcggcaagagaagaggatcggtgacgagcctgacgaccatgaggagattcccgccggactccacgaggtagcgaacagcgacggctccgccgtaatctcgcccgccacgcgagaagcgatgaacctccacgggcggtatctcaagattgccgttgacgtcttcgtggaagcccgctacaggaaaaacatggaggttttcttctcttgtgaggaatttgaaggctttgttgtggtgtatgacatcctccagaactgacgtggtgacgaactcagcaggatcatgagtcgcctcctccgcaactcgatgcctcaggatcccgaatgcatggattcgtggattgtccatcatgcaggaatggctgatggcggcggcgacgcagcgttcgtcgcccggaggcgaagagagggtcgcggccaccatgcccatgctcatgtcggggacgtggaatcgcgtgccgttgcggaggctgagtagcgcgtactccagaattcggccgaaggcgacgaagacccagccaccgtcgtaggcgccgaagtagcgcgcagcgcgtgcttcggccgggagcgggtggccgaagccgtgggtggcgcagccggcgagggcgcacgcgaaggaaggcccgtcggcgcgcgggacgaggatcgacgggagcggcctcgtccccggcggcggctgcggctgcggctgcggcttgacggcgacgcgccagttgtggcagactcgggccatgcggcggcggtcgacgaggcacgggaggcgcttgtggacgaggcggaggacgtcggcgttgaggttgaaccatggcgcgtccattggagagggcgaaagccgaaggcgcggcttgccggtggcaaggtgtgtgtgggattgattcctctgcttctgaaagcgggtggagatgacggcttcgtttggaagaagaaggtgggtgggccagcacgcgatcagtttggacctcttttatagggctagctttcttgggccccaagtgtatctccctcgtgaggcagattaatgggctcaaatgtataatgggcctcatttattctctatgggcttttagatggccttttatgtagcccacgaggccatgaacgcccaatgcgagaaggatcagacgatcagtatcatgtcctcctagtctcctactgatgtgtgcaatttttcctactctgaatcagcctcgtctaagataatttttctcgtctaagataattcctaatcctaataaaaaatttcaaaactaaaacaggggagtcggttgtgacgccaactcgtcatgcctagtgttttgaggtcggatgggtgccatgtctagtgttttgtgtagcacttttttaacgaaccggcacttttgagtagcattgaaaggaaacatattgaatgatgttgaaataagaaactatgcgaagtacaatatagaaaagactcctaactaaatacaaagtaattatattgagaggagaaagtaattttctttatttggaagtaatcactataaatattttgtaaagagtaatttagcgtcatatagaaaataactctttaggtattcaaagtaattacacacttggaagaaaataatctttttataaaaagaatagaagtaactttttatggtgttagatgtaagtacacttctagagggaagtaaaactgataagatagaagtactttttatgggattagaaaaaactttgaagaaatagaagtagcttttaacattactagagtaactatattgctagaaaaaaaagcaagtctggagaaatagaagttactcttcacggtattagaagtaactcagtgctagaggaaagtaactctaaaaacaaaataaaagcaaatatttaccccacgttactagaaataactatattgctgtaagaaagtaacttttcatggtatctaaagtaactacactgctataagagctaagaacaagaatacaattttaaaataatttaaatatattaaatattggacttgttttatcacatattttgagcggagtacaataggtcaaacggatgttaaaaataatatatctctatctctactattataaaaattgaagatgtttttaccggtattttggtaagtcatccgtatttgaatcggttattaagttcgttctattttggaaatacatatccatgtttgagtcggattttaagtctgtttgctttagaaaatacaaaagaagtcatataaaaaatttctttaaaaaaacttgtatggtcacttgagagtaaagttggactcctaattataactcatgattttctaaaaaaatattcaagcgaattcacacagtgaatttcatcccatgtaaatcgtataacaataataggattaaaataacattcacctgttgcaatgttgcaacgcacatgcattttttctagtaatttaaaagatataagtggagaagaacagcaaattaatagttatgaacttaatatgtagcatccgcttaaatggatcctgagaattgaagcaactgaaaccaatctcaagaagcaattcatcgatcttcactgcaaatcggttttgatgcaatgcaatgcattcttttaacagaaaaaacgctaagtaatgttgagtaaacacatcgcagaaaatgcattactaactacaacacgacgatgatccactaagcatgtgtttggtttcgggactagatgggatgggatgaaaccattcatccctaattttggggttgggatgattccactcacatgtttggtttgtaggatgggacaatcccaatttttttgtttggttgaagggatgagggagaaatgggatggacgctgtttgccatcaccgtcaacgaccgttgactgcgccacctgcatccacgcgtggaacaaccggatcaagcacaacggtagcagcaagacggccaccat

SEQ ID NO: 14603 - DNA, 861 bp, Oryza sativa
tagcacgacgccgagcgggccgctcggcatgacgaggccgtacacgaacgcgccgaacacgaagtggatgccgatggcgtcggtgcagacgccggcgaccatgacgccggtgaggatgagcgtgatgtgcacgtcgccgatggcctccccctcggggacgcggcggacgatccaccacatgagcgggcggacgacgtagaagcaggcgagcacgaaggccaccccggcgatgagcacccagagggaggagaaggccgaactgttgacctctgagatggcgatggcgagcgcgaggaggatccaggcgcacatgtcgttgacgatggcggcggacatggcgatccggccgaggtcggagttgagcagcttgacctcggcgaggatgcgcgccagcaccgggaacgcggtgacggagagcgcgacgccgaggaagagcaggaaggaggcctggtgcacgttcttggacacctggtgccggaagatgaacgacgtcgccgtgccgatgcagaacggcagcgccatgccggcgacggcgatgatgagcgccttcttccccgacctcctgatggtgttcacgtccatctcgaggccgaccaggaagaggaagtagaggagccccaggtgcgccaccgtctccagcgtcagcaagctccgctccgggaacactttcaccgcccacgtcgaaacctgccccatcaccgacggccccagtatcacgccagcctgcatcaccaccacgacgacgacggcggcgacacagttaaccaatcgaccaatgagaatagaacaatggcggcggcgaaggtggcgggcgacgtacgaggatctccgcgatgacgcgaggctggcggaagggcttga

SEQ ID NO: 14604 - DNA, 1404 bp, Oryza sativa
  unsure (1)..(1404): unsure at all n locations
cattaccttaaaataactatagtgtgtgcaaactccgtagtatccaatacgtaacttaaaatattgaatagggaggatatctagtcctctgtcttttccgaattttttcataactatttatgtactttacaattggaaagagattagagcgccctagttatcatttgagtagtattactaggtcaacctggaagctagtggcagtgtgagagcaatctacacggcaggaatctgcgaaacatcaatctgatgattctttggctgtattcagattggccagtgtaagcttggccggtacaatgagccagcagagctgcatggttttggtaagagtctttggtaattggttaattagctcatagtttcactgaatatttaagcagctaatgatcatcctgatcacatgtgtacatcaatccggtattttccagaaaattcagaggtaaatttattggagcaaagcaattctgcatctctctactagtatccaacaaagctcctgcaataacagttaagctcgacattgacacttcagattacaagattgattgatgaacaagtcattctgatgtgtaatcttgctaaggagagaaaaaaactgggtaggaatatattgcagtgaaaacgacgctatataattgacaatctgaaggcaacctcttcatatcttctttcccactagcacacaacacacgaaaatggaagcgccattctttgagcgtctcaactggcgaagcgatccttttgctggttggtttccaccatggtgtgaccgtcctttgtgcgattgtggggatggatgcatactcaagtcttccctcatgatacaaactcggggcaggagattcttccaatgcgcgaactttgatcaggtatgcttcatctattcgaagttcaaatggataaaaaaactaacttcttcgtacacaattgtaacatcttacgcagacatatcgtccaatgtgcaacttcatcgagtgggtagacatggagaacccacaaaacgacggaacccgtgcttacccacgtagtgaaacaagatcggactacctaaggcggaaggatgagcatgaacgtcgaattgctgctgaggctttagaatggcacgtaaatcccctaggactccccacgtggcgtgagcgtccggagtgtcgttgtggtgaccgttgtcaggtcataaggtccgtaaggcaccgaactcgaggacaaaggtgtttcgtgtgtccaaacattgtcgacgatgatttcgtggtaattacaactattcttttcatcactcctcagtactatcattaacttaactatcccaaaatgaatgtacatnnnnnnnnnnnnnnnnnnnnnnnnnnnnnnnnnnnnnnnnnnnnnnnnncgaatgatatntagttttcaaantcaacccag

SEQ ID NO: 14605 - DNA, 729 bp, Oryza sativa
  unsure (1)..(729): unsure at all n locations
aggccttgttgctgcantcctgaaaccacctnnttagattgagaattccgtacccncgttataagtttatcagtcgtcttcttttttttcttcacataacatgtctaattccgatcatgtttattgcagcgtcgttacgctcacgtccaggtgagacgaggttacccggacttcgtgttcgagtttgaccgtctccagccgagcgacgtcatctgggagccgtacacagaagaggccgtcgctgcgagagcaccgctaggactttcgtcgttgtgcacacgcgaccaggcttactggctcaccatcctgccgatggtgttcgacattttcgttgagcctcactgcccgcagcgtgtgatgagacagttcggacttaggcaggtgtttccgggcaacgtgcagccgaccgttcttcctgccgaccactcgtgagttcggattgttcatttctaaatttttatgataattacttcatcgagccatataatttacctctcttcacaggttgactcgacggggacagctagcaggcgcactttgggctccacgtgtacagcagtacgttgacgactgggtgttagctacagaggaagtgatcaacgagcttttccacacacggaggagaactaccgggactaccttcgctggtaccttctcgcactcgtgcgcgtgtggcctttacttccaaaccccccaaagcccgaacgttgcccctgtggaaggaccccg

SEQ ID NO: 14606 - DNA, 1936 bp, Oryza sativa
  unsure (1)..(1936): unsure at all n locations
ttgccgccctcccgccgggcggcaggcctcgctgcctataaaaggcctgctgcccagcccccagccctcattcttctctcctcaattccagtgaaaaaaaaaaagagaggggagaaaaagagaagaaggggcgaagccctgccggattcagacgccgatttcaggtaatattcatagatcctatatgtgactattgagttaaatagtgtgtattctttaaaaatttgtttgaataaatgcattatatttttagggttttagttgtactaatctagaagtgcgtattgtagatatcggtaactacgtagatctgctagtttggaattaatacattaccgttgcattggcttacacaagaagatattacgttgtagatgtttattgcatgaaagagtaatatgatctagttatttcgttgacagatatgtcgaacaaacaaatattccaagtttaccatggaccaggaaacgtccgttacgggccaactggggtagatctgtcagattttattgtatcagaaaggggaattgagagaccggctgagaggagtgtaccttctataaaaggatggttaatgaggggcttgagagttgatccacagacaagtgacataacaatcaatgttatagtaagtcgggcaactgagggtttttattgggaactaatgccagttcaaaactctcgagtgtggagatggtatttggaaaatgcattgcaacgcgggtggcctctagctttggttccgtttgttcacccgaaggatccaggtgtgcagacgaacatggatgatggcgagggaccaagtgctgaagtaaacgagacttctgtggaggaggtcaacgcacgagaggacgggggcgtagtagctccagtgggcattcaaccaggtggagtggctgacgagggggagactgtcggtgccattgtggatgaaatggagagggaggattctgacaacgagcgtgtagaggaagttgattcgtcagatgatgagacggatattaatccagcagaatgggctagtgaggatttttctaggctgatcgtctctgaagaggatagtgtgagatgggagtacaaagaaaatgaggttattcagggagcgatttatagtagagcagaagatatgaaggaggcggtaaaacattttgcagtgtcacttcatagagagttttgggttgccaagtcgaaccggtcgcaatatgaagttcggtgtgttaaggaaaaagatggttgtccctggagagtgcacgcgtataaggggaaatggaaggattattggacagtgtcagttgttaccaagcatacatgttttctacctagtgttcagaaataccacatgaacattacatgtgcatttgttgcatctgagatgtatgcgcatgtcatcgataatctcacatatgaaccaaggtcaataatccgacacattgaagagacatacaagtatactattagctatgccaaggcctggagggccaaacagaaaataatagagatgagatttggaacttacgaagcctcgtatgataatttgccacgcctgcttggtgttatcgaggaaagaaaccctgggagctcttacgaagtgaagaaattcccctcaattgaacatcctggcaagagtgtgctgcaaagggcgttcttagctctacatgcatgcaagatggcattcgtgaactgtcgtcctgttctctgcattgatgggacattcttgacaggaaagtatcggggccagatactaacagcaataggggtagatgggaacaatcaggtattgcctttggcatttgcttttgttgagagtgagccctcacaatctttcagaactcagtcacattcagtactctcttccccacttgcttcattacannnnnnnnnnnnnnnnnnnnnnnnnnnnnnnttgggagtcagcagtcatcaaatnnnnncacca

SEQ ID NO: 14607 - DNA, 3172 bp, Oryza sativa
  unsure (1)..(3172): unsure at all n locations
ctcacgcgttctggcccatgcggcgtcaatctgcggctgcgccggagaaggcggcgaaacctgcaaaggtcatcagcggccacgctctggaggatgtcgtacaccacgacgacgccttccatttcctcacgagagaagaaaacctccatgtttttccggtagcgggcttccgcgaagacgacgagggcaatctggagataccgcccgtggaggttcatcgcttctcgcgtggcgggcgagattacggccaaaacaacgctgttcgctacctggtggagtccggcgagaatctcctcatggtcgtcaggctcgttccccatcctccccaattgccgccgaggacgtcggcgttcaaggtgttcgagatggtggagccgccgctggggactcccatcaacaacgacgaggcaccatacgcctggaacgagctggaatcgctgggtgggcggatgctgttcgtcgcgcgaggctgctccagatcgtacgacgcgaacaacaatccgggctccgagttcagcgagggcgtctacttcctggatgacgggagactctacgacgaggagttgatgctcggtgagcccgatttccgggagtatccctgcagagacaccggcaagtggttgccagcggcggaggcgaatccccgagtggtcgagttcttgccggagcaagccccgtcgagctactcgccgccggcgtggcttctcccctgagattgccgtcgagctacaggtttttgcttgctgtcgattcgatcccccgagatgtggtttagcttgcagccgttgtactctgtcccgtctcctcttgctgcgatcgattagtgtagtttcagtccagatttgatgtcataatcgtggattggtacagctgctacaatgctggagcagtggagattgtacttggtaaattctcctcttctatcagaaagagtatgcaagccagaattacatgaataatgaatgcagtatattcaactcagcatgaatatgtgatctgatgaattctacatgaattacaatggttgccattcttggcttggatttcattagtcggtaagattgcaatgtgtaattttcagtgcttatttttcaggatagaagcatgttttgcatcaaatgtattttacagtgaagctgaatttgcttctgcagcctgctttcagttgcttgctgacagtgcaagatggacttggctgaattttcaatggctgctacacatgttcctaactgaattaactattcacttgttcataagttagctgaatttcagttgcttgctgacagtccaggatgggctgaggtagtgccactcttcagtggattttagcagaattttcgatggctgctacatattttcctaactcataatgtagcatgttaagtttaccaaattactgatacacatcggtttcagctagctgtgaaagatgccgatagtttacctgtttgttcttgatactagttgctcggttctgttgttgtataatcgtctgaatcttagtggagtactattgattctactgaatttatttactgcaccacaatgtattcctttattctgtgcataaggtagaacgttgtgtatgttttagtagcagaagaatggttaaacagttaacagatggttattaatccaaagttatcagcatttaggcattacttcagtaacacagcctgatgttaggcgtcatggtaatctgttcactagtactgaactactgatcagatgatgatgttcttctgccctccctgctctacagaagactggattaaatgagagaaaaagttgacacgcggagaggaggatgattatctctgcattgcccgttcatttttctgaatttgcatgcaggatcttgtgattgatggtaagaaattgttggtacaatttagatggttggttggttaatcaccagcattaaccacgagaaaattttggcagttcactacgactttgatgcatcacttgcagattctttactgttcagtctggaactcaataaacaaaaagtcataagaactcacagactccggaaaattaaaataacacgggtctcaagttattggtccatgggaaattcgacatgaatcaagctgattgagcataactgtcacggtagatgccatgctgattaagcgactttcgaagagggaagaggaggattagcctgaaaaattgaaaaattagcatgaacaggataatgatgcaatcccccagactgaatcattgttcgttgcaatataatgatgcaattaatgcaatctgagtcatgagaaccaacaatttctgcattagtctaacatggtgaaaatagcagagtactgaagagatgttatgatggatcaagcaattgcaggtacacatggatctcgagaacacatcatcgattaactggacaaatcaacaaccaccatatcagcacgacaacaagtcatcagacgatctaactaagaacatggcagtctcacggcagaatccaaaccggcgacgtgtagtacgacgggccttgctccggcaagagcttgtccacgcggccggtaaccgcctccgccgccgccgccggcggcggcggcagccacttgccgttgtcgctgcaggggtactggggaaggggattcacgaattgggacgcctcatcgtagagtctcccgtcatccaggaagtagacgccctccttgaactcatcgcccggatacttgttcgcatcgtacgatctggagcagcctcgcgagacgaacagcatccgcccacccagcgattccagctccttccaagcgtatggtgcctcgtcgttgttgatgggagtccccagcggcgtctccaccatctcgaacaccttgaacgcccatgtcgtcggcggaaagaggggaggatgaggaacgagcctgacgaccatgaggagactctcgccggactccaccaggtaacgaacagcgaagcctccgccgtaatctcgcccaccacgcgagaagcggcgaacctccttggccggtatctccagattgccgtcgtcgtcttcgtggaagcccggtaccgaaaaaacatggaggttttcttctttcgtgaggaaatggaaatggaaggctttcttgtggtgtatnnnnnnnnnnnnnnnnnnnnnnnnnnnnnnnnnngtcgtcaggangagcntcacctngcagtggtggcg

SEQ ID NO: 14608 - DNA, 1615 bp, Oryza sativa
ctcgttttgggtgaccggtgccggacccatcattccggggcacggttgggcttatcggtccggggccgccacgtggcgctttcgtcccgctcccgcatttccagcgtgtgggagagatatatttctgtaaatccttctcgcccacgtatataaacgcaaaatgcgaaaaaacaagatattttttcaaatttttttcccgaaaggacgaggttagcttacgaagttagtagtcaacccaaacgctaaccaaccaacacgcggaattttttttttattttttttattaaaagttttacaaaaataatttttcattttgaaaattgacagaagtggtcgcctaccgccctctaggagggcgatttttaaaaatcgccatcccagagggcggcgaaagtgatgtggcagacggccgttcgctctcgggcgacggccgtcaacgaaatttgcaggcggcccccttgccgccctccgctagggcgattttgtactgtgcggtacctatatggtaaaacgccaagcaatgcttttgccgagaatgacacattgacacccatctccctgcttgagttttgaaattttgattctgaataatttgtgttcacccggttgatgcagaatagcaatggtcaccctatttcagtatttctgtttcgttttactccgaaaaaatgcgtgttgaatttgagagattatgatacgagtacattggaatatgggttttgaaatatcgagcaggctggccctattggcccagtgaaaaagtaaaaccgtggggcccacgaaaactggcccaataaataatgcccagtctgatagcttcgttccccagcccaaccccctgcctcttccaaaccaaagccacccatctcccacctcccgcttcgagaaacagagcaatcaatcccacgcagccacatcgtcgcaatcgatcgcctcgcctcacctcgcttcgctttctctccaatggagtcgctccaccacgacgtgatccgcctcatccacagccgcctgccgtgcctcgtcgaccgccgccgcatgggccgggtctgccacagttggcacctcgccgtcgcggagaggcagcgcagcaagctcccgtcgatcctcgtgccgcgcgcggacggcccgtccttcgcgtgcgccctcgccggctgctgcgccacccacggcttcgcccacccgctcaaggacgacgcgcgcgccgcgcgctacttcggcgcctacgacggcggctgggcgttcgtcgccttcggccacaccgtgggctacgcgctcctcagcctccgcgacggcgaccggctccacatccccgacatcggcatggccgtggtggccgccaccctctcctcaccgccggacgacgaacgctgcctcgccgccgccatcaacctctccttcctgattgacgatctacgcactcacgcgttctggcccatgcggcgtcaatctgcggctgcgccggagaaggcggcgaaacctgcaaaggtcatcagcggccacgctctggaggatgtcgtacaccacgacgacgccttccatttcctcacgagagaagaaaacctccatgtttttccggtagcgggcttccgcgaagacgacgagggcaatctggaga

SEQ ID NO: 14609 - DNA, 771 bp, Oryza sativa
  unsure (1)..(771): unsure at all n locations
agtacgaacgtcgggtggaaattgcaagcttagactggaggaacaatccattagggttacctaaatggtccgagcgtccaaagtgtgggtgcagagatcgctggcaggtggctacatcctttgctgaacaaacatttcgaaggagatattttgtctgccccaatgtagacaacgatttcgttgtatgtctaaccatttacaaaatccgctatgatttgcacaaaattactacccaaactgaataacattactatttttacagggcaatccaaggatgggtggatttactcgatggatcgacaatgtcactccatcatatcatggccagaagataacagagtcagaaacacaagtagagtatcaacgattgaaggaccacgagaatgcaatgcattctgaccgacctagaaggagccgataggttaccgcatgcttgattcgtcgggatcgacaaatttgtaccgtgtatcgatggcacttcttatctatcttatcattacaatgtttaattatggtggtgattttttgtatgcgtaagactaagggcctatttggattgctatcaaaaacatgccctaccaatattttggtaatttgaatagtacttgtgtttgatttcgattgaagcctattcattggtaatacgtaatctagatttgagattatgtagaacattcttnnnnnnnnnnnnnnnnnnnnnnnnnnnnnnnnnnnnnnnnnnnnnnnnnnnnnnnnnnnnnngatatacaaagnttnacaaannncatcaca

SEQ ID NO: 14610 - DNA, 3744 bp, Oryza sativa
gtgtgttcaccttcttggcggcgattaaacgttgccaaaaacacgtatattgcatgacctctgccggggcttttgcttccgcctttccaatggaagagggggggcagagggaattttaagggcgaaagccgtccgcttggccacaaccacttcaggtgcatcgtcgacagccgcccattggcctgcgtctgccacgactggcgcgcgcccgtcaagccgctacacaacgcaccgcatctccgcccgctccggtggatcctcgtcccgcgcgcagccggcccttccttctagtgcgccctccgcggttgcggcgggcacggcctcggcgtcccggacggcgcgcgcaccgcgcgctgattcggcgcctacgacggcggctggatcttcctcggcaagacctgccgcaacacgctcctcagcctccgcgaccatcagctgcgcttcaacctccccttttttgtccgcccggacaagacggctgctgaattggggcggccagacggccctgtccctaacagtggtgtgatcatgctcgccgcgacgctctcttcgccaccggaggacgaggattgcgtcgccgccgccatcatcacttactggcccttccaggctgctcgacgcactcacgcattctggcgcgttcagtcagaaaatgcttcccaggatcaggttgcggcgatggggcatggccctagtgccatcgacgagccagctctggaggatgtcatacaccacaagggagccttccttttcctcaccgcagaagaagacctccatgttttcacagcacgggatttccatgaagacggcgacggcaacatgaagatggcgcccagggtgattcttcgcttctggcgtggccggcgcgattatggcggagacgtcgttgctcgctacctggtggagtcccgcggcaatctcctcatggtggtcaggcgcgttcctgctcctcttgccgcgccgccgacgacatcggcgttcaaggtgttcgagatggtgcagccgccgccgaggaagcggaacaaggccctgcacggctggaaggagctggagtcgctgggtgagcggatgctgttcgtcgcgcgaggctgctccagatcgtacgacgcgggtgactatccgggcgacgagttcggcgagggcgtctacttcctggatgacgggaggctctaccgcgagtcgacagtgttcgcttctcgcgccgtcgcggggaaatacccctgcagagacaccggcaagtggctaccggcggcggatgcggcgggggttccgcgtgtggacaagttcttgccggagcaaggcccgtcggactactcaccgccggcgtggcttctcccctgagattgctcatgttagttttgatcgtcctggtacaggtatgattcgctattgatttgttcgagatgtccttctcctcttgtttgggtggatgatgtagtcttcctgatccggtatgataattctcgatcaatcagtataattctccttgctgagtcagacttgcatgaacgcaatgcatgtgatgtgatctctggactctggtctgatgatttgtatgaatgcagcaacgttttggctttcagtacttggattgagtctatgcatcattgtttatgcagttaataataatgcaatgagaaaatgtgcccaattatccgtgcttaattttcttgatagaagaattctttgcatgaaatggatttgcaatgtagctgaatttcttctccgaagccaaatttcagtttgttaactgttcacagatcagtttcaggctttcagctagatgtgaaagatgcaggtcgtttatgttttctttcatcatgcgatgttgtatgatcgtctgaatgtcatttgttcttctatagattgctactactgatggtgctgaatttactttctgtgccacgatttattcctagattgtgtgcatgatgtagaatgttgagtacaatttagtagcagagggcttcttggtcgccaaaatcatttagagataacaggcttttgttaatatgttcactagtactgattagaggacaatttgtacaaactaaggattgattagaggatattctgctctgcaaacagggcagaatgagtggtaaatttgttaaattcacggagaggatgtttctctgcatattcatttttctgaacttgtagcaccattttgtctaatagttggtcaattgttcatgagatggttcatggttggtcgcttgattactagtgttaactcggttagaatcggactgttaagcatctggaacagttagtttgataagcctacgagatcacaagacccatgagccatgatttggattgcattagtgcataatgtgcttaattagcagtaagaattaagtattctctgcatcaaatggatttaagaatgacagtgaattgtcaacaagcaactgaatgttgtctgcttcagttgcttgttgactgtccaagatggggctggggtaagctactgcatctcttctgacgatctaagcaggattctagttgctgctacatagtatcataactgatttctagtattcttcgcattttcataatctggcatgtcaagctctcggtttatttaaacttagatgagataacactgcgcatcattttcaggcttttcagctagctgtgaaagatgcacatgattttttatttctttcttcatacttgttattgtctgatcggttgaaaggtgacaaaaaagtttaaacgtacagtaaataattcgtcctgtgttgtttgttcttctgtaggactactattgatgccacttaatttattctgccctgattttcccctattatgtgcatggtgtagaatattgagtatatttcagtagcagatgaaccggctaaacggtcaagatatggttattagttactaatctgaagtgctcagcaattttcagtagcacagccttttgacaagcaccatgttaacctgttcactagtaatcagatggttttctgctctaaagaaagggggaaatgagagtaaatgttgagacacgaagaggatgtttatccgggaacgctgagatttggagggagagacgtccctccaaacattgtttatctgcaatctgcattcgccatccattttcctgaacttgtagcatcagcggatctgcctatttggtatgaaatgttttttaagggtacgaaattgttttctaacggtacgaaattgttattagatggaattacgagtgctatcgcgaatagaatttataggctattaaggtcacaattctagcaatcgcagaacagggtatttgggactagaaaagcgaagcctttactgtattttcgaccgacagttctctgcctaaacaattcttcaggcccgttcttctatgggtcctgtaggcccatttagatcagcccatgaaacattatcatgtcggcccgcttactctcctaaactaggcccatgcgtgacaagaaattgctgacgccaagttcaagtctgaaacttgtagatcttgaactaatttctaatgcttcaaaattgtagcagcattttggtggtagagtgatgggacttggggacgatatcgccaccaagctagattctgaaccacagtgcaggaagacgtaaaccattaattatcctgccgcagactgcaataattcagcaagcagaagtgattaatagttgatcatagattcataggagtgaaaatgaacacatgcatctcaaaaaaccgtaggaattccatatgaaatt

SEQ ID NO: 14611 - DNA, 3801 bp, Oryza sativa
  unsure (1)..(3801): unsure at all n locations
ccaatgtgaaaaagtatgcccgcaagctttgaatggccggcaaaaattccattaagccccttgccgcctttgttatggccgccaaggccctaatcccaatttggnccgacgccgcaagacggcgcggtcgacccaccgtttgttacgtcagcttgccgcccaccatttgggcggcaggggctatttctgcaatttttttggtcgatagattatttctgtaaatattaaaaaaaaatctaaaacggaaaaaattctttttgaaagcgggtgaagatgacggcttggtttgaaagaaaagggtgggtgggccagcatgcgatcagattgggcctcatttatagggctagctttcttgggccccaagcccccaagtgcatcttccccgtgaggaagattaatgggctcaaatgtagaaagacattttaccttcggaaaaaaatccactttaacttccttaactggtcatcaaatctaattcgtgacccttaactaaaatatcgggtaagaccgaactattgaaaccagtgtaatttgaattctctagcaattttgaagggtggttttgttgtcgtgggggtgttgatctggtcttcatgccacgtgacgcttatatagcattaaaattttaaaaaaatatatgtgagacctactgacatgtggggcccacatatcatcctttattcctccccctctctctctctctcccttctctcacttttctcttccccaccggatcggcggcggcggcgtgcaggcaatcccctccagctccgcgccatctccatgtcgtcgtcgtcgtccgcgtcccttccccccccccccccttttttcgctacaccgcctcttccttttcggacggggggggcgcttcggcagtacgggacggtgcataaggtagaacgttgtgaagaatggttaaacagttaacagatggttattcacccaaagttatcagcatttaggcattacttcagtaacacagcctgatgttaggcgtcatggtattctgttcactagtactgaactactgatcagattatgatgttcttctgccctccctgctctacagaagagtggatcaaatgagagaaaaagttgacacgcggagaggaggataattatctctgcattgcccgttcatttttctgaatttgcactcaggatcttgtgaatgatggtaagaaaatgttggtaaaatttagatggttggttggttaatcaccagcaataaccacgagaaaattttggcagttcactacgacttcgatgtatcacttgcagattctttactgttcagtctggaactcaataaacaaaaagtgataagaactcacagactccagaaaattaaaataatacgagtctcaagttattgacccatgggaaattcgacatgaatcaagctgattcagcataactgtcactgtggatgctgattaagcgactttcggcgagggaagaggaggattagcctgaaaaattggcatgaacaggatcccccacactgaatcattgttcgttgcaatataatgattcactaattaatgcaatctgagtcatgagaaccaacaatttctgcattagtctaacatggtgaaaatagcagagtactgaagagatgctatgatggatcaagcaattgcaagcacacatggatctcgagaacacatcatcgattgcacaaatcaacaaaccatatcaacacgacaacaagtcatcagacaatctaactaagaacatggcagtctcacggcagaatccaaaccggcggcgtgtagtacgacgggccttgctccggcaagagcttgtccacgcggccggtaaccgcctccgccgccgccgccgccgccggcggcagccacttgccgttgtcgctgcaggggaactgggcaaagggattcaagatttggaacgcctcatcgtagagtctcccgtcatccaggaagtagacgccctcgttgaactcggcgcccggatacttgtccgcgtcgtacgatctggagcagcctcgcgcgacgaacaacatccgcccacccagcgattccagctccttccaagcgtatggtgccccgtcgttgttgatgggcgtctcatgcaccatctcgaacaccttgaacgcccatgtccccggcggcagttggggaggatgaggaacgagcctgacgaccatgaggagattctcgccggactccaccaggtaacgaacagcgatggctccgccgtaatctcgcccaccacgcgagaagcggcgaaccaccatgggcggtatctccagattgccgtcgtcgtcttcgtggaagcccgctacaggaaaaacatggaggttttcttccctggtgaggaaatggaagcttcccttgtggtgtatgacatcctccagaactgacgtggtgacgaactcaacagcagtcgccttctccacaacttgatgctccatgcgccagaacacatgaacgcgtggatcgtacatcacgcgtggatcgtacatgaacgcgtggatcgtacatccggtggcgaagagagggtcgcggccaccatgtccgtgcccgtgtcggggaagtggaatcgcgtgccgttgcggaggctgagtagcgcgtagtccaggatttggccgaaggcgacgaagacccagccaccgtcgtaggcgccgaagtagcgcgcggtgcgtgcgtcggccgggagcggggggcggaaggcgtgggtggcgcagccggcgagggcgcacgcgaaggaaggcccgtcggcgcgcgggacgaggatcgatgggagcggcctcgtccccggccgcggctgctcaggcttgacggcgacgcgccagttgcggcagactcgggccatgcggcgccggtcgacgaggcacgggagacgcttgaggatgaatccgagcacgtcggcgtcgaggtcgcgccatggcgagtccattggagaggcggaggcgcggcttgccggtggcgaggcgaggaggaggaatggaaccgatggattcctctgcttctggaagaaggaggagatgtgcttggtttggaagggggatgggggactgggcctcatttatagggccagctttcttgggccccaaatcttgaggcggataaatgggctaaaatttatgaaggctttactttttctttttcataagtgaccttccgggaatttaaaattcaaactgggagttcgtttgtgatgccagctctgccatgcatatttttgttttgaggtcggatgggtgccatgtctgtatattttcggcaaaagcacggcttggcgagcgtctaatctagtgtttttgttgtaccatcagactgatgcacaagttcagaaaaagtgaacaaggaattcagagataagcatcctgtgtatgtatcaacatttcctcatccccttctctctgtaaaggacgagctgtgaactgagcatccttcagttcagcactaatgaaaagattaaccatatcgcctacagaaaacatgtgtgcctatgttactaaagatgatgacctcattggaccaataactttttctatcttttttttctctttttttttcctgtaggataataaccatctgtccatctgaactgttaacctgcttgaatgccttttctcaaaaaaaaaaaaaagggttaaccttccctgctcccatttggttctcctgtctgctagacacgattttgcaccatatgtacatccgaactttacgttctcaaaaaaaaaaaacatttaaggccccaaaaaaacgcttagcaaaaagcagcgatccaaactttaggcccaaggaaacccgggcctattaattgggcccc

SEQ ID NO: 14612 - DNA, 1739 bp, Oryza sativa
  unsure (1)..(1739): unsure at all n locations
ctatgtgnnnggtgangctgcnnnnnnnnnnnnnnnnnnnnnnnnnnnnnnnnnnnnnnnnnnnnnncatacatcgagtgggtcgatacagaaaatcccgttctcgacctaaccacttgtttacaagaaggtcgctggtatttcgcatccgaaagtactgagcaatacttacagagaaaagcggcttatgaacgacaatgtcgtgaacaacagagcgactggcgggtgctaactacggcactccctccatgggaagcccgtccaagatacaggtgtggtgatcgttgtcaggttcttcgttccataaatcctacaacattgggtcgaaggttctttgtttgtccaaatattcttgacgacgatttcatggtaagaatattttgattacatgattccttattttctcacaacatttactaactttgcttgctttacatctattctttcctcccaggaaccaccaaggagatgtcaatacagagaatggatagacaccagaagggttctaactccacctagccgtgttgtgcagcttgaactaccagagcaatacagggttactaaagcgcggtttgagagaggagagggatcctcacgtaggggttagctattatcggacaacttggcatattgaaatttctactgtcatgcttccttgtcccattattacatcgtcgttgtgttcaactattgcactacctccctcctagttcgaatctaatatcatctatgtaactgcaatgcaaatagttgtatcatgttcaaattgtactactatttcttcatgttacataattctccttgtttaagtccatataatgtttctatgacctagactgcgatatgcctatataaattatccgagtactaatacgtcgaataaggtacaaaataatacctcacttaacatatgaaattgcgcaacaaccaacttcaatacatttttataacaatattaacaagttttaccaataaatacttctttatttattattaacataacatagaaaaatcttttggccgtacttttttcatctgttgatataagaaacaaacatttaagtacaaaccagagtacatgttctggaatattacagaaacttatggaatatgtctatttccattgtattcaagtaaacctctctctatttggaggcattttcatttctattcttttgtgccacccctttttgatgaagatgaatttctcttctttttgccttctaattcatccccagaattatgcttctcctgtgatatatcttgttgcaaatcttttcttttgtttgaaacatctttctttttctgctctacaccatcctgcaacaaaaaatatctttctttattactttttttaaaaaaatcaattcatatggatttgtaatttttggtacctgttctcttggatttttaacctttccttgtttgcctttagaacaatacacaaaagaagtcattataaaaaaaattttcttttaaaaaaaaaaacatgttatttgggtgtaactttttggagctgaaagaactggcatgaatataggtctttttgctggatttcttccctaattggctctgatctttgagctggcctgcctttggattttgcaatatctggatccaacaatatttcctctgtatttcctcagatggtgatggcctggtcatgtgaggtcaaattgtcttctgcatttggatctgaatcattgatcttcttgctttgcatctttatttgacacatt

SEQ ID NO: 14613 - DNA, 952 bp, Oryza sativa
  unsure (1)..(952): unsure at all n locations
gacagaagattgcctggtagcagtggctaatgcctatcacccaccacccgccccttttcgcccttcttctcttntttttaaacgntttatttttctccctcccccccccagcgtggtgttgatctgcgcctggcganacacnnnnnnnnnnnnnnnnnnnnnnnnnnnnnnnnnaccttcactccagacgccccagagccgcacgttgccgctgtgacggacgcgtatcccacgcaccgtgaccgagactacttcgtgggggtacgtcgaatttgtattagttcttacaattatttcatttatcttgcataatataggacaactactgaattttttatttccatcttgcataggctgatgccgcacgggatatcagtgccgatatcaccgcagtccaagtgaggttgaacagaggtttgcacttgactgacgttgagcagagggtgaccttcgaccggatgcaggagaagatgcgtgcggtcatgcgcgtcttctcctgtcgcagcgccgtggacgtcgtacctccagctggtccggtacaaccacggcctcgcgcgcctaccgtcggagcaggacctcgacctacggtacctgtttcgcacggtactgctcagcccagaggtttcttaagttttgtttctgtttttgtacgaaaacatcaccccgtcgtaacttgatgttccatcctcgcaggacctcgtttgccttcgagcgcccctagcttcggagcagtgcgacctacagcaccagtttcgcacggtacagttcagcccagagattagttcatttttgtttcagcttttgcacgaatatgtcaccatgttttaacggcacgtttccttatcgcaggacctcgtctgccttcgagcgcgttcgcaggcacgaccggcgctttcgcgagcttcgcaggggcgttcgccacctcttcgggcgcgttcggcagctctttctt

SEQ ID NO: 14614 - DNA, 1102 bp, Oryza sativa
  unsure (1)..(1102): unsure at all n locations
actggcatggtaaacggtagaccaatccannnagacncgagaattcggacccccataaggatgagatgaaggaggcggtgaagcattgggcagtttccttgcatagagagtttatggtggtcaaatcagggaattatgtgtatgaagtgaggtgcatgaaggaagattgtccgtggcgtgtccatgcatataagggtaaatggaatgattattggaaagttagcattgtgaccgagcacaagtgctacttacaaggggtggagaagtatcaccgaaacatcacttcagcttttgtggcaagtgagatgtacagcagtgttgttggtaacattggctttgaaccaaaatcaattattaggcacatcgagaacaaattcaagtacactataagctatgcaaaggcctggagagccaaacaaaagattattgagatgaggtatggcacatttgaagcttcttatgataatttgcctcgtttgttagccaccattgcccagaggaataataatacttactatgacctacatacatttacatcggttgatgatcgaacaaagagtgtgctgcaaagagcctttttctcattgggtgcttgcatcaatgcttttgtgcattgtcgacctgttctatgcatagatggaacttttatgacaggtaaaaccgaggtcagatattgacagcaattgggtgtgatggatacaaccaggttctacctatggcttttgcatttgtagagagtgagaacactgaaagctggtactggttattagaaagagtgcacattgcagtggtgcgtatgaggcccaacgtttgccttatatatgatcgtcatgtgggtatgttgcgggttattgactacttgcagaacggttgggatgagaagggacttccagctaagtggcatgatgttcggagtcggtagtgcatgcgtcacatgggtgcaaatttctacaagcaattcaagaacaagcatcttatggagctctttaagaggctatgtgcacagagccaagagaagaaatttaatgagccgtgggacaagttggatgagttgacaatgaagcaaacagatgagcaatctcgcagaccacaagttgaaggt

SEQ ID NO: 14615 - DNA, 3651 bp, Oryza sativa
  unsure (1)..(3651): unsure at all n locations
aggccatctgcgacagctcgagcagcgccccgttggcgcccgcgaggttgcccaccgacatggccgccgcgcactccatcagcagcgcgatcatccgcacgccgtgagcctcctcctcatcctccaccgccacctgttcgacgtcggcccccgccatcggcacgcccgtcctctcctccgccgcgccgccttcctcggagtacacctccttgcacgctcctaactccggccgttgctcgaacgtcccggccgccgccgccgccgccggcgggtcgacgaactccggcgagtcgtcctcgccggcgcaaccctcattggcttcaagaaatcggtggtgatgggacaacaaaggctgctgcagtggcaggttgctgctactgctgctgtatagatactggtgatgatcaagaaactgcatcaagcctagagaatcttgcatgtctgaacctcttcccgtcataagttgatttatcaaggatcaatcaatcaagtagggtttctgcatagctgaagatgagtggagcaagagaaagcaatgtgcttatatatactccctccgtctcacaaaaaacaaacctaactggatgtgacatctccagattcattgtactagctagaatacatcacattcagtactaggtttgtattttgtgggacgaaaggagtactttttgtggcaaccagcagaggctgcttgcttgtttattatcaaccgcaatcaaattttaaattttaaaacttaattttagaatattagctgtagctcaaataaaatgtttccattaccttaaaataactatagtgtgtgcaaactccgtagtatccaatacgtaacttaaaatattgaatagggaggatatctagtcctctgtcttttccgaattttttcataactatttatgtactttacaattggaaagagattagagcgccctagttatcatttgagtagtattactaggtcaacctggaagctagtggcagtgtgagagcaatctacacggcaggaatctgcgaaacatcaatctgatgattctttggctgtattcagattggccagtgtaagcttggccggtacaatgagccagcagagctgcatggttttggtaagagtctttggtaattggttaattagctcatagtttcactgaatatttaagcagctaatgatcatcctgatcacatgtgtacatcaatccggtattttccagaaaattcagaggtaaatttattggagcaaagcaattctgcatctctctactagtatccaacaaagctcctgcaataacagttaagctcgacattgacacttcagattacaagattgattgatgaacaagtcattctgatgtgtaatcttgctaaggagagaaaaaaactgggtaggatgttaactcctaagaggtttcagagtactgacatttgacgattgcgatgcgtaattttctttgcttttctcaaggaaaaccgaaaccgagctactagaacccctaagaattaatcgaagtcatcacatttcatgattgtgatgtgtaattgagaaatgagtaagaaaatagctttgaagcagtagcttcttcctaatggcgagctgatagatcacttggtgatcatcgctagttgaggacgagtcgacgaggagctaggctgcgcttgcaggcagcgaatcaatggctggcgatatcatcaaccaatttggccagttagcttgcttaattcttcagctactaattgagtaattggccggactaattggcatcaagcagcagaattccagcatcaatctgccggtgcctccacatgtcaaactcatcgtttcctatgtgctattacacactgaactcatagtagtttgctacatgtttaattgtggtctgttaatttgacctggtattgttacaaggccatgcgaacatatttatatatgtatatatcctgctaattaattcaggctgacaaggccatgcgtagatgtaccgtgctaattaattcaggatatatgcatcatcgatcgatgacaatgtaattaaactacgtatatatactgaagctgatgatgcctaccgcttgcctttgtctgcacttacatggacgcatccaggagatattgcagagacaaacctggcaaacagacgacgatcaggaccaaaatccaagtgattagtgactgattttgcatttcttttagataatactccctccattttaggttataagatgttttgagtcaaagtcaaattgattcaagtttgactaagtttatagaaataaaatagtaatattttcgacccaagataaatttattataaaaatatatttaattattaatttaataaaactaatttggtaatgtaaatttactatatttgtctataaacttagttaaatttaaagcagtttaactttgactaaaggcaaaatatattataacctgaaacagagagattataaatgtattacatcttggcctattccataatacacggtcaatgagtctttaaaagaacaaagaaaaagagtgtgggacatatctactcttaagtaacagattttgtacgcacgagtggttttcaaataatcaattgattgattacagtttagttaatcatcaaacaagcaagctagtaagcatttggcttccagacagcgttgcatctccttttacccaagtcctaatctgtcttgacgcattgacttcggttggcgctggacatggccttgaccatccccttgcagatcttccggaaccagaggaggttcatcgccgacatcgccggcggcaccgccatcatactgtagaaccctagcgggaacaccgtcctcacctgcaaattaatcgaacagccaggaactaatttaacaacagactgtcacaaagctgaaccctgaagagaagacgattggttgattatgattacctggtcgaagtgaaggtacacatgagcgaagaagtatacgaacagtatgacgcgagcaacctgcatccaagaacaagaagatcagtatcacttggagtataagtgaattgttagttttttttcatcattttaatatttgggttgaattggtagttatatgcaactcaataaggtatcgttagtttaaaaaaaaaaactcaataaggtatcggagctacaagtctcaagttcaaatcttgtcggacgcacacttaaataaataattgcagcttccattccatgtctgagcactcaaaaaaattcaggcatgttttgtttttgttgttatttactatcggcttagtcttttatatgaaaattcaattctgttttttttgttgtttacttattggcagtcctttagatgaaaattcaggcgtgttttttgatgaacaaaagatgaattggttggtgcatggaaacatttacaaagagaaattataccagccatccagcaaacagtgccaccccgttgtacaggtaaagcttggagtccttccggcctgcaagatcaaggtacctgcattttcagaaagaatgcatgaataattgtgatctcagacatgaacaagcaagatgattaatgagcaatttgggaaaactgaatgagtnnnnnnnnnnnnnnnnnnnnnnnnnnnnnnnnnnnnnnnnnnnnnnnnnnnnnnnnaatagtgatataataagtttntacaaa

SEQ ID NO: 14616 - DNA, 3155 bp, Oryza sativa
  unsure (1)..(3155): unsure at all n locations
agcgcttgattgacnatcnnnnnnnnnnnnnnnnnnnnnnnnnnnnnnnnnnnnnnnnnnnnnnnnnnnnnnnnnnnnnnnttcgtctcccctcatcacgaacaaccgcccggtgtgctagcttttgcccgtatcgccggggttcgctccgccgctcgccgccgccgcccgctgtccattcgcggccgggtcgtcgtctacctctcgccggcccgcgtggcagccacgtaggcgccacatcggcgccagctcagcctaaaccgggtcgagccgaccccggtcagtccctccccgtgcgcgcgttccaccgcgagccgtgaggctgcgcgtgggcccgccgcacctgcgtccaccgcgaaccgcgtgcgtgcaccacgtccatcctccaccctagcgccgcgccgcgtgctccctccgcacggtgagccgagcagctgacaagcgggtcccacccgggaccgcgcgtggtgagcccggtccaccggactctctctctccttccaccgcgcgcgcgcgtcttgggccgccttgggccaccttcttgggccggccggcccgttaagctcagccgagccgccctttctctcgggccgcgccctaaccgcccgagggaagtctatattccctccctctccctttttcttttcttttcttttccaaaaaggatttaattaaatccttttcctttagaccaaaaatccaataatcttagaaattcaatatcttccccaccgtaaatccgtttgactccgttcaacttccaaaattccccaaatctcgagatctatctaatggcacgcttagaggtcattaatagggctttattttcgccgtttgttgagttgtcccgtttcgcgtgtagtttcggagcccgaagacccgcagtgcgaggatttcgaggatcaagctctggatctcgagcaaggcaagccacctttgaacatcttgagcctatacttgaaatttaattatattgcttgcaaaatattatgcattgataggatcacacttaatctgttgttccgtctgcaaggcagattggcggacctgcctaatttgttgcatttgatccttcctttgttaattgttataccatgtccccttgtaaccacccagttgcgcctcgatattcgtgcactctgtgcgagtatcgacggtcgccttcaaacttaaaatctgagaaacaacttgggtaaaacttgggttttacaaaagacttggaaaacccgacacctgggtcggtgcttgcgaactaaatgaatttctaaaaccgcggaccggggaacataccgggtgtacggttttcccgctcccgcacttaaggaccgattccttggaattacatccgaacataggacaagtgcgaccacatgggtggaatgggacacccctggctgagtaactagcttatcaggggagccatgatgccgagagacatgtggattcgccggggtggtgtcagagaggacccctgggcttcctggcacagtatggtctaggacctaacctgttgttggtctgggacccctctcgtcggcatatggtaagcctgtgtcggctttggaaatgccttgtcatgaaagcttggaggtctcccgacgtggctgatccccacgggctgggtgatccgggttagtaatatcgtgtgggtaaagtgtaccccctctgcagagggttttagacaaggttgaggtcacccttttatagctttgaccatcaataactttaaaaatatttagtttaaagaaattagaacaacatatatagatttgtctttcaaagccactataataaaagtaacacacatttatttattatatatattataatagaaaaataaggtcaaaaatatattttatagaccgtgtcattgtccaaaacgtcaattaaaatgaaaccagcggaagtacatcctatcagctaagtatccgtgcgttacaacagattccggttgaacgataactggtagtactagtagctaggtacaccatggtttgtgtgtgagtgcaggtacgtatgtatgtgtgtctgggcccgagtgccactagggttatctggttgggaggggacaaaaatccacgagagaatacggggagcagtgcacaaagcgcggccggtggcgggctccatggatggcgcacgcagctaagctagatgatcgatcgagcaagccatgtgcattgggttatagaaataaagagatcgatcgatgcaaagggatgaagaggaggagtagtaggatggacgtgataaagcggtaaaggtaaaggggatcagattcagagagggtttagtgatccaagaaaggctctggatttgagcccggataaaagcagtatatccccagctacatatgggcatgatacgtacattccctttgggcatttgcgtttgcatgtatatgcgccccatgcgaatgatgcgagatgcgtttctcgacgcatcttgcgcgtaggatgagatgaaacaagcgcagcgcggcgctctgtcgcttcagtagctagcttaggtgcagtaccacgtttccttcagataaaacacacgtcgcgtgcaattcagggtttacagtctcgtcgagccttcgaaaccttatactcccagggtacatgatcaccctctgatataacaagtccagagaagtcctcatttgcccaatcagtggccattacatcaccttcctcatcggatgatgcgtcgtcgtccgcttcctcattatccgaatcttccctctccatttcatcaacaattataccgactctctccccctcatccgccatgcccatggcctgctcctcccttggttgattttcctcattttgcatcgatggtccaacaacatcccctgcattgataggaccctctacatcttcggtttgcattgaaacatttatatctttctcttgtaccgacacaaatataacgaggggccatgaccgttcaaaagccatttccacataccgtcttcaagcagcagtgctgtccatcggcattagttcccaaaaataaccttctggtgctttctcttccttccaaaaacaccataaaacattaaccgttgttttcaagaaggggcaaccgttttgggaaaaatggtggttggaatcaaggtacctttctcaaaatgactgaaatggtctcgggcttttggtggaata

SEQ ID NO: 14617 - DNA, 745 bp, Oryza sativa
  unsure (1)..(745): unsure at all n locations
ctgtgcttttgataacctatnnnnnnnnnnnnnnnnnnnnnnnnnnnnnnnnnnnnnnnnnnnnnnnnnnnnnnnnnatggtaaaatatcaatttctgaagttagcagtgccttatggattaaagatgatagcttaaaaatgagaactaaagaaagtatttctggaagattacttacaatgcaggaagatcagcatcacatatggcttcgctgagcatgtgctcatgctcttggatactttgcttcatttcatgtgaaagtttttccatcccctcaagttttgctatgcttggatagtaagctcttgcaacaaagagctggtctttaagtctcttcactacagaatctttcatcacttccttgtgttcaacagaccaaacacaatagcttccaaattctagttggcacgattttatactctcatcaccaggtaaaaatggatttgcaatgtagctgaatttcttctccgaagccaaatttcagtttgttaactgttcacagatcagtttcaggctttcagctagatgtgaaagatgcaggtcgtttatgttttctttcatcatgcgatgttgtatgatcgtctgaatgtcatttgttcttctatagattgctactactgatggtgctgaaattactttctgtgccacgatttattcctagaatgtgtgcatgatgtagaatgttgagtacaatttagtagcagagggcttcttggtcgccaaaatcatttagagataacaggctt

SEQ ID NO: 14618 - DNA, 1846 bp, Oryza sativa
  unsure (1)..(1846): unsure at all n locations
ctggatatntgtgtagtctttttgaagagatcatttcatcccggttcggaaggctcgaatttaaaaaattatagtgaatttcgtcgaagttgtgacccttggtgatattcagagtggtgttttgtaatccctttcttctttacagagcatgtaccatcgtgggctttagtctcgtgcaaaagataagggcttgcgctcttgggccggaaaacattgggccgtttgatgacgccgttcatgttccccgtaagacatttcttgatttctgatggctctctgcatctctgatcactgtaattgagcattagtgcacgatgttatctgaatttggttcaagtctctggacaatgtacttgagcatgatgttttctgaatttcatgcaagtttttcggataaaaaaactccaaatcctagcatatgtaatccacacgtactacatattgtaacatcctgtttgttcttgcttcgacaactttctgaattctgatacaacgaaactgaccactctagcttgcatatgaaacatctctaagaacaattagttaagaacctagaagagttaaaacacgtagtagtacatgtaatcgatcacctctcacactacaggagggatcgatcacagaatctgaccaattaaacacgacatctacaaaaacaatcacctagaattgtactccgtactacacaacaaaaattaattaacaatcataattaattcctaaaaataattaagcttcgaaaccctactactaccaatcgagcgattaactgacggcgattacagcgaagcgctcgatcggatcggagtccggtcagtacccgccggcgccgccgctccatccgcctcggtcggcggcgcccatctggttgccgccgatcgccaccgacggccgctggttggcgttggtcaaatactgccggacggggtcatccgtcggcggcccggcgagcgccaccggcggcggcagcggcgccgtgatgacgtactgctgcatgaccagcacggacgccatcttggagaactcggaggagacgaggaggtcgccgatggggccgagctccggcgactccatccactcggcgagcgccgacgtcagcggcgagctcgcctcgccggggtggcggccgacgatgtacagctcgtgcgcgttgtccagctggctgcggatggcggcgaccgtctcctcgctgttggccaccacctgctcgacgtagaggatggcgtcgttgccgaggttgcgcgaccggaactcgttgaggtactcctcgtccatctgccgctcgctcttggcgacctcggggacgacgttgatggcgcgggagtgggcggcgggcatcggcggctgcggcggcgagatcgccggcgccgtgtaccccggcgggattaagcggacgatggtgaggcacacgcccgggttttcgaccatccgccacgcgtacgcgagcccctcccggtcgtcgggcccgccgaagaagaggagcgcgacgtggtgcacggccgccatcctcgccgcggcggcgctgaggccgcggtcgacgaggatgccgacggagcacggcgccgacgcgaggatgctctcgttgaagccccggagcgacgcgttgatgggctccatgccgccgtccaccgtctgctgcttgtggaacgggagcacgatgagcgagacgtgcttgtcctccgccagcacgcacacgttctcgtgcatcgtctggtacggcgacaccgccgtgagcgcctgcaccgacacgccgccgaccatctcctcgtagctctcgaacgcgttgaagatgtggtcgctggcgccgcccgggttcgacgcccagtggtgcgcggcgagcatgttg

SEQ ID NO: 14619 - DNA, 997 bp, Oryza sativa
  unsure (1)..(997): unsure at all n locations
cccacaatcaccctngtatggttatggaagacttctcccccacccagaccntccacggtctccctcatccagtnatcgttatacccccccaccccccccccagggtgatgacggctgctggaccncccnnaganngagaannggaaccccccagccgagacggaccccaaaacaagaggaaaacaaacgagcacaagcttattctcccaagaagcctcctaactaagatacatccgctgtcgtccatagccttccttcttgcttaatcctctcgacgatgatcagaactgacgataggacagcgtcgaagacacgcattacacttctaccatagttgccaggatgtcaacgaaacaatagaatcgaaggggcggtgatggtccctcgcaagtcgatgccaagtttgcggccaccggtcttggacccaaaaatgatggtctagggcaacatcagcccatccagcggcgcgaggatttggaactagacctagcgagcgaagagtcgaagacataagcgatgatgatatggttcgcgtctcctgctcctgggtgtagaaggggcaagcaatgtggctctccatggtatgacgcaacatgacatcggcgatccaacaacacttttgcagcaccagccagaggaaaaaccagcacttcgcaagcgcttgcgcatgctagagggggtcggtacacgcgaacaagtgttgccccgtgaagaaagctttataagccgacgaggtagatcgagaaggcggtattgttcgaccaccgccagataaggttgtcctccatccgaggttgcagctggataggctgtaccatgtcccagagcaggaggaactggctaaggattaatccttacacggagagaggatatactccctccctccagttccatattagctgacgttttagacaaggttgaggtcaaacttttannnnnnnnnnnnnnnnnnnnnnnnnnnnnnnnnnnnnnnnnnnngcatgtcatttcaacgctg

SEQ ID NO: 14620 - DNA, 706 bp, Oryza sativa
  unsure (1)..(706): unsure at all n locations
gtggggtnnnnattgatgatcgcttatnnnnnnnnnnnnnnnnnnnnnnnnnnnnnnnnnnnnnnnnnnnnnnnnnnnnnnnnnaagattcctataatgaggaagcgggcgacaactcatgatccgatgaggaaagttatgtaatgggcactggttggtcaaatgaggacttctctggacttgttataactggaggagatcatgctcccctgggagcataaagagaacgaggtgaaagacagagcaaggcatgctcataaagataagatgaaggaggcggtgaaacaaaaggcagtttccttgcagagagtagttaccggtagcaacataacaaattatgtgtatgaagcgcggtgcatgataggagaaagtacgaggcctttccatgcctctgatgcttattggaatgattattggaaagttagcattgtgaccgagctcatggctaattacaagggttgtgatgtgtcacctaccaatgctatctcttttggggctagcagatgtgcactaatgatcgtgctcacattggctttagaccaatatgcaataattatgtgcaatacgaacaaaatcaagttcgctttatgctatcacaaggcctggaaagctgagcattgactattgagatgacgtttgtcccatttgaggcaaatcatacaatttgacatttttgtatgccaccattggccatagagataattat

SEQ ID NO: 14621 - DNA, 829 bp, Oryza sativa
  unsure (1)..(829): unsure at all n locations
ggacaagaatgatcggtctgtgactggtctgacgccggtcgcgtcatcggcagacaaccgtgctcccacgatgcatctgcctccggtggagtggaggtaggtatgacccatctcgtcggatggtcatttggaaagcagccatggcaaatctccgcccattaatgagggagtaacagggagatccccggtgtcaggcgagtgacggcgctgagcctcactcaaggacaagttgtgatttagcttccaggcgaaaggtgccaaggccaaagtcgaagtcaagtagaaataagggngtaaggggtcaaaggggcccccaatacgcaacccncnncacnnnanngttgnccgattcatatataaaggaggaccttgccaccaaaaaggcgaacaacaagacaaagtcttctgtatggctctccaggcctttgcatagcttatagtgtacttgaatttgttctcgatgtgcctaataattgattttggttcaaagccaatgttaccaacaacactgctgtacatctcacttgccacaaaagctgaagtgatgtttcggtgatacttctccaccccttgtaagtagcacttgtgctcggtcacaatgctaactttccaataatcattccatttacccttatatgcatggacacgccacggacaatcttccttcatgcacctcacttcatacacataatctgctgacttgaccaccctaaactctaacaagcaaggaaactgcccaatgcttcaccgcctccttcatctcatccttatgnnnnnnnnnnnnnnnnnnnnnnnnnnnnnnnnnnnnngcagnngtcntacgaagcac

SEQ ID NO: 14622 - DNA, 919 bp, Oryza sativa
aatatgattcgttgcagatccttaaaataaataaagaacttattaccgttaacttagattccagctcaagccaccctgggaatcacgcggaagacgcaggcggaggaaacaccagcaacagcagcagcagcggaaccaacggtctaacacccaacaccacaggcgacagctgggaaccaggacgaaaccctaatcttcacttcacttcatctttacttcaaggcggaggaactatatatatttatatagagcaaggtgagtactttcatactcagcaagtcacggggacttaggtgtttaatgcaagcttagaagagaggcaaggttgttttgtaaatcctttgtttgaaatcatttttgaaatcactaagtgatttatttctttttaagtttgggtcgaaaaggagacttgcgtctcgattcgacttaagagatgcttttcaacaactcaaatggcaatgtatcgaccccccgagtcagatcattacttatcggcttccagagccatttcacttgattaggcggctcccagagcctttttcattttctcggactcccagagtccagctgcccagcagcaaagcaatccgcttccactcgggaagcctagtctatgatgcccgcagacatcccgaatcacacagattcgtttctgaccactcaggtcatccatctgccacataggctgattctggttacgattcccaatccacaacaacttttcacaaagtacaggcaaacaaatctacgcaacgggaaccacctcacacccgcccattaccgtttgtacggctgttccaacagttagtttacctttgcagaagggtacactttacccacaagatacgaacttactccagacacttgcccggtgtcagaggctctcgacaaaacctttcccaagccgcaccatgttacc

SEQ ID NO: 14623 - DNA, 647 bp, Oryza sativa
agaaatcgccggattcaatccctaccgtccgtccgtcatgtaatcaaatttcatccatccatcgggtgaaatcaccgaggcggcttttaatccatccatcgtccatcgccgagacaatcccggccaccacatcctccccacgttaccaaaaggccccgcgcgaccaacacatctgccctatgcgctcactatgctgtcacaccctaatcgggcaccgccgtacaacggcacctgacaggagcgtgtcgtaggaataacggcgcgaaccacttcctacgaaaccgcgatctcagtaccagtcccaggacatagtgctggtacccacggtgacaaatatgaatcattgcaaatccttaaaataaatagaggacttatttaccttaacttaggttgcagctcaagacagcctgagaatacaaccgaagacacagacgaggaaacaccagcaacagcagcagcagcggaaccaacggtctaacacccaacaccacaggcgacagctgggaaccaggacgaaaccctaatcttcacttcacttcatctttacttcaaggcggaggaactatatatatttatatagagcaaggtgagtactttcatactcagcaagtcacggggacttaggtgtttaatgcaagcttagaaga

SEQ ID NO: 14624 - DNA, 1557 bp, Oryza sativa
  unsure (1)..(1557): unsure at all n locations
tatatatatgtgagcgatgaaatcatatgtataatataactccaccattacaatggtttttagagggcatatcgaaattacatccagctgacgacgacggcgctcagcttcttcataggacgtacgtttcagtttccactcctcttttgttcttcttttcgcggggacatgcaataagcacgagcccaaattaagttgattatttcgccagattaagcaaaagatcacaaaaaatgtcaagaacaagagaagaatgtcatcgggttcagtacatatatgcatcgatcgatgaattaggccgggaggtaggacggcggcagcggcaggccgacgaccttgccgcagcggagggcgttctccggcatgttgtactcgtcccggagcgacctcgccggcgagacgacgctgatgtagagctgctcgccgaggtagtgcctctcccagatgttggacctcacgttccacatcccggcgttgtcgaacgtcagcatgatcgccgtccacgacctcgggtacacctggaccgagtgccggctcaccccgtccagcaggttgtacgtcttcctctcctccgccgaccacttccccggccccatcctgcgccatcagtcagtcagtcaacggtagcatcagatcgtatccatcatttatcttatttaaaaattttatgtaaatatagaaaaatcaaatcgtatttaaagtacactcgacaataatcaaattacaataaaattacaataaaatagatgataactgcataattatttttaaataaaataaatggtcaaaactcaaacgtttgtgaaaaaacatatattataaacgaatgttaaaagtaaaaaaaacatcgtatattataaatggaggtaatttaaaaaactttttttatatcattcgtcttattaaaaaattttattattatgcgcatcagtaagttagttaacagtagtatcagatcatatacatcattcataatattcaattttttatgcaaatataaaaaaaatcaaattatgtttaaagcacacttgacgataaatcaaattacaataaaatagatgatacttatataattttttaaaaataaaatgaatggccaagcctatctttaataaaaggttaatggaggtagtagtaatggggggcgatgtatgtacgtacccgacggcgaagaaggcgtagccgtcgaggtggacggagtccatgctcttctcggggttctcgaagatgatctcgatgaaggtgcggaactcggcggtgatgacgttggggacgacgtggagggggccattgacggcgggcggcacgtcggtcatctggttgtacctgaagacgccgtcggtgacgttgaagtactcggcgagcttgagcggcgtctcggcgtcgacgtgggagacgccattgaagccgtacttgagcttgccgtcgatgtggccccgggagaccatgagcctgatggtgcgcgtgatgttgatctggnnnnnnnnnnnnnnnnnnnnnnnnnnnnnnngctgcgtcaccaggcggcatntcaatctcgaanntcaatnggcccac

SEQ ID NO: 14625 - DNA, 1307 bp, Oryza sativa
tggttcattagaaattctacaaaggaagccactatcggtgttctgaattttgaagatttccaagcaacacatttggataataggagagttgaacacttatcaccatatgaggagttccgcatcgcttcccatagcaatgcccgaattccaaatacccaaatgagaactgaatatatttcagtgtttggacactctcttttcttgcttcctgagctgtttagcaatcttaaacgggtgattgttttggaagatgatactatagtccagagagacttgtcacacatatggaatcttgatttgaaaggaaaagtgattggtgctgtacagtcttgtcgagttagattaaggcatctcagaccatacttggttgacttcccatatgatgctagttcatgtatctggatgtctggagtgagtgttattgatctcaataaatggagggagcatgatgtgactgcagttcgtaatcgagtactccaaaaggttagtattgaatagtgatgcttagcagctgtcttttcttctctctttcaagaattgtttttaagaaactactttcgatgttatatttgacataaggcatattcctcatggctatactcttgattttctgtttgtgttcaactgaacttaccctactgtaccgtgatcttcactaataagataaacttgcttgaagccttgaagtttatttaagatatgtattttttttcttgcacgtttggcctgttaagcgaagagctgcaaattcttaactgatacggttgtgcctatgtctcacttttgacagctgcaacatggccctgaagcgtcatggagagctgcggtgttacctgcaggcctgcttgcttttcaaaatctggtccatcctattgaagcacagtggatccagtctggtcttggtcatgactatggagtcaatcatggtgctataaagaaagctggcatattgcactacaacggcaacatgaaaccgtggttagaactcggcatacggcgatacaggaaatattggagaaggtacctgccaagggatgatccattcttgatagattgcaatgtgaatccatgaacaaggcaattttgttagtcctggagtccggaagtccatgttcgacgaacagcaccaccttgtgcgatagcgagagttcactgtatgcgggaaatttgatgagaggagaggggcttcagtgagcaccgcccaaactactgaggatctttcaggatgctgctgagatatgaagtaaaaaaatatcccaactaccttcagagtttcagagcccaggtaaggagaatgctctggaaca

SEQ ID NO: 14626 - DNA, 1942 bp, Oryza sativa
  unsure (1)..(1942): unsure at all n locations
acagaagctcaggcttaagcctttgatttgtttaaacattgctgttaagattttagcatcatgtttctgttgaacaggtgtttggcggcaacgagggtggtggttggaanccaaaacatcgcaggtagggggtgtgctcatgattgccatttctgggatatttttgttctattacctgaaatgttccaatcacatgggggtgtggttaggtgtatttatcctaattaggtttggtcaatgatgactgatggggtactactgcggaaagagaatttaatctttagatcagtgatgcatttttttttcgcaggaaaatgacaggctgccagtcaacgacacgaacaaatttccgccatcgattgaaaaggtttgcatttgagcccatcggccgcagctgtttcttctctttgttcatgcgtgaaattttatccaagtagagtgcttgttgtgagttgctatcgtgccgattgtggtctcatgggtagtgtttgagtggaattgccttttaatacatggtccatggccccatttttttggaaatgtcagtctgcttttgccatatcatggatcttgtttcacatggccctcttttgcatttctactgcaatcaaggcactgtttctttccttttggcatgtaagaggctcagagctgaatggggttttgaacttactaactgtttgtcactatgtcccaaaaattgcattgcatcatctgaaaatcttgtctatctaccgaaacatgcaatttttttttgcgttacctaattgatttagttgttcgttcacaggactggagcaaaacaaataccggtaattctgatgcagaaagcaatgggaccaacaatcaaccaagtattgacaaaccgattagcaatacctcaatccatccaggtaagcagggcccattctttgaccacttatttagttttaaaattttaaatatcaagttacagctttaattcttcttgtaatgtgcaggccttcctatcaaacaaatcgtgatctttgatgatatatcattactgagtgtaagagctaatatgctttacagttatttttaacatgcccttgtctgttcgtgcagtaaatatatatgctgctttcgcatgaatttctgagcagggcatgtgatatgcaccttgcttttgcaatattttaaagaaacatttcaataatcctttgtaacttgtttgcggacttgcagaattatcatatattacatactttttatttttcacctaatgttgcagaatactgatgctgatcctaaggacaattttgaacaaggtttacctggtgatgagagtataaaatcgtgccaactagaatttggaagctattgtgtttggtctgttgaacacaaggaagtgatgaaagattctgtagtgaagagacttaaagaccagctctttgttgcaagagcttactatccaagcatagcaaaacttgaggggatggaaaaactttcacatgaaatgaagcaaagtatccaagagcatgagcacatgctcagcgaagccatatgtgatgctgatcttcctgcattgtaagtaatcttccagaaatactttctttagttctcatttttaagctatcatctttaatccataaggcactgctaacttcagaaattgatattttaccatacatgaaactgttgggtatttaagcagcctgactttgcaccaaaaatggtctacctactaactgttgtgcttcactgtttgttttttattttcacagattttgatatccgctnnnnnnnnnnnnnnnnnnnnnnnnnnnnnnntagcaagtnagctcgcaatccacacatgggggggnnnnnganatnagaaaaaatatcttcggaaatgannaanatagnnncacagtttaacctgatcaatagccacatcnaacatagaatccggaaaaatcgtatnggnacgccacgagtg

SEQ ID NO: 14627 - DNA, 3587 bp, Oryza sativa
  unsure (1)..(3587): unsure at all n locations
tatttgctctatatgcttcattgacacgttaaatctgccctttatgtcaagatattattgcatccaagtatattaagcttctgtttgttatattctgcttgttttaacatcttaatatagagtcgtatcggagtattagccgatatatgctagatctatccgatcggctatggtacgaacatatatagtcctgttattaatatatatttcgatctaagtgatttatactgtctcggcacggcgaccgatctatcccaatcatttgatttaagtatatatcgatataataattgtatattgctaatatctacagccgatcaagtagatttaattctttattacctatttacaaacgccgatcgatttacatatgacatcggctcaaagataaatgatatgtcatcggcacctagccgatcggctatcgtttatagatttaaccgcggtttctttgtatctatttcttgttgattgcaggatcaaatcaactggcacgctaacacacccgaaggcgagctttggacctgcactggagttaagcagatctcccaggcctcgtgtttttcgtcaacacgcttttggcacgcccggtgggacagattaggagtcagataagcaattttcttcatggccgagaaactaccgccatcaccgtcctcgggtagcccaggatttgttaaagaaaaaatccaaaaggtatgttttacggacgttgatgaaaggaacattgtgaccatcaatccaaaaaagctcacacctgatcaaaagaaagattttgacgcgatgatgcaacaaggtgttcgcaaataaaacccgaacctccttgttagaccgacatgtcattcttttccccggcttgctgagtacgttaagtactcacccttgccccttataataatctatagagtttgaagatgaagacgtcgacctgacagctgaggagtatctccaggagcaagttgagtatgaagacttctagatgttttgtgcctagccccaagcctcgcctgtggaataagttagttgcctaagttctttgcctagtgcgtagtcgcttagttctccgcgctgttcgcttctgtgccgtcgattttatggttctctgtaatgctgtgttgctcatatgtgggcctgtccatgatggcaacgtttgtaaggactactacccagtgatgtaataaagcaatttactttgattccacatttattctgtgtataccagctagtgtatcctgggactggtactatatcacaggtaatgcataacaccccggtgtgagtttgctgtgtttatggctaacaaatgtcggggcgttacagtgaaatgaaaatttttttatgtcacatcggacgtttgactggatgtcgaaaggggttttcggacacgaatgaaaaaactaatttcataactcgcctggaaaccgcgagatgaatcttttgagcctaattaatccgtcattagtacatgtgaattactgtagcacttatgcctaatcatggtctaattaggttcaaagattcgtctcgcgatttgcatgcaaactgtgcaattattttttctttttatctatatttaatgctccatatatatgtccaaagattcgatatgatgtttttacgaaaagtttttttggaactaaacaggcccaaagaaaacacatgcgatgatagtgagggaaatatatataccttcctcactgcctcgctgacattcgtcgtcgcatctggatcgcgaaagtaggtccacccacgagcagccatagtgttgagttcatcgatgtatctctcccagtcaatggcagaacaatggcaatgcatacgcttgaactcttcatcagtaaagtctgcatatccgttagggccataagggatcgtccttggctctagtgcgttaaccttgtctgcccacagggtggcctccttgaatacttcgtagcggcgagccttctcctcctcagtgctgtatgaacggccatactccttcatcaagtcatggaacctggctttcatggtcgcctcatcgaccttcacctcctgctttttaatggcttcttggtagtctctcgcctctttagcaaatgcctcatcgtccgggagagtcttcccatgttcgacgtaattgagatagctagaccacaggatcttgccatctttgtccacgaaccctgcctcgattgctgcttccttgctcaggtaaggctccttgccggcgtcctgggcagctggtaacttcttcgtgacttcctccttatcctcctccctagctacaggttatgtacagatagtggtagtggctatggttaagttacatggatcagagctaaatattccctttgtttcatatcataagaccctttaagtttgatcaagtttataaaaaaaatatagtagtatttttaacacaaaataaatatattattaaaatatatttaatgttagatttaatgaaatcaatttgatactttaaatatttctaaatttttctataaactttatcaaacttgttaagtttgactaggaaaaaattactaacaaacaatgagaaatcttggccttttcaggattcagattggatgacatatggtaggcatgtcacaaggtgacatagctcagatctcagccctccaaaacaaatccaacggctgagattcgtccacgttntnncgagttaaaatttaactcgtaggagtaaaaattttacttggagtcaaattttattggagttaaattttaactcgtgatgacgtggacgaatctcagctgttggatttattttggagggctgagatctacgctatatcacctttaacatgcttatcctatgtcaccatctgaatccgctttttcaattcatacctcctgacttgtcagtgttttgcttgaaacacagaattgtggccgccaatccaaccaatgaagccgtggctacaacaacagagccaccaccaacggcgaaacccatctgtatcgcgtaacgagatgagagacatatgagctgcgagtgaacaaaagaaaagattttcgatttgagaaccgggtgagatgagagacgaacggagtggaaagagtgagctgctggcctccccgcccgagtgaggatacccagcgaggactccgcctgcgcacgggggatcccgcgtggcgagaaccccctccggcttcgggtgagaaggtaaccgatggcccggagcgacatggccgcgaccggagaagctccccttcttcctcctcctccgcccgcctccaatctcgcctagtcgccgagattcgattctagggttttctctctcgtgacttcccttcccgatcgacgtacgcacactacagttacggcccagtttgtaaggcccgcatatagatcccagcccaatagggctcaactataatgggcccgttccaatcgaacgagtaccacgcgtgcgtgtgggccctgtcgtcgagaaccaccgtcactacctgcacctgcacgggcccgataataataataaaaaagaaaaaggaaaaaaaaaagagaaaaatccaactannnnnnnnnnnnnnnnnnnnnnnnnnnnnnngtggntgtgaggagcagctcacctgcacgc

SEQ ID NO: 14628 - DNA, 851 bp, Oryza sativa
  unsure (1)..(851): unsure at all n locations
cgcgtgttgagaatcctagtgnnnnnnnnnnnnnnnnnnnnnnnnnnnnnnnnnnnnnnnnnnnnnnnnnnnnntggtgtatgacatcctccagaactgacgtggtgacggactcaacagcagtcgccttctcctcaacttgatgctccatgcgccagaacacatgaacgcgtggatcgtacatcacgcagctgtggccgatggcggcagcgaggcagtgttcgtcgtccggtggcgaagagagcgtcgcggccaccatgtccgtgagcgtctcgacgtcagcgaggggtaatttctcgtcgccgcggaggctgaggagcgcatagtccagggtgcggtagaagcagacgaagacccagccaccgtcgtaggcgccgaagtagcgcgcggcgcgtgcgtcggccgggagcgggtggccgaagccgtgggtggcgcagccggctagggcgcacgcgaaggacgtcctgtatgcgcgccggacgagtatcgacgggagcggcctcgtccccggcggcggctgcggctgcggcgcgacggcgacgcgccagttgtggcagactcgggccatgcggcggcggtcgacgaggcacgggaggcgcttgtggacgaggcggaggacgtcggcgttgaggtagaaccatggcgcgtccattggagagggctcgagaggcggaggcgcggcttgccggtggcgaggtgtgtgtgtgtggggaatgggttcctctgcttctggaaggaatttttttcggatttagatttttttttaaatatttacagaaataatctatcgnnnnnnnnnnnnnnnnnnnnnnnnnnnnggcgtntgaaacacgcgttcacctggacatgcg

SEQ ID NO: 14629 - DNA, 741 bp, Oryza sativa
  unsure (1)..(741): unsure at all n locations
ccgccnaggtagactcatctagcatccaccccncgggagctgtcctgatccaagcctattgatttctaacccttggtacctggaactgcaccgatccacaagaggtcttactgaatgggagccaactagttggcggaagtcaataagccagttgatgaacagttacagaaaggatacatccgcccgagcacgtagccttggggtgcttcggatatctttgcgggcaaaaaagacaaaaccaacaggatgtgcgttgactaccgagctctcaatgggggcaccataatgaacaagtttcctttgccaaggattgattacccggttgatcaggttaaaagagctactgtgttctctaagatagacctgcgatcaggctatcacccattgaagttccgcgacgaggatatttcaaagacagcatttatcactcggtacgggttgttcgaatgcacagttatgtttttcggactcactaacgcacctgcctccttcatgaatttgatgaacaacgtgtttatggaatttctagacaagtttgtcggggatttcatcgatgacatacttatctactccaagttctaggaagaacattaacagcatctttcgctggtactttaaaagttaaaagagcaccagctatatgccaagctcagcaacgtgcgacttttggcttaaagaaaatcagtttttcggacacattgtgaatgcttattgaatagctgtggattcagcaaatgtgga

SEQ ID NO: 14630 - DNA, 709 bp, Oryza sativa
  unsure (1)..(709): unsure at all n locations
cgccccattgaattgagattctnnnnnnnnnnnnnnnnnnnnnnnnnnnnnnnnnnnnnnnnnnnnnattatttgtcactcagtcaatccacaacctgctctcggttcatcgctattttgaggttgcaagttgtcatcccaccacttgaccagaataggagggcacgaatcttcggctgtttgtatacggggaatttcttcttcatcaccgatcattggtcctaatgcatccattgacaaaggttacacgatcgatcagagttatttgggtcaacatggtttcggacaaagtgtttacctgtaatgatttctggacgaggacgagtggattcggatacttttaaaggggatccagatctccggtcattgctggcgtcttgtccacgagggttgtctgcttgggtttcgacttctggaatctcttggcttggccctgcgtccgactggtttccagtcgggggctcctgattaactccggcttcggcttcggccgactggattccagtcgggggttgatcaccggattctacattatcggttgccggttgattgtcactcagatgatcctcagcagttggctcggtttctttggaagaacttgtgtccacgttagtcgggtcagagtctttcccagacggatctatatcagatggtttcctgcaaaattgattatcagtnattattgccgcatgggtgcgcatcaatgcaa

SEQ ID NO: 14631 - DNA, 566 bp, Oryza sativa
tataactgcaatataaaggaaatagtgactaaaaatggtatgtgcaattcctctgaaataataagtctatataaatagatagtagtattgctcaagctctttttaacattaacaataacagtggatacgttaatagaccaggttatgtcaagtgagttcaaaagaaaagaatgtaacttagaagggctggcatgcagacaaaataatatggagaaatgatggcatgaaaaaaaaattgtgatcactaattagtgtgtcttcaacgctggcatgataatcaagattgcggattaacgaaataaaatacaaacatacaagacctaccttgaagatatagcattggcaagctgaggattgtgccaccatctaagagagaaactcgaccccgtgtatcatcaacctctgagtgacacataaagagtcttattacactttcttttctatcagcatcaaacatcatatagcaaggatgcgaggacatttaccaccaagataggtgtgcaacgaggctagagatgtgttgaatgtgaattgtcagaagtgctagccacctctcccttgtcgtt

SEQ ID NO: 14632 - DNA, 734 bp, Oryza sativa
  unsure (1)..(734): unsure at all n locations
cgctgttttgnanattggannttgatgaacctatnnnnnnnnnnnnnnnnnnnnnnnnnnnnnnnnnnnnnnnnnnnnnnnnnnnnnnnnntgcgtagggagcactccgcgcggttctagggtgggggatggacttggtgcactcacgcggttcgtgcgtgacccaggtgcattgggcctactcccagccttactgctcgtggtggaacgcgcgcacacagagggactgaccggagtacgcttgacccgccttaagctgagctggtgccgatgatgcgcctacctggcttgtacgcgggccggacagaggtagaccacgaccctgtcgcgaatggacagcgagccgcagcggcgagcggccgagcgatccaccgggatactgacaaaagctagcacaccgggcggttgttcctgatgaggggagactaaccaacggctaggatttgctggtggttgtttgacagctgcgtatttcggcagatgcaaccggttgccggagaaaggggaaacggcgacgatgtcactaggggctcaatcccgggggcgagagcatctacaccgatacaggaatccgatggtagcgtcggcattgacggaactacncccatcgaggaccggtacatgcgctcttacgagcttggccgttacttgagngagcacactggagcgaacgggaacgacggtgcagcctctgttactttgggtaggtactcgagcggatacgaaggttacga

SEQ ID NO: 14633 - DNA, 1670 bp, Oryza sativa
  unsure (1)..(1670): unsure at all n locations
gaccccgaaaatgttcccaccccggtaattcgatcctcttcttctcccggcgagttttcctttttccctcgcagcggttaacttccgtcgcaatttgtcgtcgtcggccctttccctttataatccgtccggtagcttcactcctcctcgacccgcttgtcgctccggtggtattccctcctcccccggtgcctcgccccgccccgccgacgggcgccactgtcccctgtccatttcggccagcttttgtcttccctcctctcgccatccgacgcggcccccaattaggcgccacgtcggctagaccaagtcaacccgccagcctcgtccccgctcgcgtgcgctcggtccacggaaagcctaccggctgtgcgtgggcccgccacccttcggtccacccggtgcaccaaaccgcgcgccactcccatccgaaccctagcgcgcgccacatgcaccgctcccacgatgagccgcgccaccgacaagcgggccccactcgggaccccgcaaggtggactcggcccaccggccctctctctccctcactctccccgcgccccttgggccgcctctctgggccggccggcccattagtttggccgagccgcgcctctcctctcgggccacgcccaagccgcccgagggagtctaaatcacatccctccaatttctttccaaaaagggtttaataaattattaaatcctttttcctttgattagtaaatccaataaactttgaaaatccatatattcccaaccgctcatccgattgactccgttccacttccagtaattccgtaaaattgagatctatttaatggcactattaattaggctaaataggatctttcttttgggtcttgtgtaggttttcgattgtttgcgtatagttgcggttaccggattttcgtcaatcgtggttttctcggagattcgtgaagcttcgtgaagaccttgagcaaggcaagtcaccctttgatcaatttctcctataattggaaagtcattattattttgtttgcaacttgcattattagaatcactcacgtttaacttgcttggcctcggtttgcatgccaaaccgacagacctacctagtagtcgcactaattcctgtaggctgtactaccctgactccttatcgctccacctttgtggtaccacggtatccgtgctctctgagcgcgtataccaaatatcccacatacaccgttgtttatcgaaaacttgggaaatgggtttgtaaagccttgaaaacccgacatgtggtgtcggtgtgtttaaaaataaaatgaattgtgaaaactcgcgatgcgggggttgtgcctatgtggcactgtcccgtattcgcatataaggaccgattcctgtgggaaacgcatcgagcataatcaaagtgcaaccacaaggtggaatgggacaccctggctaagtacctagtcggttcagggaaacctcgcaagccaatagttgggtccgcctgggcggggtcggttggngccggtccgggttcctgggggttcnntttcctnnntnnnggnnggtcaatccgacacaaacaatnnnacactggggggggggnggngaaattccaaatttccacaacaccgcgaatctgagaaatgtgaggaactaccacacaatttgccccattattccaccgttcacgg

SEQ ID NO: 14634 - DNA, 858 bp, Oryza sativa
  unsure (1)..(858): unsure at all n locations
aggatcgggttgcgggttttaagatgttgttgtttgattcttccacctttctgatatnttatagattttggacataatttnaaanctccccctccccccnccccatgtgttgatggcacntggcttgcnagcnccncnanacnngaggaanagggaacccccacacgcagnagncaaacaaaactacgctaggaatcacctcacatccgcccatgatcgtgggcacggctgttcgaacagtggtggtaacctctgcagagggggtacactttacccacacgatattactaacccggatcacccagcccgtggggatcagccacgtcgggagacctccaagctttcatgacaaggcattttcaaagccgacacaggcttaccatatgccgacgagaggggtcccagaccaacaacaggttaggtcctagaccatactgtgccaggaagcccaggggtcctgtctgacaccaccccggcgaattcacatgtctctcgggatcatggctcccctgataagctagttactcagccaggggtgtcccatttcacccatgtggtcgcacttgtcctatgttcggatgtaattccaaggaatcggtccttaagtgcgggagcgggaaaaccgtacacccggtatgttccccggtccgcggttttagaaattcatttagttcgcaagcaccgacccaggtgtcgggtttttcaagtcttttgtaaaacccaaagtttacccaagttgtttctcagattttaagtttgaaggcgaccgccgatactcgcacagagtgcacgaatatcgaggcgccattgggtgggtacaagggacatggtttaacaattaacaaaggagggatcaag

SEQ ID NO: 14635 - DNA, 705 bp, Oryza sativa
  unsure (1)..(705): unsure at all n locations
ggcgggttagacgcctgnnnnnnnnnnnnnnnnnnnnnnnnnnnnnnnnnnnnnnnttcctgaaacactgaaaagaactggtgagtgtcatgatgcagaaatttcaagagaccacatggtctacacaacaaaagtaatatcatacctcagaatttatcacagtcgagttgacagtcatggaagatgcaagaaggttggtagagaaaataacatagtgccggagaactggattttcaagcttttgcacattggagtactccatgtcagcaaaggatttaaagtagtctactgtcaatctcattgaaaggcagtggaggctcttaggtaatgtctgaactccaagccggtaaagatatgcaccttgtcttgcatgaaaatgagcttcatcctcagtcatatcaagcaattgcctcagttttttctcaaaattagtgcattctatcagacatgattttgctgcagctattgtcttctccatctttgccatattggctccatggcttcaaaaataacaaataatcactataacaaaacaaataatcattatagcaaactctaaacctatggggaaattttctgttccaaagtgaatctgtataacacattgagccatcagatcatcagtccactcatcatttagaacttactgctacaattattggtaaattattcatcccaatatcacacttttagcttaatacaatg

SEQ ID NO: 14636 - DNA, 1077 bp, Oryza sativa
tatctaattgaaatagaaagaaatagaaaagaaaaagtgccatcagatattataagaaaaagtgccatcagatagtttgttccataagtaaattttaactggaattacagtagcattatactcaaattgaaatacttatttactgtaatactacttatggaacatactcatacaggtttgaaaaacatttaaagactatcttgaatatttctttacaggtgtcatacaaaaggacaaagaatgcaaaagttctaaggaaatagaaggaaaaaatataggtaaacaagagttacagtaaattttaactggaattatagtagcattacactgtaattgaaatacatacttagtgtaatattaaaattattttgaaagaattatacaaactgattcatttgttcacttcagtatctataatcaagtatcaaattgattgtagttggatttttaagtagttacagtttctgtttactggaattatagtataatttctctgtaatacaaatatatgttcactgtaaatggacttatgaaaaagattgggaaatacactctatgtttcagaacttgctggtttagaaattcaaaagttctttgcaatattaatttattctttctatgcaggtggcatacaaaaggagaaacaaagcaagagttctatggaaatagaagaaaaagaatcaggtgaacaagataatttcaaattttattcacaaataagaagattaaaatgagtctgaaattttttttaaaaaatgccatcagatataaaaaagcacttcaaagctctgacagaaatggatacagagattataagtcaatcgaatctgacagaaattaacacagctatgttgagctcaggtaagaaacaaaaaattatgtagttcaatgtatttttaaaaaaatgacaaacatctaaatgatctgaactatatactttcaagtgggtactttttaaaatctaaaatattaacattaaaactagttacagagaagaagttataaaaatacatgtaacaataactgaaaatacaaggattattctaactttcttcataatgatttttattttgcagg

SEQ ID NO: 14637 - DNA, 5863 bp, Oryza sativa
  unsure (1)..(5863): unsure at all n locations
gttttccgtctctctctttctcttctaatatttggacgtctttgtcttcgcctccttatctaaggtgtgtttccacttattccatgcctctctcatcactccccccccccctgttnttttagactgtgcttagagacccacnnnnnnnnnnnnnnnnnnnnnnnnnnnnnnttcaaggaatccgtttccggcgcctgatgggacggaggagcaccgatgttagccggcgacgagcggcggccttcgggagcggacggcaatggcggcgaggccatgccgggcggcggcggggctcggggtagcgtccacgcgcgtttgggaaagtataggctagcaatcgcgcaagctaagggggaggaagagtggggagggagaacaggagctaccgcgtcgggagatcgctgggaagagcgttcgacggcacaggcgggatcacctcggtctcgggccggggaaggggagggagagagggcgaccagagtcctctttggctccgcgcgcacgctggcttcccggcacacgcgatggcggaggaaggcgaggaccgcggcagcaaggcggcgatggcactgcagcggtggagactgaagcgggagggattgagaggagggactcggctttatagtggaggcgaggtcggttcgcgcgggaggtcggttcaaaccgaccttggggcggtcaaggcggcagctggcggtcgtgctcggagctagcggccaaacggcggcagaggcggtcacgggcgtgacgccggctaaggaaaaaggtgaaaagaggagagaaacgagctttgctcccttgctattttgggaggaaggaggatatgagaacgagagagaggagcacgagctctgtctcctggttttggaaggatgcggcatgggggcatcggaaccaggcgatgacagtggcgacgtcggcaaaaggcgagcggggctgggtggctgcgcggcgcaggcgcggcaaggcggacggcggcagcgaccggccggtcggccacgcgcgcgcgcgcgcgggaaagagcgaaggcggtggcgggtttgaacgacaaagtggcggcgcggagcgcgggcgagagagagcgagagaaaacgagagagagagatcgggggagagagagaggcgctttctctcaggtagggcacgtgcaacgcacatgaggaggggagcgggctgagaggagatgggccggggaagaagagtcggcccactgagccagagggaggtagaatagactttcacagagaaggctgatttggagagaattggagtttggatttggattcaaattcgatattcgaactcgagggttcagggaggaatcaaggaaggctcaagatagagtttggtatttttcggaattgggagcgagcgtttagcgaggattcaaaggatgcgactgaatttcggaatttgatttggagacttgaatcggaagaggaatttgaggtggaggattttgatttcgatgagagggaacaacgagatttgaaatgagatcttggcacgacttagactcgcacacaaagaacgaaaattttcgcaattaggattttaccgaattagtttttaacgtctcacgaaaagcggagcgttacatatgccatctcctttccctcgatcacacttggctccactcgcctgcatgcgctcctctccatcatctcggacgcgccggtccttcgctccaccacgctgtgttgactgtgcttcactccatcaccgtcccggccgccgctccaccccggcggcccggccccccaccccctcggccactccatctcaccgttccagtcgtgctccactcaaccactccatcaccgtcccggctgtgtcgctctaccaatccacctctctgtttagtcatcgttccccctggccgtggcggcagccgctcaccctcgcttgcaatgcgagatggatacaacagtaggactcatgtgtctgattcttgctagcatcgccatctccttcctgatttacgctccatactactggggtcttcgtctccatgtccgctctggacgatatctgcgtcgatcagatggcaagcgctaggtaattcctgatctttttctttggacagtcaatctgattaattagcacgtttatgactttgatggcatcttttcccctttctatttgcgtttgcagccctgaaggctagctgtgcttgccattttgtcatttgagcatttcatcaagtagttggtaggcaagcgctggtaaaaactgcacttttttgtggagcaagattatgaactggctacttgccaacaatttggggtttcttgattgctgagaaggagattcggccattgatctctttcttgaagcaacttgtggtggtcatttctaggaatctgaagcaaatgattatctcacctgatgcatgcgaactctgttcccccattttcaactatgggaacttgattatcgagaatgactgctagagtaaagtcatagagaacacaatattcttgccggactctaaagttcatttagtcaagaagccatttgggatctcttggttcatggagattggcactggtcagcttgcggcgctagctgtgtttgtctgcatttttgcctgtgtaggcatggctgatagccagaacatcaccggtgatggttcaaggctagctgaggtgtgcactgttcacatttgatttagttattgggagagcagtggtgtttcctattgagctctcaaataggtatcgacaaagatataggtgttcttcctggaacgaagctgagcattataaggcatgataccaattgcagtggttttctttgatccatgaaaggtttgggtttacttcttttccaccaagttttctttaatagaattgtccttaataatttacttgtaatttacacattaatctttcattttcagagacaaaagtaaagtttgtaaagttgaatggtatattggtatgcaattatgcatgtaactattcactgtgcatttgcaattaggaattttcccttttctctcctgcaaaattgtatgccaatttttttggaaactctttccaaatatgttagtcctttctagattatccatcgccaaatatactataaattctacaacttttgtattgatacaaattattcttaaattgaatttaactttacaaagtctggacttgggcttgcattgcccattaattggatttgaacatgctctactcatttttttttatttacctcagatttgtccattgggtcgcatcccacatatttgcatggtcttcagttgctaataatcttctgataattgataaatgttcacagactgcttatatcttagttttatatttattgtggatatatgaccagtgcatgctcacgttttgacatgcattatatactatgacatgcgacataatatggagcatattttcttttgttttgttcattttcatttttcttcaatgaacatcgagagcattgcacgagcatctcatgacaggaagatggttgaagtaattctcaactccattcaacatggttgaagtaattttcaagtccattcaaccagtctatctattttggatggcatgtccaaccagtcttataactaatcaattagatggagcaatacaatttgcgatcttttcatatctgaaagtttagacagaaactaaactgtcgtataagctaagagtcaatatggtaaaaatcttgtaattttgtatgaaattgtagaagttggtcacatacgtcctgctcgactgtctttcaataccgatgctacggtgcatcatctgagcttgtgctgctctgtgtactgcaaaactaatacggaattaacatgaggtagttagttgattcccaaatgaacctacatgttggagagagagagagagagagagagagagctatataattggaaaggtaggctctagcaatttgaaccatctgagattgagaaagtcattactgtcagaaatacttcaatagctgtctacaatgtttaactaggttaaataatctaggcaaactgtaggtaagtggttttttcatgtatgctttcattactatgcaaaataagaatcatgagtgtcatgatagtacctgtagctatatgacacgcatcaatgcagttctgcttatgattggcaatgatgaatatcgatttctgatattgtcatgcatgaataagcaatcaagaaatacagtactaaaattaggggactcataaggttaggaaaatgtatccaaacgggataccgttctgtatcatccccctaaggttactccatgcttaagaaaatatgcatgtagcactactgttttccttcaggcctgtaagctttctttgaaataaaaaatgatttgttggtgctatttgtttgtttaaatgtaagttttcttatgactcatttttcaggacgacaatgttatattttctcttctacaattggatgttaattacctagaaacatttctaaaaatatcgagaactaaaatgaaaatatgtaagcagttatttcttcgcaccaagatctattgcatttttttggtcgatccaagacaaataaaaaatggggctgtctatatagaaatcgaatgatttctgaagctccaatcatgcagattttatctaccataggatgcacatccaacaactcagaaaaagtgatacaaatagatattacacttaaaaacagatatattatttgattatttgaacgccatttttttaaagcccaaatctagatccagatccataaaagcccaaatccatatccagatccataaaagcccattagtaaaaagaaggcccaaaatacaaaatttgaatcaaacacaaataaacaaagcccatgattttttcgcccatgcgaattatttgaaggcccaagtccatatccagatccataaaagcccattagtaaaaagcaggcccaagatacaaaattagaagcaaaacacaaggaaataaagcccaaattataatccaacagcctatccaaaaaagtagtaggggccaaacttggaagccaagtagatgaaaaacatgtcacatgaatcaaccatgtatgggaccacacttttcaatcccctacttttcaacagcactattagttcacaaacagatctagcacgaatcaaacatggagctaggagaagagaaagaagagagaaaaagaggatccaaatcgcagatggaaggagagagtacaatgtcagaatcaaagagtagttctagaggaaagaagaaatcaaagacaacttctgaacagaaagttgagatccatacaaaggaaacacagaatctggcgaacacaaagaaaaaacaagaggaaggcaaaatcaagagaaacaagaaggctccagttcaaggttagttcaaggctccaattcttatcccctatatacaattcctgaaaaagatcaaagagagagtttaggtcaaatatacaattcaaaagaatacatgaaattgctgaatatgtcaaatgaaacaaggttaacaatccactttgctggataaatacaacaactcagaactgaaaatttcatatgtttgctctgtagatctgaactatgtaatgttagaagtaaaactacactgcattcagtactacgaaactgcattctggatgattgtattactgtgtactattgatgaataccaaactaactttataaaaaaacatgacagattgattaatcttccaaccttactgaatttcactctgaagatatcacagttatacagttatacagaaatataacaactaggccatatagcatatcctgnnnnnnnnnnnnnnnnnnnnnnnnnnnnnnnnnnnnnnnnnnnnnnnnnnnnnnnnnnnnnngatntataaaacagggtttcaat

SEQ ID NO: 14638 - DNA, 2773 bp, Oryza sativa
  unsure (1)..(2773): unsure at all n locations
ttgcgacattttccagtttatctggtgtaagtcggcgttacnagtttcgtttgacatattttattttttgttccgtagaaaancatttccctcccncccccccagtgtgatgtcagcgcntgacancnacgcnccnnnagacgcgaggaaancggnaccccaaactcangnaagaaccnacacaggtattcttattctatttcagaacaattttttcattacagttaatttgtataaaaattacataaaaaactgtaattccaatactaaaaatttcaaactggaatacaaatttactctaatttttaatgttgaatcaatcaatctattgcaggcataacaggtaatgaggtaggaataagcaatgctctggatgaaccaaacacaggtaacaattcaaaatggaattgaacaaatgcataattccttcagtaaaaaaacacaaaatgcaaaaattacagtcaatttgaaacagaataagaataattttaaacttcaacttgattgttatacagtttgactggaacctatatataatttgatcacaattactttaattgcaaatataacagatcatattggattaggagcagaagatgcaacagtagaaaagcaaagtatggataattcagcaagtgtgacagaagcatttgttgattacagcaacaaatattcatatgatgaattatctcttttcggatcaatgaattcagtaagttcatattacaaagtttttgctattaaaggaaaaatttgaaggtggtagtcaaaatactatatgaaaatttatttgcaggttgcaaatatgtcgtacacaagcttaatggaacaaatcatatcatcacagcctacgatttctgatatgcaggtaagaaaaacaatatttgaatatcatatataatttagttgtaatatttctgtttttattggaatttacaggaacaaaattcagcacactctacttttgttgcgagtccaagtgcatttcaggtatgaaatattaattatttaattgaatctaataattcaaattcaaaagcaaataagtattgatataaaaattttgttttgcagaattcaatgatattaacaacaaatcgtactaatgctaatattgaagaatggaataatgatgcggcaaatgaggcatgttgtcttggatgtattacttcctgttgtagtattaaaaattatgataattttagtaaattttaactttgtaatgtaattcaaattccaggaagatgagagtaatgaagaggatgcaatggataattggaatcttgatatattcaatttgttagatggtgaaaaggtaatttttgttgtttgtacctttttctctagataacaatgattgatgattgaagtttcatagtctgcaaaaaaagagtacaaacattaatatttcttaaaaaattaaattgaataattcagattagcaatgaataggctagaaaattaatttcagaaactaatggaactgctttttttttgcaggaaccaagttcaatggataatcatcgatgtacttcagttcaaggaacaagagatgatgacaataatccaaatgataactctgaaacaaatcaacaagagctgacagaagaagacataaatattttcgtagagaatgaacaggaagaagctacaaagggtaataatgcagcaattgatagcagatatataccaagagttggaacacaatttaagactattacaaaagcacatgaattctttaacttctatgctctgttggctggattttctattgtcagggctcacaactaccacacaacaagcaagaaaaggaatggagaagtgactagagtaacgttcagatgtaatagacaaggcaaaccaacttctcaatccaaatcagtaagcgcagaggaacaagtggtttcggaagaaaatacaaatgaaaatgatgcacaagattgcaagtgtgctctggttatttcagagaggaatgagatttggaatatttcaagggtacaattagaccacaatcatcaactaagtccaagagatgaagtgagatttctcaaatcacacaaacacatgactacagaagaaaaaatgctcataaggaccttgaaggaatgtaatatacctgacggagcgtggagctcctcaccgggagaccgcgcaggcccccctttgccggttcggccggggacgctaagtgaggttcttcgccctcgatcgatctggagaatgttcgcgagagagcaagtgcacgagacacgggcgatgtagacaggttcgggccgctgagaagcgtaataccctactcctgtgttctggtggatctgtgtgtgaaggagttacagagagccggagagctagagagttcaggctccagaacccctctagcgtccttttttctttttttcccccctttttggtgggcaaggtcctccttttatatctcaaggggataccacatgcaccacttctacctacttttcttttgggtggggacctaccctatcttgaccaaaacttggcttgcaccttcgcctggaagctaaatcacaacttgtccttgagtgaggctcagcgccgtcactcgcctgacaccggggatctccctgttactccctcattaatgggcggagatttgccatggctgctttccaaatgaccatccgacgagatgggtcatacctacctccactccaccggaggcagatgcatcgtgggagcacggttgtctgccgatgacgcgaccggcgtcagaccagtcacagaccgatcattcttgtcc

SEQ ID NO: 14639 - DNA, 2503 bp, Oryza sativa
  unsure (1)..(2503): unsure at all n locations
agaagtatcttaatttcagaagtcaatttgcctagtaaaatataaaaaatgctaagatatataaaggactaaaataaagaaacctggataaaagaggaggactttataaaatattttacatgagcaaaccacacagtagtttttttgtaagtgcaccgacgaaggaattttctggatgcaaaaaaagtcggttgagatattaactaaaaatgttatgaatgtttttaaaaaaaaaatggttggcaaaataaaattttgaaccaaatagtttaatgtatttaagagtaaaatttgtgcaattaaaagtatgtaaaaaaaaagggagataagttaaataagattgttattatggagaaattgggctaaaataaaaaatttaaaatagataatagaaatatggtaaaggtattaattgtgtaattaaataatgagatttaatagattttaagtaaatgttgtaataanaggannnntacccccccccccccccgagggggtcaggccacatgggtgactgcagctgccccaaacctctagtcaagatacccccggtcccatgtccccgacaataccaacaaggcacatgattgtaattttatttgttctaagaggaggattgacttctttgccttatacgaagaaagatataagcaatgtgagacccccaattaacaaggagacaagcagcaatgatatgatgaaaactttggaatttttcagaaggaaaaaagaaaaagatccacatttcttttatgagtttgatttggatgagagcaagaaagtgaaaaatctgttttggacagacgggagatcgagggagtggtatgagaaatatggtgatgttgtgagttttgacacaacatatttcaccaacagatacaacctcccgtttgctccctttgttggaatttctggacatggaaacacaattgtttttggttgtgcatttttgcatgatgagacttcagaaacatttaaatggatgttcagaacttttttgaaagctatgtcacaaaaagaaccaaaaataatcattactgatcaggatggagcaatgagatcagcaattgctcaagtatttcaaaatgcaaagcacggaaattgcttctttcatattgtaaagaaagctttcaatctatctggaaatttgttcaaagcaaaagaagggttgtatgatgagtatgaagacatcataaataactcagttacagaagaagaatttgagtatttatggcaagaaatgattgacagctttgaagttcagcatatcaattttctaaagcacatgtggtcaattagaaaaagatttattccagtgtatttcaagggtgatttctgtccatttataaaaagcacagctctcagtgaagggactaactcaaggtttaagaataatgttggtccacagtacaacattacaaacttcatgatagagtatgaaagagtaatggatacaattcaaaacttggaacagtttgatgatcacatttcaagaacaaagaaaccaagcaaactttggtcccattactacattgagtaccaagcaatgagaatgtataatcgcaaaatcttcatcaagtttcaagttgagttgaaaagaacaactagatttcaaataaatgaagtagagaagttcaaaacttatgaagtttttttggcattgaatcaaaatattcaagtaatcagaagaaggaagtaccttgttattgtggacttggaaaaagaggatttcaactgcatttgctcaaagtttgagaaagatggacttctatgctgccatgtattgaaagtaatgctccacctcaatgcaatgaagataccagaaaaatatattattgaaagatggacaaaaaaagagtacaaaggtcttgggggaaaaggcaatggaaatatacctttagcatagagctcaatcctgagattcaacattttgtcaaggaaaagtgcagaaatagcatcaaatggatcgaaaagcaatgaaactttccagtttgcagtggaagagatggacaaaatcgctaaacaattggaattaatgtgttcaaataaagatgcagagcaggagatcaatgattcagatccaaatgcagaagacaatttgaactcacatgaacaaggcaatcaacaatctgaggaaaatacagaagaaatattgttggatccagatattgcaaaatccaaaggcaggccagctcaaagatacaagacaattagggaagaaatacagcaaaaagaactatatcattgcagtcattttcagaggacagatcacacatttccaacgtgccctctgaaacacgttgagtttgacttgccaaggaagaagagaagaaaggttaaaaatacaagagaacaggtaacaaaaattacaaatccatatgaattgatttttttaaaaaaagtaataaagaaagatattatttnnnnnnnnnnnnnnnnnnnnnnnnnnnnnnnnnnnnnnnnnnnnnnnnnnnnnnggtgaggatagatcatcaatncacgc

SEQ ID NO: 14640 - DNA, 630 bp, Oryza sativa
gatctgagctacatgctatctctactatcttaagggaagttaaaacagcaccttttagatacgatgaaaccttttctggcatgacctcgaaccatcgtgactatgatgggacagaggaagatgaatggggtttttatgactttgaacattcaaacgattcggtggtacagttggttgtttcaagactgaaggaacatgttgctatggaggtcagttcttctgggtgttcagtattcccataaaaagttatatctatttcacttacagcttaacacgtaacaactaacaatatatccctctcttatctgtttcacttacagcttaacaagatagatgctaggattatgcgaatttcagccgtgattgagcagctgaaactcaagcttgggcctgcttctgtccttgattaccgaacaattatccttccccttttgaaatcattcttgcgagtatgtgtacactaatctctttactcattcaattgctttatacctccttgctttgttcatttcttaatccgggttattgtgtgacgattcagacccatttggaagagctggtggacaaggatgctagggagagatctgatgctgcaagtgaagccttcctggctgaacttgctttggatgc

SEQ ID NO: 14641 - DNA, 1469 bp, Oryza sativa
ggtaccccaatcttctccccaagaggattattttctttctagcaccctgcagaggacacaactgaccccagatgagctgctcaactatcgctttgagggtctaccatcatcatcatcatcaccatcgtcatcatcatcgtcgtcatcttcatcgtcgccacccgacctcttcctcttcgacgaggattgcgccttcgcggaatcatcatcgccatcatcgtcctcatcaatctcttcatcctcggcaccctcaccgttttcatctggctcgaagtcactggaatgctcctcgtcctctgcatcaccaagtggcttgaccagatactcagttcctagctcctgcagaaatttcatcaaaagcgtgtcatgactgattgaggtgaacgatattcggatattaagatgcatggtgaatctttaagcttaaattgccttcaaggcaaactctaatttgactaaacatgagaatagaaacaactttgggatcagactgacgtgcaaattttcatcattctgaaaataaatccataaaggatatctgagatgaattgttcatcatttcccaaacatgatagattcaataaggtcagtggaagatgagcaatcagggcctacttgtatgacaataccttgggaaacagacctagattcagcaaggttacacaggtacataaacagcaaaagactagatggaatatggattcaatgtccatgctaagcttattttgtcttccgtgataagttctgacccgcaatactttcagaaatagggaataggaatcttcctcagaaagcagtgaaatatcactagatctccaaagaactgcggaggaacaaatcagaccaggttgtcctctcagatctactgagaatgggatcggactgacgtgcaaggtttaatcacaggcagaagagatctaccctcagaaacaacctctggaataagtttttcgtcatatccctaaaataggagctaagcctttcagtagatgctctcaattctcgagcacatattcgaaagcatcagatagcaacgccatcttaatttgaccaaaaaaaactaggcagatcttttaagggagaaaatgcaaataaagaaagagaattggatcagaacggcaaatcagttcttttgcagcactgggtgagctcaaggctcatcctcagaaacagcctctgatataaatcatcatctccaaaagaacatgaacaaagcaaaaacaaaatccaaaatccaattactttataggtcaacaaactggtaccactcccccctcagatctaaaataggttctacttgcaaacagcaatctacgaagtggttttggatcagaacggcaaatcagttctttgcagcactgggagagccattggcccgtcctcagaaacagcttctgatacaaatcatcatctccaaaaacaaaatcctacactaatctttcacagatctagccttccaccataggaaa

SEQ ID NO: 14642 - DNA, 2459 bp, Oryza sativa
atgccctttggacttattattattgggggaggagatgggcctctgatgggctacaccacagaccacacaaacagcaggtggataagactagactagaaaagtagaaaacctaacatgtcctcataggaaattaccacatcagcgcaaaagtactgggaaaggataaacggtatggcagagaacaatcacccagatctacagaaaatacggaaacagggttttcgtacctctttttttttgccaaaaaaactgaacctttttactccaagatctatattttttttgcccaaaaaaggcttctttattcccagatctatagtttcctgagtggtaaaaacaactcacaaaaacaaaattaagttttgaccgtctacagaaatcgatatgcaaaaaaaaaaaaaaaaaaacgacctcagacttgcaaaaatctcgaccttctagaaaggttttttgagaggaaaagtcttcaaaactaagctgatacatctactgatgtgagagaacgctattgtattcaaaactaagcagatacatctactggagtattttagggacaaaggtgctgaacagatctgagaatagaactacttttccagatttgtgcaagagaaaattagcaagaaaacgcgcaggaagctgaagaatttcatactaatcgtaacagtagagcataaagatagatctatcagggcaggcaggaagaacacatgaacaaagcatactagcatatattcgagggatcaaggcgtgaaaaaaaattatacctcctgctcgtcgccctcgacttcctcctcttcctcttcgtcatcgtcgtcgtcgtcgtcatcatcatcgtcgtcgtcatcgtcgtcgccgccatccccctcctcgccgtcctcctcatcctcctcgtcggagatctctacgacggtgtgccccgccgcgcccttctccccctcctcggcgtcctcctcctcgtcgtccccctcctcctctccatccccctcctcgtcgccgtcgccctcttccccatctaccgcctcctcctcgacctcctcctccccgttcaccacctcttcctcctccaccgccgcctcctccgccttcttggccgccgccgctgcagcagcagcggccttcttccgggcaagctccgccgcccgctcgtccccctcctccacctcgaccgccggcttcatctcaagaagcgaatcaaaaaaaatcaagaagaagaaagaaatctctccctttgctttggtttggtgctgtggcggcggaaaaatcaggggaaaatttggggcgaatttgtaagcggcgcggggaagaacagggggcggggcggggcggatgcctgcggggagatcctggccgtccgagacaagaacagtcacgcggatcgatgacgtggcggacgatcggacggctgcgggggatcggttcgtgccttcgtggagggggaggactccggagtccggagacggggtaggaggagaacgctagggctgacgtcagcgtgagggagattcttttttcccaagaaaataaaaaaaaactctggattcacgctctcttctaaattctgattatagtaaaataaggccctgtttctttgagggactttaagaagaagtccccccacttaagtccctaaaagtccctagagaaacaaacaggagggactaaaaagtccctaatagggtattttccagaagtcccaaatggaggtgcttattgggaatatggtcattgtgcagtgcatttaatgaacttaagtcccttttagtccctataaccaaacagccatgaacttaattgattagtcctaagactaaaataagtccctaggacttatggatccaaacaccacctaaaatcagttggtatacattaagatttagatttatcgcccaaaaataacctgttgcatttttttatttactttcttagaatgtaaacatcccggcaaatgacctcatggtctaccaaaaatatttctcctaattaaacttctctttaaacaagaatttttaaagatagaattgtacagagttttctaaaatacatgtgtgtgtgtgtatatatatatatataggacactcatatggggcaccatggtgcccgggcaccatggtttcaaatgcacaaaatcacttaaatttttcaaaattttcaaattgtgagtatatacctagttataagaattcgattcatacctatacctatcaacaaaacaactcaaatttaactttatttcacaatccatgattacatacctaactaattatatgtatgcatgctatatacctagaatcaaaatctaacaaaaacaagttcaaattcagttcaaacttgctttcaactagttagtaaagtagttaatattaatacctaaataattgaaaaagtttcatgctcatttgaattgggtatatactcaatttcaacaatgatgcccggacaccatatagcaccaaacaaat

SEQ ID NO: 14643 - DNA, 5858 bp, Oryza sativa
actcttttacccattggcatagtataactttcttgcttctaacacatacggctgccgctatttcggagtcatcatcatcatcatcatccgatccatatatgtaacgacagacatgattaacctttctaaagttcttcctggcttctgcgaatctctgttcatgcaaggttaccttctgtgcaagatgtgacaaactatcaaagtcttgagacgagaacttctccctgatcggagctatcatacccttaaaagccaaatcggctaattaggcatcagttaaactcaagctgtagcatttattcctcatctctctgaacctctaaatgtactcatgcacaggctcatcatgcctttgcttaatcgctgttaaatcggacagtttcatctcatgaatcccactatagaaatagctgtgaaaatgcttctccaaatcggcccaactgttgattgatccacatggcaaagaagaaaaccaagtgaaagccgatccagacaaagacaatggaaacaacctaaccctcaaggcatccacagccgatgcttcgctacactgagctaaaaaccggctaacgtgttcataggttgaaacgctatcttgccctgagaactttgaaaagtctggaatcttgaatcggttaggcaaaggaactctctcaaaccacttggggtaaggatgccgatacaaatttctagcatctttcggcttaagcccgaactgttctctcattacatctgcgatcatattggcccatggtcgttgttgaggcgctccttgtacttgttgtggcacgggctcaaattgattgtattgtggaacaaactggggttgagctggtcctcctcgctgatattgaacttgtggtgatggagactgatactgataattcaaattgcccaattctaaaaattcggttgtatattacgcaccaagtgttctggaacaacgtgaggtactaccatttgacctggttgcacattatgaaccaaatgctctgggacaacttgatttgcggtgtgctgccttagctgattgtcaggtgttgacatttgtggataagttttaaatacttgtgcagtagctccccacgccgcctgcacccgccggccgccggcttccgcccgtgcagttgctccccacaccgcctgcgcccgccggccgccgcccgtgcagctgctcccccgccgccgcccatggatattggagaagagaggagagagaaagagaggtggtgaggggagagaagaagaggctgacacgtggggctcacgtgggtcccacgctgagtcagctgccacataggacaaaaccagagtcaaaaccgtcgagggatatagtttgcatggttttgtaagttgagggacacatcatatccggttttacggttgaaggacgattttataactcgaccttcggtgtactttttccccatgagagtattagataagcggcttgcgttggtaaataatacgctcagtgagcccattaatactttacatgtcgatagcccatcaaagaacaatccacttgatctcggacttgcagcaacccaaagcctccttatgcaatatacttataggaaaaagtttcggtccctcaacttgtcatcgagttacaaaatcgttctcgaactgcaaaactggaaacaactcccccaacttacaaaaccaatgcaaactagatccctcgacagttttgactccggttttgttctatgtggcagctgattcagtgtggaacccacgtgggtcttacatgtcagcctcttcttccactccacctctcttcctctctccttttcttttctctcaggtctcagtagtgtagccagcgggtgggggaggcgggagtctagtggcggcagcggcgacgggagacgaggtggcattgaggcgacgacgacgcggcgtcgatgacgagcaggagggcttccctccacgccaccgcctctgccgccgccgacgggtgcgggaccagcacacggtggcgagggaccggcacaccgcggctacaagcacgactggcacactgtcacatcctgattttcgtttcaggatttataaattatttaataaattattaatagaatttatattaaatgatctttaattttcaagtgaagtaaaatgtgggaaataaaatttcttaaatctaaagcatggatggatttaatttttttgttaaattctccatggttaagtcaattctctgaaattttctcggatttttcagagctcaattcttaaataatacaaagaacagttcagtaattatttgatcattaatgatctaagtataattgttaagagcttttcttgtttaaaaatccttaacttataaattgttgtttaaaaggaattattagaaatgattttaaaagcctaaaagagaagatctaattttaatttgctaaatctcaatataaaaaggggccagataaaatttcattaaatactttgcttaattctataattcctagatttttctgggatttatttgagctaaggaagtatttttaataaatggaattgcatttaagaaacaatttaattgaaaaaggttttaaaaagtcttcttttggctttgggccgaaagtcggcccaaaacctctctctctctttccctcggcccagccggcccagtccgccgagccgccgctctcctctctctctcagccgctgacaggtgggccccacttgtcggtttcgtcttcctcctttggccgccgccgcccgcgaaccctagcgcaagccgccgccgtctccttccaaattcggccgcgtctttccttatccggccgaatcgtttgagggaaaatgatcctcgggatctcctctaccttttcttctttggaagcttcgcctaaatcggtttggaaacttgtggattcgatctcgaatcggattcatctctctcctccaactccgaagtttccttcgccgtctccgtcgccgtgggccttcgccgccgcctccttgcacctatttaaggacccccgagctctcctctacccgtcgccaccctcgccttcgcctctcgtcgtcggaagagctctagcgccgtgtgccctagcttcgccgtcgccgccgccgctccagccgtgcgccgccgtcgtttcagccgtcgccgtcgctcgggaagaccgccgtcgggttcgcaaggtcgtcgccgtcctcgtccgccccttcgccgtcgccggagaccgccggagcttcatcgccgtcgtcaacccgaaggtttccgccgcttcctcctcgtcgccgtcgccgtccgttgcttctccgccgcttctttggtcaccggtgagttcgccgcgtcgcgctctacgtcctggtgctctccgttcgcgtcgccgcgccgtcgttcgccggcgagcatgcgagcccgagccgccgagccgccgccgccggtggtgacgtcatcgctgacgtcatcggagtcgtccgccgtgagccgccgtggacccgatcgatctcggccgtccgttttggattggttcgatctcgaccgtccgttcgcgtgaaccgtcgcccgtgcgcccggtccaccgtaaccctagccgctgacgcaataatccttcttttccttttcaaaaataattcattattgcgtcataattcaattaaaatccatataaaggttttaatccgatttaatctttaaaaattcataactaattcatcttaactcagtttaatgtgggtcaagttgcaaaagttgtataaaataaagatctacatattaaaattgtccataaattgaattaaatttatttaattctttttaaatgggctttaattagattaaatcttgtaaaattcataataaattcatatgaaatcagaatgaggccgttcaagtctcataattcatctaaaaatatgatctacatgtttgtttactttttatgtattgtttatttggtttttattagtcttttccttgttttgcgtgttagcttgtcgtttccgtcgttgcgaaggttcgcgagtgcgccggaagtattcaagaagattaattgaagaccgattattgcaaggcaagtcacacagatcctaaacacaatcctttgagcatgttgatcctatatttaaattctctatttatttcaactgtgcatttattttcgaatgtcactgggtggtgtgaacctatccctttgttatggcctgtttgcattgattactttaatccttgataccttgggttattataatttgactagttgagctttatatattggttcagctagatattagatgtgattgcttagccatgcttagaaacattagcacactattgggataacttatgattcattattattatgatggtttaatggtagctcacgatggtcaatcgtgattggttaattaatttcttgccaactaaaacttgataatggtgggttgtgagcacatggttttgagagtcgtgctcatgacaattaaggaccggttcgcgagctactgttgtgaaacattaaccgtgccaaccacaagccagcgtgggcaacggctttaccttttgtatagcatggttcattgcggagcaccagactgagaagtggcggaaataagcccacgggggtcgctggggagtccatgccttgttttataagggggtgattatgatccaggaatggtgcactgtggtgagttgtgttatgcagagggtattgtcacagcctctattcgggtactttccagtatcgcgacgcatggtagacatgatgttgaggctgtgtcttgtgggtacagtggtacacctctggccagagtaaaactattcgaatagccgtgcccgcggttatgggcgagttgagcaatgtttttcgtgattagtcccacacctctcaccataactatggatgttatacctgataataatttgcttagctcctggtttggagattagatctgtacagccgggtatggttgttcaggatggttgggcctgtgcagcatgggtgtgctgttcagtgttgattaaaatttctgattaattactccactatttttacttctcttaaatgttttgctaaatgctgcttttgcaaatgagccaatattacgccatcctttggtatccttgtacacttgcatatttgctgtgtggcttgctgagtatgtcatatgctcaccttgcaataatcaatcaacctcagttgaagaaaaaggatccagaaggagaagacgtttggcttataccccagttgagctgcctgtgggagtggagccggagcttcgctagattttattttccgctgcagttttcttcttggtgaggacttagtgcctcttaagtaagtatttatcgttttagttaatttgatgaatctgtatattaaattgtcaatttgtgtacctcggctgattcctggacgaggatttcatgcacaaataagttcggaaattactagtgaatttccgggcgtgacacacacggcgtcctcgatccgtctcgccgccatggaccgccgccgtgggcggtgggatctggcgctcgcgccgtcagcagtggcggttgtggcagcgtggggggaggccctcctgctccctcgtcatcgccactgccgcctcgtcgcccgtcgctaccgccgcctcgtgtgggctcacaggtaggctgctgtaggccttgaacgcgaacccgacgagcacgacagcgaggttgagatcaaacggcggccacggcgggtcctccccagccaaaccctccccagcggtgcactccaatctgggcttcacgacggactgcggccgtggcgcggtggagggcggaggccaccacagtgcctgcctccaccatgccgcccatcgccggccgcccaggttgtcgcgaccgagaaaattgccttttc

SEQ ID NO: 14644 - DNA, 1537 bp, Oryza sativa
ctatcaacttggttctaaattctgaagatcttactaataaatgtcggccttggtcgatcacctggacctatgtcaatttcttccaaatcgtcggccgacatgaaaccttctccttacttgtcatcgaaatcatctactgtgtccttggtgtagacgtttgaaccctccacgacgccctcaaaataatagcttgggctctccatcttcaattggttgtatatcagaatcggacacttttagaaaatctccatcccaaacttttctagataagcaatcaagaccatccgtctcccaaagagctaaatcggcactggcaacattgactgacctatcggctggcatgatttcaatcttgtcgcctagccactgaatcaagcattaatgcatggttgaaggaatagaacaattggcatgaatccaatcccttccaagcaacaagttgtaggaacccttcccatcaatgacaaagaatgttgtagggatagttttgctgccgattgtcagctctacattcaaaacccctttggtttctgatggattgccaccaaaatctttgagcaccatgtttgtcttaatgagatcctcagcatttctgcctagcttcctaaatgtagcataaggcatcaaattaactgcagccccaccatcgaccatcatcttagacatcagcttcccattgacatagccatttatatataatggtttaagatgccgattctctgtcccttccggcttctcgaagactgcttgttctggtgataaaatcaacttagccgattcttcttcaacttcatcgacatcggcttgcttgatcccaaattcagcaggcaacgtgaaaaccatgttaaccgatgcagtcacaacactttttcctttagccaatctctttgcttcatcggctgcggcttcatcggctgtaggaacttgattcttaacacgtcactcctgcttcagcttcgtcttctttagccgatgattgatttcttactcaacctcctgaaagcgctccctactcctcaacctttgaacccttcttcttattctttgtaaaaataccaaaaggacaccattgagtcttcccgtctttgttgtcttcttggtcacaatcttggttcatcgagcccaattgtcacgtcccaaaacgaccttaaaatataccctttaaattatgcctagaataattaaaatcctagtgaaagcctccaaaaattaaaatgtgcaaagttaaaagtcaaataaggcttggaggatttttgtatatttcctcaaagcctaaaatgtgtaaataaattttagtggaattttcagagcacaaataataattatcaagaaataaacaaagttaaaaaggttttataaaaagaaaaaccctaaaaatcctccttccctctctctcctctccccgcggcccactcggcctctccccgcgcgcgcgccgctgacaggcgggcccgatcgccaccctcgctgacgggtagggcccacccatcatccccttcctcccgccgcatgcgccgctccctccgcccgcgcctag

SEQ ID NO: 14645 - DNA, 2296 bp, Oryza sativa
caaatggccataacttggtcctttgaactcggaattggaccattcaagtctctaatttttccttaagaagtcaagaacccatttttgtgctttgttcctgcttgttatatgaagtttattagagtaaaagcctttttcttcccgttggtcgtgtagacactgcagcttcggaagatccactctacgtggaggtcgaagccgacgtttgggaaagcgagcaaggcaagtcacatcatccttgaacatattgaatcccagtttataaaattattttggtttaaattactgcattatcgctttatttaaattcccgcgttatcactgttttatttagccatgcctatttacctttgttatgaccttattatcattgctattggtattatcaccttgcttaccctagggaaataaaaccccaactagtgggtactctattcatggttccactagtatgaatttaggtagatgcttcgctgattaattaggcaacattaggtggtttcataaccttagactttgggaatgctcatatcatttggacattatggaatggttggactatgtggaaatggacatacacctccccctctattcaaaaccctcaaaatggttttaggctgggctcgaggtgcatggttttgatagtagcacctcggccaccataaggaccggtcttcgggcctctgttgcaaagcactaccgtacttccacatgtctagtgggtaaggcttagtttgtggctcagtctggtcataaacaaaggtacacggatggagatggacgaagtcgaggctcgatggacatctctaggacaaatgaaggctacacgagttgcggcccggtagtcgagatgtcatggcacaaggccggtgtcctgcaactaggggcttaacctttggtacctgtctcgggaattcccggcgtagccaaggttgggtcggactcttgtctatggctaggatgggttgggaaactatgttacgtattctgtccgtatcacgtgatggtatgtggcgcgtggttacacgtgaggaagacgtgttttgtgggtaaagatgtacacctttgatcaaagtataatctattcgaatagccgcgccctcggttgtaggcaagcctagcaatgtacccaagttagtgttttaaattcttaaaacctgcttaacaactaaaatgtggaatggttggcctgggttggcttgggacgagctgggacctgggtctggttgccagttcggtctgaatcatcgtaggccttgggttaaggcaggttcgtgcgggttcacggccttgattaataatattatgtagctctaggatcgtatttacaaaatggccctgagcaactaaaagtcttttaaatgttgtttactgcgaaccctaacccctttattataactcccttgtactcctttgcctttattctgcatccgtgggtgtgtcttgctgagtaatgtggttgtactcaatcttgctcaatttttccccaacccaaaagaggagttcctggaagatgaaggctttggtgtctagcttgtgcctgctgtcaagtgcctgtggtcgtcgccctagtcttccgctgttttccgtttatcttcgtgtgtgctaggccttcgccgcccatgtaataaattatctatttacacttccgcttgtaaaactctgaattgtatcaacttttggtgtaccttgcctcctgggacaaggaataatacacgcacgaatggaatgcccgttgggttaattccggtcgtgacaccaatctttgatgaacagaaactcttgcttgccttagccgattgcttctattatacgatcggcttgaacttcctgcaacattattgcacccaggacagtcctcaatagatggcagcctcataccttcattctagcaaaatctaaagaactcatagccccaatgaggatcaaaaccgccatcatcttcttcataatgcctctcctgctgtttgttacacttcttctgatacttattgataatttaatccgaattcacctgaaaacctcttgcacgacccccatcggctgtttggccagctgtatgcaccatattgacaggaaaaggattaccatcaaccttcatcggcctcttagaatcatcaaatttgattttgcctccctcaatagctgcctggatttgctgcctgaagaccttgcaatcattggtagaataagacccagaattatgccacttgcaataccttctcttgcccaattcttcagccgatgggattgtatgaccagcaggaagttgaatctgtttctctcgaagtagcaa

SEQ ID NO: 14646 - DNA, 4948 bp, Oryza sativa
ttatattgtgggacggagggagtatgagtgtttttaattttttttataactgtttggatggttttgaagcaagcgagggaacatgccatcgacggatcaaaatagtttccaaaaaataatagaaatggtcgttttaaatagagcgtagaaaaaacacaaaaatcagaagagatagattgattaaaacaatatctaagtggttgaagctcaggttagaatttttcaaaaattgcatggttttcagctaatccaaaggaaattcatatgatttttttatagttattcttttgatttcaaatgaccacataacaaaatgttttataagactaaattcctctaaaatttctctaaagaatcctaatttgttcgaaaccctttcgtttggaattaatggagggaatagaacccaataagcaaatcccaacaattaactgacaagtactagagacagacagtcaccaagcagcaagatctgttttatctctgcaagtctgggccggattttggtgggaccttgccatgtcgatgcatgcgcaccctttgcgtcattctcttgagttgatcagagcgtgcacgatggattaatcagagcatcacaatcagccactaacactgctactagcaggctctagttgctacggcaaactactcgccatttcattttcagtgctgattgagaagagcgattgccacgaacgtggaagaggaaaacatgatatgcattttccaaaggagaaaagggcagttgtttgccaaaagcaaaattatttgtgaaaagtgtgctggcaaatacacccactaattaaagttatttgatttggcacaagcaagagtgtgcatgcaaattaatacactagtacattccagatatacatttttaacaaaattgcggatatatatttttttgaatgaaggatttaattttaattcaccaccagtgtttgtaactttaattccgtagaataaatagaaatgtagtatcatgtaaatattttaaacaacaaattttgcgatgcaaagtacattttcagaaaaaaaaaactactgcaaattaattagcactaactaaaaaaaagagatttggagggagagacgtccctccaagaatttttttaacaagaaattgtgagcgtattgagattgaacacgggatcttggggttggaaccacacacttcttgtcactgtactatcaagtgcatctcaattagcgctaattaatacaaagcgtgctgagatagtgagatgtatgagaacaaactccctaatatagtaaataaaacaaaatatttaatgtttagaaaaaaatatcagaataacattatatgatagtgtaattttcaaggcacacgcatacttatttttctcaaataggctttttgagaaataactgtgatgcatggtccatgttttagaaattaaaatatattttgtgtgcttaaaaattagtactagatatttagtatgaccaaaaaagaatgttctagtattaattaattatgagataattcagcgaaggaacggccagctactagttggttggaaaaaaacactgcctctattaaaaatgtggatcagaacatgtctagatttcttatattgggtttgttcaaattcgctatactaaaaaaatattgaattatgtattaaggacacaatactaaaatattttaggacgaatgacgcatcgttttgtcatgcatcgttcagactttgaaacaaggcaccttaacgttacgccaaccacacatagttcctggaagtcctgagactttttcttttttcttgtttctcttattttcaggggaaaagacctgaactgtttgggctaagttacgttactgtgctgttccgttttagatagacaatgtagaagcacagtagcaaaaaaaaaaaaaaaaagagagtaacggcgtgttcgatcggtcgtccggtctgtgtcgatcgagcaaaatcctgaaacggtaggcgatcgattttggtgtgcacgcgcacacaccatcgtcacagattttggagaggagtatgggtggaaggtggaaggtggaaggtgtaaggtgcatgtgactcacataggtggtcgatgacgaggcggccgtcgcagaggcggcccgtggcgcggcggaagaaggcgcgcccctcggggagcgggaagtagtaccccatcccggccgcgatgccgcccgtgtccgtgttcgagtcgccgaacgcgaacaccaccggccgccgcgcgcacgacgccgacggcgacggcgacggcgacggctggtctccgccgtcgtcgctgatttctccggcagccaccgccaccgccatcatcactgctactactgccaccaccgcaacgacgacgccgctactagctgccatattgttgcctagctcgatcgatcacgtacgcgtgcaagtggtggctggacactagctggtaatagctgctttgcttacgcacgatctcgactagctggatgagacaaattaaccgagatgatagctaagcaaagatcgagcagcctggacctggagaaggcaggagccgaggagctagcatatatagcgaagacggggagtgggcgggccccgcacaacaacacgcgctcgcgcacgaactgggatcctcatcatctcgcgatcaaatgatcccaacaccaaggcggtggggcaagctgcagcaattttcacgtgaatttcgtcgcggttttgcgataaatacaacttacagttttagcaagtttctcgctattcatacttagcatattgcctatactttgcaagaatttaaaaagagtaaatatcacaaaaccccagattttggggcacatctatcacaaaaccacatcatgttaactaatttttatcacaaaaccccactctttcttggggcatattgttgcatgccacccatattccgttgctctcctcttgtgcgccgttttgttcgccgttttccgctcatgtcgccgtttccaagattacgctcatgattccacgacgaggacatccatacttaaagcgggaatcccctctgcatcatcactaggcgtgaagaattggcgccaacctaggccatctcctgctacttctctgccctagacaacaacatagtacataacttgatcgatacacaacgaaggatcaaggagacccatggaggaaggagattagccttgttctgaactttgtagtaggtaggattgcttttcccccacttatttattgcagatttggcttgctaaacgaaccttaattgtctatatggatgatgggtttgaagtttcccctttggttgctgaacctgtgataatcttagttggataagacaatattgcagcagattaatttttggctaaattgtgcttttagtcatcggtgattttcttgatatgataggatggaggatgacatttggacactgaatttgttctgtgatggtgctttaaatggcccgatgcatgtgcagaaaaatatggatagaaatatcatttgctacttcaatttggttggactgatcgttgacattggctacttagattgtgattttatctacttcctctatttcataatgtaagtcattctagatttttttacatacatatggatgttagtgaatctagatatatatgtgtctagattcgctaacatccatatggatgtggaaaatgctagaatgactttgtcggtgatatgggaccgggagtatcatgaccagaggcttgaggcagacgcaatcgcccacgtggcctggcaccttcgggaacgtcgggcccgagggtgaggtgtccgccctcctcctgatttcccccgagggggggtcgggttgcgcttgccccggccccgagggccgaggcaccccgaccccttaaggaagtctgcgccacatatatgggataagtgagcacagctgtgctcacctaacagcatttattgcagtctggtcaagcgtgtcacgctgcatgcaacgcagtacagcgcgttcctttatccggtctgtgaccagtcacagaccggtcagatcacgggttaggtggcggctggcggtctcacgcacgccttgccccatcccgtcaagacgaaagcctctaggcactcgtctcaagccggagctagggtgttatctcttagagatggcacgttagccctggtcagatttacaccaggcttcatcctacccattacaggcaaggtgttacacgaagaagggcaaacatgcacgttgttaagctgacgcgtggtggacaagaatgaccggtctggcactggtcgggtcatcgacagacagccacggtcccgcgtcatctctgtcttcgggggaggtgggggtaggtgtgggctgtcccatcagaagggctcccggatggaaacccgtaccgatctccgcccattaaagagaaaaagaacagtccagtttggaaagagaaaggggcatgtggtatccccttgagatataaaaggaggaccttgcccatttagagggggacttttcccttttggaaggctgagaggaaagggagttaatcctttgtaacttgtccatacacaaatccacaaaaacacaggagtagggtattacgcttcgcagcggcccgaacctgtatacatcgtccgtgtcttgcgtttcttccggggacgcgatctttccacatacagagagagcttgagatctcaccctaagcccccggccgaaccggcaaaggggggcctgcgcggtctcccggtgaggagccacgagctccgtcatctggcgcgccaggtagggggctcagtgtgtgttttctgagctgtcacgtcctgataaattcatcccgaattaaaaatcattctctaaaaggaataatagaattaattaaaattcgaaaagaaattggcaaacactaaaatacgtgcaagaaaaattcaaatgtggcccggagaatttttgttaaattctccttggtctaaaaagagccctc

SEQ ID NO: 14647 - DNA, 558 bp, Oryza sativa
atcaaggctggcctacgaatatgggtctacaggtttggttcttgcatactagtttgccttaagaatttgatcaagatattatgttatgctacaaactacattatctataagggacaattgcccttatatctcattttttcttcatcatgctttcaaaaaagtttgtttcatttccctgcctttgactgtcatgagttggtttagtgattttttaagtgccactcaagtagactcatacttacattcaggacctgcttttacttatgctcactaaattctgtataatttcgaattcatcaaagtcatcacaaaatttgggaccaacacgagggaattatcaatttgattttacagtggagacgtggatggcagggttccagttattggatcccggtactgcgtaaaagcccttggccttcctgttaagtcacagtggcaaccatggtacctaaacaatcaggttgttaccctattacatattccgtgtcatctacgtgtattaatcaaaataaagtgtaaaattatgaattacaatttgtaatattgcacaatttcttc

SEQ ID NO: 14648 - DNA, 3537 bp, Oryza sativa
tgtggcaaggccaaggagttgctcaacaggatggtcgccttcgttaacgtcaccggcgcgtgatctccgagttcgtggccacgcgccattgtttgcttttgggtgtgcgaaaaattttcctactttgatttgatgaactctgctatgttgtgattgaataaatgagacaatgagtgatttttatggttgttgactctgtatgtgttaatggaatgcacgaatttccaacatcttcatatgagaaaattttgagctgcaagcctgcaagcctgcaaatctttggaggagaatgagagtgacagggcacattcacgatggagatgatgatgcggttgttggaggagaatgagagtgacatggcgcagccgcaggtcggcgacgtcggcgacgccaccgactctggcacggaggtggccaagagcccggtgtccatggcgagctcgcacctcagcatgttgccatcttacccgggaagaggggagagagaggagagataggagagttgacatgtgggcccaagggcatttttgacatttcacgcgatttctctttcctccccacctggaaattattattttaatgggtgcggtgtccaccagcaaatatccaacttttgagagtgtcttcccctaaaagtcacttcgcgcggtgtcccacagctaaaaccacgaagtcaagatgtcctatagcaaaatttgccattgctttttgttcttggtgctgagttgctgcagagaatagttaacaaagcttgcttcttaggtctgttgaccaagccaattaatgaacttgatgagaggggtttcccagtaatacagtatgctgatgacattttaattcttctcaaagcatcacagagagaggtgttctgtttcaaggcattgttgaattcttttgcacattctactggcctcaaagtgaattaccataagtcctatctctacccaatcaatttatctcatgagaatgcagtgctttttgcaccataggcacaatccttttacttatttgggtttgcccatggggacaactaggccaagggtagtggactttgcacccttggtagacagggtagagaggagattaacagcaagctcacaatttctgccacaaggtgggagactcacattgataaactctgtgctttcctcaatcccaacatactacatgtgttctttgcagctgcctgtttcagtggttaaagctattgacactgcaaggaaaaatgcctttggaggggaaacaacccaacttcaactagaagatctcttgcttcttgggatctagtgtgcagaccaaaggataaaggtggactaggagtcatcaatctaagagttcagaatatagcacttctgcttaagcatctagtcaaattttacaaagggcatgatctgccatgggttcaactgatatggaactcttattataactccaaagtgccacatttagtttggaataaaggatctttttggtggagggatatagtggctctatctgatgtctttaggggaatctcaaactgccatatcaggactggatcttcagctcttttctgggatgacatttggaatgataagataagaagcaatgcttttccatctttatatatggttgctttagataaaactatctctgttaagcaaatgggttctactcctcttgaggattgtttcttactgccattgagcaccccaagcttatggagaattcaatgttctagaggaggaatggtcctctctctctttgcagaacggtaatggtgatgaatggtctttcatctggaactctgataaatacatagctaagaggttttataagctcacatactcaaatgtgcatgtgccaaggccttttgtctggatctggaaaacaaaatgtgtaatgaaaataaaagtttttgcttggcttttatttagggacagacttaacacaagagatatgttggatagacgagattgtgcaaaggaaaacgatgacctcacttgttaattatgcttgaataatatcagagagacaagagagcatctctttttcttctgcccgttcattcaacattactggcagcatttgagaattgcatggaatcctgacctagaatttttccagatggcggttttggctcgcattcagttcaatcagagaggtttcttggaaattttcttcattgctgcttggcacatttggaagcaaaggaatgggaaaatctttcgaatgagcttcgctcgttcagttcctggaggactttattcaaagccgatgttcttctgcatttgtgcagaatgaagaatccactaaaacagattgtttttgattggttacaaacagtgtaatcctttgatcttttgtttcccttttgttctcttgtaatttgtaaataactttttttatttataaaattacactgcgaggcaaagtcctggcagtatttccagtcaaaaaaaatcatatataactaacatatgcatgttttaaaatatttttagattgtaataaacatatgtagttacctcatgctagatttaaaactgttttaaattctaataaacaaatgtaattaccacatgcattatttaaaattgttttaaattctaataatcatatttaactaacatatgcatgatttaaaattgttaaaaactctaataatcatatataactagcatatgcatgatttaaaattgttttaaattgtaataaacatatgtaattaccacatgcatgatttaaaattgttttaaattataataatcatatataactaacagatgcatgatttgcaattgttaaaaattctaataatcatacataattaacataagccatacaacaattgaattatatgaatattcaatacatccaaaacaatttacatcgtctacacaacaattagggcaatacatcggcggtgacggttaaccgcacgtactttctcctcactactgttccttccttgtgatcgctgcgtgagtaaggaatgtcttcgtttgataggaggatgctagggtcaaccgtcatcgcgaaaggaggttgcccctcaaactgatcataatcctcgacagtcttatcctcgactccgacgatttttcttttgcctaggagaaccacgtggcgcttttgctcatcgggccctttccccttctttcctttgctagacatgtccttcacgtaaaaaacttgtgttacatcattggcaaggacaaaaggttcgtccgagtattcaaccttgttaaggacaaccggtgtcatcccactgacatcaatcggtacgccttcactagtttgcctaacccattggcactagaacagagggacctatagaggtgcatagttaagttcccatatgtcctcaatggcaccgtaatacatgccaattgtaccatcgtgtctcatggcattgatacgaacatcactatttttgttcgtgctctttatgtcttgggctctcgtgtagaatatgtacccattgatctcatattcttggaatgtcttgatcgagccagataagcccctctgcaagaaagccagttattggttaat

SEQ ID NO: 14649 - DNA, 539 bp, Oryza sativa
gatttgtccagatgtgaactcttacacagtgtttattaatgggcatatacgacatggtagacctgaggaggcatgtaaatacattgaagagatgatccaaaaagggatgaagactccacagatagactacaataagtttgctgcagatttctccaaggctgggaagcctgacatattgtatgaattggctcagaaggtgaagtttacaggtaaatttgatgcgtctaatgtgttccaccagtgggcagagagaatgaaaaaacgtgtcaagaggaatgtccctaatcagactgagagcaggacgttctaagattaccatttgccagcagaaatgtggatctctttgatggtggctgaaatttgaggtgttgctcctgctttttaggagaaaggtgctagttgttttctgtgttgtatagtaatggtccatgaaatattagtgtgttttcatgtgtgaacaaaatgattcagttaattatgatgtagcctatggtagttttattttagttcagtcatgtgttacgctaaatcttcattca

SEQ ID NO: 14650 - DNA, 1256 bp, Oryza sativa
gcgctttccatccctcacgatgtgcatcttcttgtttgaagggtcttttatgtagaatatctgctcaacttgtttcggaagtacaaatggttcatcagtgtatcccacctttgatagatctactaaagtgaaacctttcttgtcggctttgacaccagtgcgtagattcacccaacggcaacggaacaaaggaaccttgaacttgacgtagtttagctcccagatctcctcaatgcggccgtagtatgtgtttgacccaacttgatcctggaatgcatctatacggacaccgctgttttgcactgtgcttttgtcatcttgtttgacggtgtaaaatgtgtatccatttatatcgtatccttgccatgtgtctacggtccaagacggtcccatccccaacaactgtactgtctcatttgggacatctgtggacattgtcacatgattcttgaaccattcgttgaaccgagaattatgttctctgttaatccatgcatcagatcgccccaagttctcatctcggattttcgctaagtgctcctcaaagtatgggccaacttctgccatatgttggagtacagcgtaatgagcctgcgcgtacgacgcttgatcgggcctaattcttttcctttcgattgtgccaacacctgacaaccttccctcgtgacgagacgcaggaactccgataggatcggcatcggacatgtaattgacacagaactcaatagcctcctcggtcgtgtaaccttcaatgatgctcccctcgggtttagctctgttacgaacgtacgactttaaaactcccatgtacctttcaaacggccacatttcccttagaaaggccaggccacatagttttgttagcttcaccagatgaacagggacatgaaccattatatcaaagaaagatagtgggaaaaacatctccaggtgacaaagggtattcacaatatcggtcggtctacaacccatctagatcttctggatctataaccttctgtccaattgcattgaaggaggcgcacagacgttggatcgtgtgacgcactttcggtggtataatgcctctgatagcaactggcaagatttgtgtgattagcacgtggcaatcgtgagacttcattccaacaagttttagatcatccaatttaacatacttacttatcctcgctgaatagcccgatggaactttaatatccttcaagcatgataacattgcaatcttctcatccttcgacaatgtgtggcaagctgga

SEQ ID NO: 14651 - DNA, 4726 bp, Oryza sativa
ctggtcacctatttgttgcttcaccgggaagtcttttttgtggatgagggtgtcatgtcctgtcttcctgaggcctcctctttgcacgtattgggcccatgcttcatctatcgctagttgaattggggtccaatcatatgcgttcttatcaattctggagtttaggtagtgacatgtactccacttaggtgttatgaccagaaggatccaatgggcactgcggcattaatatagtgaaagttaattaagtactgaaggaatgtgtcatgctattgtgtatatttagataacacacttactattgattataggcgcacataatgtactccttgtctcggcgggaccacaaggtgtcgtagatgtagttgaccattccttgacggtcattctggagatttgtgacagtgaccacttgtggatcaaggaaggcaagttctggtgcattcttctgataccattgccaacttaacctacacacaggataaacgatcttgtaagcgagttaatccgattgttattaccagattgagttgggcgacaatacttacaaggagtagcacttaaggaggcttgtgtcaaccgctcggagcctgtagaggtcgaatagatccttgaagtcgacgacgatataatttgttggaccaaggaatggctttccatcgtgctctccaaggatattggtagctttattcggcttcctggcgttagatttctccatgtagtatgcgtgaaggtccttgcaagcggtgcccattgcggcaagcacgtcatctccaaccaatggcatgcctagttggaactcctgtggagtgacgtattttttcttgacctctttgcccttagtctcttcctggccctttcccagatctagcttccttggagctagaagcgaggactgcacctttcctccccttcctctcccctttgcttcgggtttatcgagagtaattctctgaggggaagagtgtgccttcctgctcttcttcatcggtgtgggttcatgaatcgccttgctgtcggcctccgttcggtcctccccaaaatccgtgtcgtactgcaattgcacatcgtaagattgtgcatgacgatcttgagcaggaggggctgaaggagcagaggcgggtctctttggtggacgaccgcctggtgcagtggttggcctcgctgtaatcttgatctcaatgaggtctttgggccattggatgaaggtaccacgggcatttcctagtgagaggacctcgtcattcggtggatactttagtgggaatagctcatattccggcttcatcgagtcgacttgaacttttgcacagtcacccctgagttgcgctccatgcactcttgtctctggggtcggcttgtacgcaagtccctcggctgctggaaccgtgaaggtcggcatcaccctaactgtgagggtgcagctcgttggttcctgcgatagattaatcaattcttttagaatattatatatcatatggactcgttaagtctttcatgcattgtggacgaaacttttaccgttatgtggtcgacggcgctgtcgaccgatgttggattttccgccacctcagttgatgcgcaactgctgcgtttttgggtgggacttcctaactcttcgtgcgcagcagcagtggcagcctgggggttctgttgctcttctcggatctcttgcctaatcttggccctcatcgactcgagcttttcgtcgaattcagatgtcagctcagctcttatcgacgcccggatcttggcttcaaggcgtgcatctttctccgccttgttggaagtccgcttcttgtactgccacgcgtagtctggaaatccatacttccagggaacagaagacccaacgccccgtgtccgtccacggtgttccttgttgcccaatgctttcgtgaggaggtcgtcctcacgtctttgagagcaggcctcttgcgaggcttgttgctcggcaactaactccttctgcattacaatttagtggggttaaataaactgcacgatgggaaacaatgcaaacatctagtttgactagacacttactatagcttcgtatactcgttgatcttctgcatttggcatgaagattgtgccatcatcattcttctagtacctggccctggcccagttcctagcccaagggtgtgggatatcaccaaacacgagcggtgtgcacgattcctccgcttcttcatcctcacgctgccattcctcttccttaccggcatatccggcggtgccaagccggtgcggatgctggtttctggtctggagcaagcgatatgcctcgcttctagctctggactcgggggtcgacttcttcgcatggaattcctcccagacctgttccgtgatccaaggaaatttctctcttggatctggattcgccgggttgtagacgaactcgccgactagcttagtcttgaagttcttccaagcattgcccataaccttgaaagcagcgcgcctgagacagtcctcatgctccgcaggataatcaaagctctccttgaacgttagccaaacaatgtccttctctacggccggcacgagcttgatgtcatcttgcagaatactgaatttctgcctccctatgaccccgcagatagacctaaatcggctcaatattttccttggagatgtcggcaaccctacggcgtccaccgctgttatgcggaaccgttccttagggattttgttccctgtcctaggagtacgtgcccttgaggacccactagttgtcgtcgacattggttcgccttgctgagacatcgtctacttttttctaaataacgaaaatacactattcagtgcttcaatggctaagaatccaaagttctaaaatctattagtcacataaataaactaaattgcacatctcacagtaataaaatgaattgaatgtcacataaaaataaattaaattgcacatctcacataaataaacctaatgtcacatcacatctccttctaaatttcactaagtcccaagaatcctaataatcctaataattccacatatcatcaagtcctaaaatcatacattcaccacatttcatctattcatccgaccacatttcatctattcatccgaccacatttcatatattcatctattcatccacatgggcggcgcgatggaggactaacctgagcacggtgagaatggccggtgtggcttggtagcgggctcggtggaggcggcgcctggctcggtggagggcgtcgccggtcggtggaggcggcgctaggctcggtgcatgcggcggggtcggtggaggcgccgggctcggtggaggcggcggggtcggtggagggtgtcgccggcgaaggatgacgatggcagcgaaggaggagttggcggcggcggcgccgggctcggtggagggtggcgccggtcggtggagacgccggtcgggcagggcggcgccgggcgggcagcgtcgggctcggtgggggtcagcgacgtgcgtcggtgaggacgcgggaggtgacgacgaggaaggccgacgccggtcggtgtagaggctcggtggcggcggcggtgggctcagtggcggcggtggtgggggtcgtcggtgaggaggcggcgtcggtccgaatggagggcgacggctgcgggctcggtggcgacggcggcgggctcggcgatggaggatgacggcggcgctagggttctaaggaggcaggaaattgtagcgggacttagaaaaattttcgatccgatctgagaaaccctagttatagtagagtgatgagtcatctcaatcgggctttgccatagggcccgtcacaaatgactcatctgtgatgggctccatactaatgcccgattgagatgacattcaggcccgtcacggatgactcatttgtgacgggccctaagataatgcccgatagagatagattaatctctatcgggcttaaactaaggcccgtcaccgatgactatttttctatttttcccatcaagtctttatatttgtgagtgcaaaatatatagctgctatataataattcaatttattagtcaaaatatattttcggatagtaaatgatttcaaatcgaaatatggtcaacaacaaaattgtagagcttattaagatctacaacttttattttagtcatttgtctatataactttgttcccaacagcttgaaattgattttgaaaatatgacaaatctaaacagcatttgtaaatacaaaatgatttcaaatcgggcgttagtatagagcccgttacctatgagtcatctgtgacgggccctacggcaaagcccgattgagatagattaatctctatcggccgtaaactaaaggcccgtcaccgatgacttatcaagatctacaagttttattttggtcatttttctatataacttttttcccaacatcttgaaattgaatttgaatatatgacaaatataaacaacatttgtaaatactaaatgatttcaaatggaaatatggtcaacaacaaagttgatcctctcatcaggatctacaacttttcttttggtcatttgtaataaaacaaaattagccatattaatgactacacatatcaagtctttgcaataaaacaataaaacaaaatacttcattcattacaatagataagtacaaatgcatcggtcacaaggttatgccttccgtatgatctgaacgagcatatgccacatgctcttggggatcatcgtcaaggtcaatgtgaggtct

SEQ ID NO: 14652 - DNA, 704 bp, Oryza sativa
ctgcaagacaaagcaatgcacaagagaacagcgaaccagaaaaatataacggacaactcaaattgacaacaagcatgttattacagttacatacttacatatgtattatccatgtcaccaaaaaccataaacatttgaatattagttcaagtcagaaatttagccagtattgcagcatctattaccagcttatctatcagctatcactacaatttcggtcaaggacctatgttaccacttaccatcataaacaggtcataatcagcacatgctagttccagttatatgctttcattgagctacaacactatgatgcagacctcaccaaaacatccactagtaggtagtacataggaattgtaaaatggtactataaccgatatagatttcatacgaatggtggcaacttacttggatctttagttgtccgcactccagtaccgccaaagtcacaagctacatcgttagctccattttgctgataatagctgttgaaggcatatgaagcatgtgatgccaatgtatcaggctggtagcagggctgactcggttgaatagcagagcaatcaacattgcctggtccacatgcccaatttaaaccattctgtagatctgtctcagacgcattagcagaagcaacacaccaagtaccatttgcatttgtaatgtttcctccagtcatgatgtccacattgcctctgcca

SEQ ID NO: 14653 - DNA, 566 bp, Oryza sativa
ccttgaaatccgctcggcttcatctttgtcttgaaggggttctttgaaaagtcaaaaatcgtatgaggggctctcgccagtcggcttcaatcatagctacgtcatgagtgcccgcaatttgagcagtatctttgtgaggaccgtcgcgtataaaggtgttcgacgaaaacatcggaaggcgccacctcgcgcttggatccaaagttggcaagtctgtcggcggcttcattattgtgtcgaagaacatgacttagttcgagtccatcgaacttgtcttccaatttgcgtacctcttgtcgatatgccatcatattgtcatcaaggcaggaccactctttcataacctggttgactaccagctgtgaatcgcctctaactattagacgctttatccctagggaaattgcaatccgcagcccatgaaggagggcctcatactcggcgacgttgtgggacgccgaaaaatgtatccaaagtacatagcttaatctttctccagttggtgaaattagaaccactcctgctccagtgcccgaaagtctttttgacccgtcaaaatgcatggt

SEQ ID NO: 14654 - DNA, 570 bp, Oryza sativa
ttttagacggttaaattatacgtttctaacaaaaaaaaacttctgtctagaagttatttttagaaaatctaattattcgtcttttaattttataataattaaccatgtgctaacgagttttctcaatgtctatgttaataatatccattcaattgccttaaaccaacgggccttacaagcggaggattttttttgactttaccattcaattgccttaaaccaacgggccttacaagcggaggatttttttttcctaaagtcaattacatggaagacgtacacacacgaatcacacttatggtggtacgattgactgatcatctcgtctcctctgatgtgcaagtgaaggtggagacgcgggtggagaaaggggacccgagggatgtgatctgcggggcggtggaaaaagcccgcgcggacatggtggtgatggggagccatggttacagtttcctgcagaggacgctactggggagcgtcaacaaccactgcgtccaacacttcaagtgccccgtcgtcgtcgtcaataggcccggcaccaacgccaaagcctcttgatgcgccaactcc

SEQ ID NO: 14655 - DNA, 508 bp, Oryza sativa
atcgcaacttttcttgcccaaatctttgtcaattccatcgggctaattaacaatcgatgtcttgcacgaaaggaggaagatctgtctatgcaaattctccagccaaccgctgccaatagattatttcaagaatctaaacatgggccagaactgggccatgcaaagcctgctctcctagctaggttgggccggtctggctgtaaatgataggaataagttcactttgtgacccttaaaatgatcgaaatttaattcgtgaccccaaaccacagaaccggatatctcaacccctaactctcgaaaccggtgcaatttgactccctgggtggttttggatggcggcttccctgacgtggcccctacgtgacggttttaactcggtcttatttccacgtgacgttgacgtggcgcttacgaggtattagaaataaaaaaatatgtgcgagacccatttgtcatacacacggaaaaaaatgtgggagcccctgtcatgtggagcccacataat

SEQ ID NO: 14656 - DNA, 7908 bp, Oryza sativa
  unsure (1)..(7908): unsure at all n locations
ttcctctcccttcctgcacactataaggttgacagagacaaacgagagaagattgatctctgatctcgttctggattactccactctcggtttggtttactcccacactcattcttccatcgttggttcatctccttctgttcctgtgctgcttctgttctccccggtcatgatcgcttgcgtgcacgagtgattgggacgagcagggcctccggaaccacaccctcacctaagtatctgcacgggtaggcgggtgatcaggtttttggagagtgctcccgcacgactgctcttcatctgtttgtcgtcggcgtggacgtcttccgttccggttcgtcttcctctgcattgactacgccaacatgtcgaacaccggcaacgatatcaacactggagacaaggagaaggaggctcccgtcaacaccaacggaggcaatactacctcaaataccagcggagggccattctcatggtataatgtttcttctctagttgttgttgctgcactttacgtatgtgttgttgctgtttacgtttctgcagtttacgtttgtactgctgcagtttacgtatctataggacttcaatcctatgtgattgttgatactgtttatgcttattctatcctaagcatgctcctgcttacgttcagtactatcactagatcacctcacattgcaaatgtcatacttattgtctcaatattttggattaaaaataccgaattgtgaccatatttccaacagtgacgacgccacttctaggccacttttaaatgcttccatttggatgaggaggagaggatactgtggcaccaccaatagctccaactgtagcttctacccaagcaactatgtgccaaatgcaccccagtcaccaccaacatgcatgacgctctgaggggcggacaatataggttgatccttccaaacttgactataaggagacaacgtcttgaggtcgagtctaacatacataaggaatctaagataatttatgctctaaggaatgctaacttccccaaaggtagtttccctctctcttgagaagactaaacactatactacctaaaaagggacatgtttccgcgtgtgccacttcaaggggcctttactcagggatagccttgctctgctcttacctacccttgaacccgatcttgagtaggcgcttagtacaagtcctctttctagaaccggatcccaaagccaacccttagagcgggtacaatagcagctgatacacgggcgatatgcaagccatgtagacaggagtgatgcgttggcagaaaaaaggcatgagagagagggtgagccgacgactaaactgtcgcctggctgcacgcatgtttcgagaaaagtgggacccgagctcgcatgaaagcagtcggtgtagccattgtcagacgggtgtttcaataaattattgttgttgtgaaaggatggacagatggggttagtagcttgcttattgtatcgattagctactaaactaacttttgatgacatggagaatattgccgctagctgtgggcgttactattgatcttgctcttacaaaacatatgcatatcaaatcctagatttcgtaagctaggattggcaaaccgcatacctataaatcaagtcgagggatgagggggataaaaagacatgttttttatccgctcaacagcgatataatccagtgtttagtgacgccccctgtatcgaaacaaacccttcatctagttgacttgaaacccttcaactcaacttgacttcgcaatttgaaggacgtgggtcctaccacccttcctagtaagacctgagcttgctaggatgatttgngaaggggaggagtttgattcaagtaagggatggaagaaatgagtacacgcatacgcgtgtgcacacctacaccaatagaacaacatgcatgggcacactaaatataccacgtgtgcatacacatacccatgccaaagggggatggaagaaatgagtacacgcatacccgtgtgcacacctacaccaatagaacaacatgcatgggcacactaaatataccacgtgtgcatacacatacccatgccaaagggacgtgccttttcaagggctctgaataaaaccaatacatatcgttcaataccctttgctagcagcttgaataaaaccaatacatatcgttcaataccctttgctagcaggccagttgctagcttgactagacagtgccttgcgtgggttagtgttgataaataaggaaaaaaagaacatactttaagtaattgccctattttggtaatggcctcgttgagcctatcaaaatatatcttatcgaagaaagatcttatttagccattaaatgctttctggtattaatagataggagttaatttagaaagttaattaagaactaagagatagtgggatgtctgggctagctcatcctgagcatgggccaatggcccataggcccataactagcctagcctagggttttgccctagctatgtagtataaatagcctagacttatgattgccccacagcccccatatgtttccttgaagtgtgctagggtgagtcttcttccccactattatattcctcactatctctcacatatcccttctaattccaaatcttgctattatatgtagggaagaattttgtgtggcaggggttcaattccttaaaagcatagccccatagggaatctttgatttggtaagcttcctttgtgtatcaaggattccagtcttctaatgtcctttcttccctctccccaaagcatgcgggtggctcgcaagcgaaagcaattgcaaccatgctctccatgatccaacacagtaaatgattttcatgctaggtaaccataggggatgatccccttacccatgggatttgcggggctaaattccctattttatggccgtatatatccggttggatgtagaggtcgggtaaaaaatacccttctctaaaaaaaatgggattatccttgtagatttcagtttctttcctaataacaatagatcaacctgatggcttccatcttctatccggtgtccaaccgctgtggttcttttgtttctgagctgatctaaaactctaatcatgtacttcctataatttgcaggttacttggtttagctagtacagacctgtgaaatttaggttatatgttttcttggtttgaagtgtaatgacttttagctttcctataggtaggaatcgagactaattatatattaccgaggggattggccatcaggcttagtttatatatttataatcaacaaaacaagtgaattaacagatctacaagcaacatatacagattctatgcgatggtgtagctatatatttatgctggaacagtagtagataacttaggaaaatggatctttcagcaacaacatgtttcctctaggccaaatcatccttttcctccaggaagaagtagatctgtactagagaaaattgtgttagatatatctgttcgcatcaatgcttctagcttgctgataactagccttcgcattggctgttttccattctagggctcctttggaatgcaggaattaaaaaacacatgaacaggaaagacgtaggagcagcgatggcatatctagttgatccttaggaattctaaaatgcaggaattgtgtaaaacttgttgttttgatgctccatatatgggtaaagtataggatttttggagagatctcaaggaaagtttcccatggcattcaacctcatgttaaaaatccttcaaatttcccatgaatcaagccattccataggtattttctagaaatctcaagtgcccattcctttgttccaaatgagcatttaggtgaaatttccataggattttaatcctacaaaaaattcttccaaaggagcactaaatttctagttgattcgaggttgcctatacattaggaatattgtcagatgtttgaagctgtttgaagatatctagccatttagttccaaaagaagtgtgaaataatcgtcctataccactgatgcacaaatgcttttttgtggccacaagtttacactagctatttctccatgagagatgctatcatagtgcccagatgatcactttagtcatgggaacagtgaatctgcacctgatatttcatttttaaaaattggtttcacttttgaaatgcgataaacaaggaataactctttcactattgcatgcatgttgtcaggattcaacgaaggtgtgacggattacctggcaaatataaggtacaaagttttcaaacagctagcacaattatttctgtgtgagcaactttttttttgtacttttatgtgtatattttgctgtgttcttcatatatatgataataacaagagagagtattagtagtaccgctgtgatcacatcaaacaaataagttactcatcaccttattctgtttgtctccagggttcattttttaagatcacatcatagtactgtaagaatcatgcacaatgatcttctatcgttccatttacctttactagtcgaatacaacttgtccatatttgtattgaagtgtaatggtgtggaattgaaagctagctaggtttagtatatggatcagctgtccgtggaagcaatatttatacatatatatgatgatgggtctacattcaggtttgttaatctgtaactaattttttaggtattctcttgttcatgtacgaaaacattgtatacagacgttacaattctccttctctctttaatcagatagacgcatggtacggtgcaaggaataatacacttttcactcacataacatggttatatctttgttatatatatttaggtttaaaaaagaaaacacctttttatacataaagatgagatttccatagttggaatttttttctagatattgcagaataaaatgggcttgtgaaattgttgctcattgtattcttttggcctttagccaaattttctggaggcaatggacatcacatgtcattggcaaattgttcaccaattgtaaaacctgggggatgaaaaaaaaatcttttatgggcattttactttgaaatactatcctttcttctgcatatttttcttttgcaattaattagaactgatttaatcctttgcttaatttgtatttctgtgactttaatgtcataaatttctcaaaattaaagtgaacgtatttatcattctgatttgtttcaattgttcaaggttgggaaggtgtcgaaaatggaggaaaaatctagtgctatgtccaacattgcgcccgtcgcacctactcgtattactagatatgataaggatgacaagcataaaccagttatagtttgtgctctggctgctttacctattccttcacaaccacctaaggcttcacaagaacgtaacggcaacgtcgtacattttggacaaaatgtgcaacctgcaaggagaagaacaaattccccataacaaatcttgcatgtcaagttgtttgccctgcttgcacagaaacattcacagcaattgaggtagctagaccaaggaatacatctctctactgtaaagaaaaattggagtctagttcgtctgttgcggctaattcctccttgcagtctactgctgtaactcctattgctgatgtggcctatcacccttccaatatacaagggaagcgtaaagatggagaagtgaagattagtgaggcattccctaagcctgctgttgagaaacttttgcaagcaaggatgaaggagatcttagaaaagaagctcaacgataggcaagcaaaagatgaaggacagtaactgattgagaaaatggtgcctatcccaaggtttggtgctatattatcgagatatttttaggtttccatacttttccttcgcaaagttatatatttgcttgttactaaagtttcttccaagcgccaattatttattgaaaacttttcctagcaaaactatagattatttgttcatacaacacaatttgtgagtagctgtagcctgtagagcctttattttggcttaatatctatacttttaagctggttgtttactcacaggtatatacctccttcgatattattatggttttggtttcattatataaaatgaatgctactgtagctctttcactgattatgatattttctgcctctgtaaactaaaacggcatattaatagactagtctgataatgactataatatattcaattctatatatattgatacttggcattactttccatagtcagtttaatagttctatgtccatgttttatatgtaataataatcctggtaggccttcatgcaccctagtgttgtagtgatcggattaaatacttataagtcgatacatgtctgtattttgtttggtaatgttttatccttgttagcatgaaattacttgttcaattctgtattgaaacataaacattttagtctaaagaaacaaaaacttacttattattcccctagtgaatattacaattttctgaatataataagtacttccatattactttggtgcatctaggttgagaagcacaatggtggatttcgaaggtggcaaagagtgttggaagacgccagatgtgcattttgtggctaaaatcagaagattgataaatgaatatttctaaatggctactcaaaagctagctagacgaatatatttccccctaaacaaatgtttcagcagaagatatataccatagttaatttagtgtatgctgaaaatcctgtaaggttcattattactgatgaacaattatgttttatttgttctattttggggaagatgtcgttacaaatatgcatggaattttcaagtttttatgccaattttcttatttaatgattgtttgattggtatattaagagaggaccattgctacaccctcgaaacaaccaattctaatttgaatacacgaaaaaaaccacatgtattggaactcttatgattgtgattgatatcttaaactaatcctaatgtgggattgtcgaataggcttgctgatggattcaaattttatgtaatttggattttgtaatactccgctcttcaattatcactagaacggataccctcatctcaatcgggcggtaagctccatctcaatcgggcacagagtccgtcacaggctagaagtcactgatgtgaagagttatctcaatcgggcaaacggccgtcacggatgaatctatctcaatcgggccctaagtaaagtccgtcaccgatagctttgacccagacgaccagtcaaactatagcccgtcacagatgacctatctcaatcgggccacaattagtgcccgtcacagatgactactaacctttattgggcctaaactagagcccatcacagatgactactgacctcaatcgggcctaaactagagcccgtcacagatgactattgacctcaatcgggcctaaactagagcccgtcacagatgactgtcatctcaatcgggcatttagttatggcccgtcacagatgactataatccacaaaaaaaaataaattttgttttttggctagcctcaggcctttgctagccatgcccgctgcagaaatgacagaaacaaacacagatatccaatatccccagctccccagcatcacccattcatatacatatgcattcacatacacagacatcaatatatttcacacaaccacacattcacagccatctcatatttcacatccattcacatatttcacatccattcaaatatttatcatatttcacctgcaaaaccaagttaattggatcaaatatttatttagcaagtcttaacataaacatatgaaatatatacataaatataagcatcacagttacatcatcacagttgcataataagtgttcatcattgcctaaacataaaagttcaacattgttcatcatttt

SEQ ID NO: 14657 - DNA, 3995 bp, Oryza sativa
ataagctacgataaaaaaacaaattaaactattgctagtcaatataaattcagaagttaaatttaattttatatttttctgaagtgatttattagatattaatctatgctgttaatttttttctataaatatctttacctattataaaagtttaagatatttttgccagattatttggtccgtcaattagaatcccaatcgtttccgtcgtcgtttttttttcagcctaatcatatgtttcctttttttgttctcatgaccgtaacgcatcgtcgcctactattcgtttttttcgtgtctccttttttttcgactcgttttgtcgtgttttttttgctgtttttatccgggttctttttcttcgttgtttgttttttcccgattcggtttttttgctaggtttctttttcgcttttttcaaccggtttttttatctcatccgatctgttgcatgcttctgtcgccggaccaaacccttacgccgccgccacttcgatctgtctccccatgcgttttctccttgaactgattgcaaaaattgattctccactcctctctcatcatttttctcatgatttctcctttcgattcggttttaaatatctagatttatcagtcactaattatggtcggccgacctttttatcccaattttgtgaattcattttgattttgggaaaaccaaaagaggatattgagtgtataagttgagagataaaaaaaaagattcgaccgaatttaatagggattgctcgcaatcttcctccacgcccgctgattccacccctctctttaaaccaccaccgccgaattccctcacagccgtcatcatcgcgattgccaccgatcccccacctcgggttcatgtcgcggtgaccgagcccccgccgaccgtcgtgccgcgccaccctgccttgccctagcgccatcactgattcgtttcatcgagatctagccgccggcttcgtgccgcccgagagcaggaagaacacggggttggtgtgagggatcctcggctcgatcgaggtgcagcccatgctaattaacggcgccgccgcagccatcttcatcatcaccggcctctaccctcagatgggaaaggaaatcttcatgttcctgtgttccttttctcctgattacaggtcatgtcattgttttggcttatgtttgatcgtgcatcacggccttcataatttctgattgtatttgagctctatctccggacaccctcatgttgttcgatgaaatgcccgtacacatacacggcaagaaatcatgtagtacatggagcagatgttcatgggtaatatatgtgttcatggcttttagggtaactttttttttctaaaattaattgcactgttgtgctgcacatacagcaattactgaattgggattgaacatcttaaatttttatgtgttacatgtaaacatgccattacatgatctggtggccgccactgccctttagctacaacatatatttggatcattcatacatttatatatttctgaaagtggtccaggtcatcaaggttgtctaaagatatcgaaactaattcacggactaattcaaaaccaatattattttcttaagatcatagatttagactgtatatatgtgaattgacggcaactattgaataaatatggtcaaatatctcatgaacccgcccttttttttcagaatcctttttttgtgaaaaaataaaaccatctcattatggtagtactcgagttgtgaagttaccgatgaaaacattcaaactgaatttggttgctgcatttaggatgtcataggtattttcttttttaatctctctcgctgatttggtttcattcatttagatgagtattgaaaacctttctcttgtgataattttattcagttatgtatttcattcagctgatgaattatcctttgatcatagccattataaatgaaatataaactgaattgcactatctgcatgatataacttctacaattggattatgtttttctgattttggcatatattgtatatgaatttcgtatacttggataaccgtgtttctggtttgtttaggaccttagggggcatgtttctgaaatttaccgtctggaaaaaattctgacattgcttattatatactcagattttccagaaaaatgcttatgtattgccagccttctagcacatgagtttggatgcttgttattgactgacataatgataacttgcaatattaaatcggaatacaaacagtgagtataaaaacttttgtatgaatggaaccgtttgtgttattagagtgaggtttacatttggtcaatattatatttccgtttatgttcatgaaattcatcttgtttctgttcagtgcagtactcccttattgattccttcctcatttctgaacaaaaaggactcacgaatcttagatggcatcatctacactattgatgcatcatctgcactattgacctccttatgttcatgcgatggatattttttcagatcagtgcagtacaatcctacttttgattagtgatgataaatagaagtttgatcgttgaactgatcaatacaagatccttatttgtaagtagcatctattgcacctaattttgtatatgcagtacattagttaggatcatgtatattttggtattgctggcaaatataactctcaccttggatcaaaaatgatttcagctaaacaccacctatataagtttaacagatatttatctaaactcaaaactgaaaaaaaaatgtgtttaatgtctgaaacttgcaaggtgctactatgatctctgaacaaataaacggtctgagtttcctagcagcaaattgatttgttcagagatttaggtgggggcacgccataataaatcgttgagactaggtcttataacaaattaacatgattttttaaagcaaattttctttatatttttttacataaaatatacagatcggaaaagcgtgcgtataaaaataagtgagtataagttaggaagatggagtaaaaagcacacccttaacccactaacctatgttttgcctcattgtaccccttgaactactaaaattggtttgctcgagcatttatcttcttcgtctctttttatacgagtcatattctaaagctgatattttgcagggccagacataacaccattatcaaagctctaaaatatttttaaaaattttcatgactattgtttgaaatttgaaaccacgatgtttaaatcatgcttactgctttgaaatatatgtatacggtggtaaaaaaatatgaaaaatactgagaggtaggttataatatatctatatatcaatcctaccaaatttgcttacaaaatacgacgtatatggttgtatatctttatctacttaaaacattcatagtgtttttgccgtgcatcgtagaaaagtgtgtctcacacaatttttcatccgacatgtgaattgttggtccgtatccatgtcccctgcaagcgtcaaactcttccgcccacgtgaaacggaaacaatcacgtataaaaattcagtttccaatccgagcacgacaacatcacgcacccactgcctgtagcctcaagcagtgacatgtgcctcccctatcacaaaaacgagactcatgacggtcaattgtcttttgagctgatagagattttttgctggtgggtctcacgaatatgtcttcaagtgtatagaaatcttgtgaccgccaacagttcgtagaatatactttactcccttcgtttcatattatttatttcactgaaccagttttagctattaattatttggcaaaatttgctacaagaaacgcaaaaaacgtgtaattggctgagagacaccgtgaaaacgtgacacggctgatggacactacaaaaaatgtgtaattggccataggacaccggtcgcattattttattatttccgggtcaaaagaggtgatttcaaaatgacaagattgcccatggagccatattcccccgc

SEQ ID NO: 14658 - DNA, 2121 bp, Oryza sativa
cagtcaagttcatccctcaaaaaagaaaaatccttcagcacacttaatactcttaggtttcttgctgtaaaggtacagaaaagatggatcccaataataagaatcgctatttcatagtgctgcaggtttactatttaatatcttgctgtgttgcagtagtattcattattcaacgataaaaaacaatttattcaaaatgatgcagcagaaagccctaaagcagtgatacactggtctctgcaggtactctcaatgtattctgaaaaagaaatttagagacacctcaagtagggtttgtttggcttgtagacccaacttatacctgcaaaatattgagccccagttcaagtctcctaaaggttggttttatcatttgcctgccccaaggaacatcgtaataccacaaaaaatttataattcaaaattggacattttccgctgcaaaattgtccccactctctttcttaaaaaataatccatgatgactaacaaatccttgtttgattcattatcaaaggcgagttcggttggtacaaccccaggaatgagcgtgggtaatccatgggcagccaatgaccatactgaaaatgctttttttttttcactagctttgaagaaaaaaggtgcattagttcagttagtggatcaatgggtacctataggtggactcactcccatcacaacacaacccagaactcaccagcaatgtggggctaagaaaaaagatcacttatgtctacttagcaaccagcttccaaattattgggcaaccaaaaatttgaaaccaatgtggtccctacttgtcatagagataggtggataggatttttccagcaataatatgcaaggtgctagccaaaaatctagcaagttttcttaaagcatggccaaatgcccaaattacatgggaccaaaatcgaattttggaagagaactaaacaacagctcaacaatgggaataaccaacaattggatcaggaaacctgacacacccaaacttttgtgatgaaaccaacatatatattaccaatgttaactcctttgttaaaactttttgaggatgatacgcatgctggctaacaaaataattatatgaaactcaataaactacagtacatctaaacaagtgatcaatgtggggatttagttgttatgattattttataggataacacgtgattaattgatacgttattctaacaacatataatacaaacagccatgagatatcagatataccagaagcgcatattataatgatcggtttaaagtactgtacacctaatgtgcacattgatttaaagacaagaaagctgatatcccaaccacctattaaatactacaaattatcttcacatatagtagtagtgatgtagagcaggtcaacaattcagaatcaaaacaaggatgcgacctaaccgatgcctagtacacagatacacatgatgtattatgtcaacctcgtgatttcgagaagtctaagttctcagcacagtagcagtagcacacagtttaaagaaccaagggatacagtaacccaggctagtacacatcaaccgcacaaacaattcaattgagatatacaagcacagaaatgggtaaaaaaaatcacttaaaaaaagagggtaaaattgaaagggggaagaaatccaattaccatcatcctccacgcgaggtatccgacgggccctccgcgctcgccgtcgctagcaccgccatactcccctccgtcgccgacgccgacgccgacgccccctctcctgaggacgtccctgacgaagtcgacggcgctgcccctgtcgccgcggtcccagtagagcgcgacggccttctcgacgaggctgaacccggggcggagcccgacgcagtccatctccccgagcagcgcggcgacgtcggcgacgtccccgccgccgcccacgaggcgctcgatccacccgcaggcgatggcggccatgagctccatggtctccccgtcgacgcggttggcgcggcggagccagtcgaacacctcgagcgcgcagtaggcgtcgcggccctcctgcgcgaagtagacgagcaccagctgcagctcccgcggggacagcgccgcgagctgcgccgacgccgccgccgcggcgt

SEQ ID NO: 14659 - DNA, 4348 bp, Oryza sativa
catctccaatggcttgcttgtgccgtagaacgcgaagtagagcatggactagatccacatcatctcgatgcagtcgcttgccgtcacgccgagctccgggaaggtgtcggccatggcggcgacgaggccaaggcgtgtgccgactaccgaggtacagggactcgaactgcgcgttctggttctgcactatgacgtggagaagttcccgccgccgccacctcggatggcccagaagaggtcctccccaatggcggccctgtcgaggagcctccccctcggcgttcaccatggtggcatcgacgacgaggtcagaggcgaggccgtgcttccacagcatcaggccgaagccgccaccactgaggaacccgtcgacaccgaccgtcccactcgaggcgtcgcgctgcccgcgcgccattcctccgctccgccgcgtgtgtgagaaagaagaaggataggagagcaatgtgggcccccacttatgattagcaaatagtaatcaccctactaattaggtacaaattagtccatgacgcgtggggctaggtggttaaaaacctattaaaaattagattaaacatacactgtctatgacatgtgggacccactggtgtttaaagaaggaaagagaaggggcaatctgggcatttagaaaaatatctcacctcttttgaaccagaaataataaaataatgtgaccggtgtcctatagccatttacacgtttttttagtgtctatcagccgtgtcacgttttaacggtgtctctcaaccaattacatgttttttgcgtgtcctatggcaaattttgccttattatttttatttcacgaattcaccagttgcatatataatagttcattttcttaaaaaatagctaccatatgtgcccatgcgcgaaaaccctattttcgcatgtggtttgtgctgcccatatggaaagatactaaaaattattttttatagtgataatcgccgttatagtttagccaaaggcgaaaatcattttttatagtgataagtgccattgcagcaaaaaataaaatctttataccacactaataagtaatgacaccttcaactattgattatctctatgtgaaacccacatctctatcatatgttccatccacgacgtgcctgagacctacccaggttcatgaaaaaagacccccaaatatccatcatctaactctctgccaccatacacaaaaaaaataacatatgtaatttggatttcctatcgcaatgcacgagcatctttgctatttttttttttaaaaaaagagaaatgagagagatgaaaggaaaaggttcacttgaggtcccttatcttgtcgtagagtttcgaaattgtccctgaactaaaataccagatataacatatctataatcttgcaaaaccgggtcacattaggtcccaaggcagtattgctccccggttttggtgacttggtggctgagtcagcgtgggacccatgtgggtcctacatgccagccgataatcttctcccacctatctcccctttcttcccgtctcaacccaaaccttcagggcagctggcaacaggtggggagaagagtggcgactgacggctgcgtcatggacctacacggcgaagagcgcgaagaagcgaagtaggaagggctcccgacacgtcgtcccctcgggttacaccactacatcgttgcatggcagctcgccgcgcatctgcgccacgtccacatcatggtcgcatgtcagccacaccgtcgggattggcaagaggatctccaagagttgggagatggagtacgttgcgacgcctgagcatactcgcgagcaccactgactgcatgagtgcccgtgcatgcaagcgaagaggacgccagacgctgaatcgcgagagaggtgtgtggtggcctgtgaccagcagggagaagggtggtggttgttgggcggcggtggtaggtagaagcccgacgacggcacctggcaatgggtggggagaaggctagcagcgaacaagaagcttggcggtggcaagcgttagggaaaagggcgcatgcatcgaggatgatgcgaccacaacgtggagtagatggagttgacctcgaagacgatgcggcggagccgcgcgttcgcctctgcggaggagaggcgaagctcggggacacctaaacacatcggcttttgagccgctcgatgggggcgactatgagcttgggggataggagttggccatcgtgacgaggcggaagcccgggataggagcttggccagcgtgatgaggcggaagccccagccctcacgcgtgccggtgaagacgagattgcagttgtagttgggacccgcgccacaccccgcacgtgcgcaagtccatgacgtgagcgctcccggtcattgggagccacgtcagctggcggcctccgccgtcgagcttttcccctccgaccgacacccttctccccacccattggcgaatgccctggaggtttgggttgagatgggagtagaggggagtgaggtggaagaagattgctggttagcttgtggggtccacgtgggccctacactgactcagccaccacgtcaacaaaaccggaaaacaatactaccttgagattaaaagtgatccgtaatccgttttgcaagattaggggttcagggtcgtttaaaactcaacgacaagataagggaccttagatgaacttttttgggagatgaaaaaactccagcctcatgggcctgtgcatatgacccataggcaggcgacaccgcgtgcacgacctccgcctccccaatccgtcccgtctcctcgccctccgccctcgactcccgtctcctcgcctgccgctggcgccgatctccatcctgctagcagaggtggcgccggcgtccttctgctcccgccgcattcgctcaccggtgagcatcctaatccatcccatccggcctcggcctcgaatttcgtctcctcgcccgccgcttgcgccgatccccatcctgcgagcagaggtggcgcccggcgtcctcctccttccaccgcatcgtcgctcgccggtgagcatccctccctacccacacctcatcaggtattctgcattatccctcaaaaagtttgggggttcaacggaaacagggttagatctgcctctgcccagctccacctactttcaagttgttaattttgatttccgtttttagcatatgtaatttggttactgaatctcatccaaacacccttagaacgaaaaatgtaagctcacataatttgtactcatccaaactcacataaatttcttaagaagaatctagaccacaaactacccatagtcacacaaaatatctttttatcaaggtatattcttataagtaatttttattccacaaaattttctaaaggacatactttgacacttggcattaatctaatttaactttttttctttatcaggttataaattttctaagacatttgtgccacttggcatgaatctaatttaacattctttctttatcaggttataaattgaaaccattgaacgcactttgtcttcccgtccctaaaacattgtgatatatctataatattttaatatttttaattttaaaaataatttagactaataatatagatatttaaattaggtaattaataaattcaaatcaactatagtttagaataaaaaaacaaaatgatatatgccaagtacaatctaataacaatagaatgttagaaacaatatgaattcaatatttttataaattttaagtacgattcatacataaaattaaagaaaaatatagatttatatataagtgagaacataataaaatgcaaggtaaaattattaaaggaaaaatgttattaataaacaatgatgttgatgtatttctaaatattttcacgtttatttattaagtgtcaatgattgaaatagatgatttaccatgtgacagattaattattaaaattataaaattatattgttttcatccgttgcaatgcacgagtattttgctagtttagatgatatgcaaagaaatgatgtaaactcgagggtcgagagtttagaacagtagtttccccaaaccaacggctcagacccccctcccccgcgccgcactgccgccattgcttcgccgcgtgcgccaccaacccgtccttcccaccgacgagcccgtctggcgagccacagcgaggttgcagcctctcgtcttccaccaccatcccttccccgcgagtgctgctccctgtcccgccgccgccgccccggtgcccctcaacccggggaattcgcccccatcttccccctccccgcctcgtcccaactagtcgaggggtcgccgccgccgccgcttcccccgc

SEQ ID NO: 14660 - DNA, 557 bp, Oryza sativa
cccagtctgagaactgttcaggctactgatgaagaagtaaaactgaaaataataacagagagtgtaaaggtttattaggccattcacagagattatttttaaaatcaccttcctatctagatccaaatttagtggcattgcacttcatatttgtcattatgatgagatgtgttttgcagactgaacagaaaaagcaagccgctgcagatgtccttttccactattcacagtttattatggtttgcattggtgagggtgttcgcccaactgatctgaggttgcatcttatgaaggtatattttattaaccttcgcttgactttttgtggtttgttaatgatgtgcatttttcgtttgcaaaattgagatatataattctcaatttcccatggtgaattttttgtacgatttgatgtggtgggatgtgtctgcttagcaaggttgcaatggcaatgcacatgttgactaggaagcagcagggttgggcactcatgtggcatcaatcagtgcctaagcccccattacagttattgagctgctcctactgaatttttatct

SEQ ID NO: 14661 - DNA, 5949 bp, Oryza sativa
ttccagctagcacaactgcacttgagtacttgacagtgcactattaattattccttgcgagagttgaatctgttttattttaacagttcatgcttgtaactattagaaaattagattctcagctgtttcttttttctcatgtgcaatagtgtttaaaatgctcactgtagcccataaggctcataatatgctaactttggtcctatttttgcttttcaggaagtttcaggaatggccacttctctaacgaaagagccacagcaagcagctgcctctccggattctagtgaaccatcttcttcagggacaacgaaatgagacacgaatgagatcttctaagcttcttcaagaagtatgataggaaatattgcaaactagtaggttcacagcttgtggtctgagaactgtttctggtgcagtgataggaagtattgatgatgatatacttgtgttggtgatgcttcttatgagcacttgatttgaataaattaaatgtaaatactttagtatgtttggcccacaatttgtaatgaaggaacatggatcgtgatgtttctgataaaattcttgaagtgcctagcccgcgttcatgtttagttttttttttatcgcaattgtggtgctatgctgtaatgtaatgaataatgtgcataaatgtggatgatgaatcagagccgctcctgtagtagtacacacatgtgccaatgctgtaaaagtggcaagctatacgctgcaatttgaagcaatcaggagtaagtgaaagtatcctccctctatccagcgtaaatatttcacagaaatctacttggattcaagaacaagcagaaatccatctggttgggaagaggagaaagagtcaaggacatagattaaatattgtggcttaaagcctatatcaagtgtgtaccaggagatgacagaaagcaaagatgcctgtcctaggaacgaaagagctgttcagaaacaagtaggcggggcatatctgctatagcaattagcatgaaaaaaaaaattctacattcacctaatattcaaactttgatcaccaactagtagtagtagtactagtatttcagtgtggtttatgtaagtgaataaaaagcacatcatttcctcatacctcagaatattgttcattgggcgcagcaatgacaaaacgaacacaatttactcgcgtctattttccttcgatttcagctctggtttgcaccgtgcctgttttgctccacaaaagatcgcaaacaagtaggttcacagaacagagcatttattcactttcagatataaaactgaacatccacagcaaagtatatcatcaaatatcccaaagcctgtcaatatcatcatgtattaaagaaaaaaaatacccatacctatatatgtttacgtcaaagtaatgacaaaccgaagaattctccaaaaccatcgctcaatttgctatgtaccccctgcagtggacaaactttactcgaactgaacaacatcctaagttcttacaagtaaacctatacctccgatttctcgtgttgtcttgcacactgtttcccttggattgaagaaaaaccgccaagggcagcagacgattcgaaagatcaattatcagacactatacagaatgcctccagtatccttcgctgatgtaaaaatatcctgttactgttatgcaatgttcttgtagctcctatgcacatttcatctcttcttttttcccttacatttctgaagaggaagacgatagctcaacctacaaaagcaaaaggtaatggatttccaatgagaacatgagatgacagatgaggcaaaagtgcaccagttctaaagaaacaagattaatttcttcagtgccgatgttttgtatacttgcctgagtttctgaacacccatctggcgtagtcgagcaccgatggtctctctcgtggttgcggctccgacaccctcaacgcctcaggatcccagctccccgaccacgagtcggtgctcccagctgccgtgcgccgcgaggaggacactggtagctccattgcggtggagcggctggtggtggggaacacggcccagctcccagagagtgtggccagagaagagcggagccagccgcgagatcccccagcatcatcgtcggctgcagccacctcttcatcagcgagaggcagcaccggcagctgcagctgcagctgcacctccgtctgaacgccacgcgagtcagcgccgaggtggaggtggcggccgctcgtgctgccagtgccagggctccagcttccggtggtgcggcgcgacgaggagcaccccggcgccgccaccgctgcgacggcgcggctgcgggagcacgccctccagctgccggagagcctgtccagcgaggagcgcagccacccacgagatccccccactgcctccgccaccttctcgcctggcggcgcgggcaccgccagaatctgcgactcgatgtcgtactcccctgagcagaaggttggaacgaggcttctcttgtcggtgcggcagcgggtggtgatgggagcatggcactcggggcagcatagcagcggcgtgacgcggctgcggagccaggcgacgaggcagcgctggtggaacatgtgggagcacaccggaaggacgaggtgcagatcagttgggagaagcagtttgttgcagatgaagcaggtcgccgtgctgccgctcatcgccggctgcaacggcgaaggtggcagcgagagcagctccaatatcacccgctccacctccggcagagacggcgcagacggcggcggcgccatcgcagcagctgaggtagccgaggacgccatcaatccagccgtcccctgcactgccccttgtgcagagctcgacaatgccactggagggcctctgccgggatcgcctggagctgaagagggcgcggccatttccggccaggacctggcactggcagcactggccctcggtgaagaaccgacagctgcaactgccgcgcgccacatctgagacattgctgatggcgaagatgacaaagcccttggggataagctgcggcgtggggagaacgatgagcaggacaggcggcgcccacggcggtagctgcgtcgaatgacaacaatggcgacagtcacgatggccgtggtaatgacgacgaggacgacaatggcaatgctggagcctatggacgacgacgatgacggcggcgtggctgaaggtggcaggctcggcacagagggatacactacgagctccggtggtggcggcggcggaagtgggagaaggggaccgggtagcatacctgcatcagtgcagctttttctctgattagtcccaaatcagatgctaattcgtaaaaattgactagatagagatcatgcgtaggatgaaggaacagatcatgggtgaaatttcgtggaaatgaagtgataaaacaactggaaatttggaatctgggactaatcacacgagcaggacgcaaaattcgatcaatcacgcaacctaatcgccccaattcccctccattgcagctaacaagttcaggagaaattccacatcagcaggtagcgacaatccaatcacgcatggagttccatcaggtgatccgttcaattccactcccaaatcaaaccacaccacaccacaccaaaccaaaccaatccaaatctcaagcgcagctggtgcgaaaaaccggagaatctctaggtgcggagagggacacgggcaattaccgacctgatgcatcggcggcggggaggggacgaggacccccggagcagcgcagctggtggggcggggggcgcggctagacgctgcacacgcttccctccacgaacctgaaggagaaggaggagggggttaggtctaggttagggttcgggagcgacgaggctgcacttcacgggtggaggaagcaccgccatacatcgacctcgcagcagggccaacacgtacatacctctgcgacgctgccggcggcggcggtgggagaagggggcggaatccggtggatgctgcggtggccgcggccggagagagccgagacgcggcggtggcggtggcgtgagggattggggaggaggaggaggaggcgaggcgaggcggagggggatttggaatggcgcctgcgcgggcgggaggaagaggaggaggaggggagggcccacatgtcagtctcctcggggcagattaggcctggtgggctcggcccacggaggcctcgctagagtaggccacatctccggcccatccacgtgtatgagcctggactggatatctcggcccatccaaacaaaggcccttctgccaatttattcttcagagtaagagagagaattgcacatcaggccagacatattatcaaagtttcattttgaaccatctcttagtcggtactacgccgactaatgtaacccttgaatattataatttatttattcaaaatatataaatattgtacatgttatgttatcatattacttgttaagtatatatgagatggaacaaaaatgaatcaagcgatggtaattgcggtggtatttgtgatatttatgttttgataaatctagaaatgtttatttcctgataaacatattacactaagattaacataatttggataatgattttaatgtttatctataatcattaaagcaataaaacttagttgtacagatcaagcatacatcaggctagcaattggagctgcgtcttatatagctgatcgattcttatgttctgattgataacacaattaaaattaaaagataaaaaatacaataaaaaacaaaagaaatagaaaatatgcgcgcagtacagtaaatgcacgcaatatttattatttatttgtaaaggagttatgaatagatctttaagcagttttaaaattttatatctgtcaagcctgacaaaaacattatgctggtaaatgtttaaattacatataaaagaaagcaaaataaatgtttgaaacgtggtacgtggaacgctggtcttgaaaaatatggtacgaaggggtatacctcttcaaaacgtttgttcgaagggtgaagcacgttccatggattttcgggatgatagtccggaatgatatggaaaatcaggatgcctttgttctgcagagaataatttgaactaaatatatgtaaactttagggcttatatggatgaaaccatttgaatacaagacttttcgtaatattaataaactcaaagggctaaattgaaaaaagatgaatctcttctcctttcaccacatcaggccatcaccccacgatggaatccacaatgggcatgtacggccagatcaacgtcaacaatggcagaggcatggaggaccaagaactcgtcctgcgtcattgcagtgcatcacccacatatctgacactgggtttctcacattctgatcttcattttttattagttttgatcgattgaagaagacaacattcttttatcagttttgatcgattgaagaagacaaatggatacctcttctttcatgctttgatgcctatttttatttcgatttgaagagattgcaagtgatagatagtttggaatactctagagttcagattaatgttcgcgcgggagactgcgcagggttctccaccacctctccatatggacacgtgacagattttaggagggattcaaaccgaaatattaggatgccatgtggtccaatgagaggctagggattggaccttgaaatcggtattaaagatttcactttgaacctactatacgaatgctattatgtttattgttaatcccattgtcctcaaaccttgagaaagttaaagggttagagatgcacagcagtttacagaagtggcaataatgccgtggatagtaagtgtgagctaatggcaaaggttaattttgggcagggttcattcaaatagatacatatgagttagcactgattacgaggccacatgtgcccattgttcccgatacaatgttgttatg

SEQ ID NO: 14662 - DNA, 2817 bp, Oryza sativa
catgctatcatgtatctccatcagtttagccatcaaatcataggtaggttttcttaaaaagacatatgtagacctcaaggtgatcaacatcattacaaatttggaattcaaatcaatttgtactaagaaagaagagaaaagcttttgcacaaatagcagttttgttggccctctttattttattgtttgactcggattcctgtttttgttccttctaacacgaaatgaattctacagatatccacatgtgctattatttcacacttagctatcagccaatgttgagtagaaaatttttatttgcagattgaaaattcaattttcaggcttcaagtttaaatttatgacatgaaagtttcaccagttagttcacttggaatcaccaggttttggttgaagattgatatttttgctaaaagtttgtatgttcaaagttaagaagagttaattagatagttaattagtgaaaattttcactatatagaagctctttcaggtatatttgagcaatagtgtttgtatcagatattgaagtcataaatagagttcactaaaaaaaggtgatctagcatgtgaaaaggaaagcaaatgacggggatttaagaggttagaatgaggtagactaaaagcagcagtgcataaacagtatccattataattcccatcacaaagaagttctgacaataatatcaaaccaagagcatgacctctttccctttgtacatatcccaaaagatatctattaaatgctcctcttctagtgaaaatgtcattccagtaaaaaccacatctttgcagtactttagataagaatgaacttccttcgaatagtctgtacaataagaaaacatctgagttaattttgcaccattaacatgcattttgcaaaggatgccaaatatatataatataggatccaaagttagaaatgccagaaaatatttatcctcgaaactaaaatgcacccactctgtttttgtttacttggcacttttgactatttgacaatcccaaagcacaccttccattttgccctcattaattgccaccagaattagagggtttttcatatgatataaaaacaaatgattgcctaaataaagctgccttagttgcaagtgtaaaacaaacacaaacagaggtcatatatggccacatgagatcaatcaaccacctacatatgcacacgtcaaaacaatgtgttcttctcaaaacaaaaacttaccaacaaaacacatgtctacatataaagacagtatcttgcagactgaaaatagtgtcattgaagaatgcatggaaccaattatagcatagaccaaaactaagtcacaaaagttcctggatcgatgggttgaggaactggaacaaggaacgtaggacgccatcttctaaaaacatggaacgagaggggtatacatcttctaggaacgtgttcctagtttttttggaacgataatcaggaaagttttgctatattttctggaatgagagtgaaatcagtatgctctatcagcagatgaaaggagaaatctcacaaactaagctcattgggccatgtgaaagaaatgaaagaagttaaatctacacattgtcatttgcacaaaaagaaatgaaaaaagcatatcttaattggagatgcaattaaaggtgctccaatattccgcatgaggttgaactttttctgtaacattctttgtcgatatgctgatatgataaccttttataggactatccacaggtaactaagaacagacaagtccatcagtggaagttttgtgcattatttttgagacttcacaatggcagtggctaatgcacaggcccaacaagagcaagtctatggcattagaagagacaagcaagcattctggagctctttgttctctgggtgaggaactattatgtataagatccagaaatacgcaaatttattcattgcctaagcacaagctacaaatgccatctttatgccgattaattacctcttccatagttagacatagttatggtttcccttcaaaaacaaacatagctatggtgctagtataagaaactagtttaaactaaaaacgatcagcatatgcatgactaaacctgatgtgagtttagcaaagaaatgataatgtggaattcaaacaatgatcatccaaagttaccatgtccaacattgattttatcataagaagctgcaagagtgcacaacagttctcttgcatcaaactcctcactgttgttgctgtcaggctctatagaatgtggtgcacttgcttcaggatcagatccaactgcattttctgtctgagcaatactctagaaaggaatgaagttcagttcatcagtatttaccacaggttctaccacatgacgtaaagagcgtggcctatatggaaaactcacctcccatatcccttgtccgttgatgccatacagaactcttagagccactattagtatagccattacacaaacccgtgagggtaccctgccaggattactggacaaccaaagttctgcaggcattgcccactcatagatgcgacatgcatgaggaaggattttttcaattggaagagataactccttcaagaagcgctgagcaatcaagtagaaattaacagaaggaagcaacagtcctatcttttgcgctatggacccagctgcagcttccagctgccatgctccaatcactcgagttggcctaaatagctgccgtgaactcaacgggcagtcgtttaaagaacttccaagaagcttgtcgacttgggtaaacgctgccacataaggaagcttcccctccattgcccacctgcaaatgtc

SEQ ID NO: 14663 - DNA, 604 bp, Oryza sativa
attttattaacataatgttacttacctcaaaccatgtcagacaatcaagagctataactgagagccgttcatgctctttcttgtctctcttttcccgtaaggcccgccacataaccattggctcccagctcagtccagaagttagctcaagcacgtcacgaacaatgactggctgaccattcaaccaatgctgctgaaaatgatctaaagctccactttgaacttctctagcagttggacaatatatgtagttatcattggagtcctctctgcaagctgatttccgtgatgtttcattgttcacttcaccggattcagtgaagcaggaacatttagagccttccaactcctgctctgtttccttattgaccactgaattgactttatccagtaaatcaaaaataaagttcttcttaaacaaacacctaagttcgagaagacaattcccgcaaccacctgcattaagtgggcatggtatgcttcccgtgctttttggccttcatattaaactaggagtgcaatcctcttgaagagctgcactaactatcaacctgtcattcctgtgatcagaagcccctttgactacagcactgctatgactact

SEQ ID NO: 14664 - DNA, 604 bp, Oryza sativa
tgattgctgcccttatagcaccatcctgatcagtaattattgtctttggttgctttccattcattgctttcaaaaaagctctgaagagccactcaaaagtttcagttgtttcatcatgtataaaagcacaaccaaatagtattgtgttcccatgtccagatactctaacaaatggtgcaaaaggcagattatatctgtttgtcaaaaaagttgtgtcaaaacttatacaatcgccaaatttgtagtaccactccctagatcttccatcagtccaaaaaaaattcttcacttttctattctcatcaagatcaaactcatagaagaaattgggatcttcttcctgctttttcttcaaaaaattcaaacattgcatcaaatcattactgcttgtttctctgtttattgatgttctgacattgcttatatcctttttagtgtaaggcaaagaagttagaccacctcttagaacagataatattacaatcatatttcttgttggaatatggcattctttcaaagtcctgattagaatcttttcttctgtcgacatgtatttgtgagatcttagaaatctagctcatctggaggactgagctcatgattg

SEQ ID NO: 14665 - DNA, 1576 bp, Oryza sativa
attttctcattctatgtgttgctcataaagttatttaatgatgtgctctatattgcaggagttcatgatccttcctactggggccgcttcattcaaggaggccatgaagatgggtgttgaagtgtaccacaacctgaaggtaattctttcatcttcattttaaaccttttccccatcttacgtcattgaaaattaattaattttatctgtacagtctgttatcaagaagaagtatggtcaggatgccaccaatgttggtgatgaaggtggttttgctcctaacattcaggtacttatgcctgcagcagtgaattcaattatctttctttccactatgctgttgatccatgtgaagtgcttcacttcaattatgtttccctgttttgctttgtatttgcttgatgttagatgctgagataacttctgttttgatgtatgaagctaatccgtaattagaaatctaaatgaatatacttagcatgtggtttgaatcgtttgtgttgtgtgatattgcaggaaaacaaggagggtcttgagctcttgaagactgcaattgaaaaggctggatacactggcaaggtttgtgtactttgattaatttattgtttatctttctgcataagttaatgtttttgattgactgaggcttgagactttttttgcaacctgatatggtaggttgtcattggaatggatgttgctgcttcggaattctacaatgacaaggacaaaacctatgaccttaacttcaaggaggaggtaggtggcaatctgtttcatttttgatagtagggattggctcactgtttgatatcatgtagatgtatataatgctgtgaacttattgggaacatttgtgattctttttgttgtagaacaatgatggttcacaaaagatatctggtgatagcctgaagaatgtatacaagtcatttgtcagtgaataccccattgtctcgattgaggatccgtttgaccaggatgactgggaacactatgctaagatgaccgctgaaattggagagcaagtgcagattgtcggtgatgacctccttgtcaccaacccaacagtgagtgcatagttttctattacttctaaatatgatctctctttcagtgtggttgataattaatattaatatatgttatgcagagggtggcaaaggcaatccaggagaagtcatgcaatgctcttctgctgaaggtatggttctattgattctttccttcacgtttaatagtttatcttccatgtgcgaatatatcacccttgtctttcaacaggttaaccaaattggatctgtcactgagagtattgaggccgtgaagatgtcaaagcgtgctggctggggtgtgatgaccagccacaggaggtatactgatatgcttacctgtctttattcctggtggacctggtctgactaccaaccatttgtatattgacttgtgtttcattgccacagtggtgagactgaggataccttcattgctgatttggctgttggtttggccacggtaagattctgtgctctacattcactgtagtgaactttacggcatcctgtattagttgtta

SEQ ID NO: 14666 - DNA, 620 bp, Oryza sativa
ctgagagatcccctcataatttccccaaagcgtaaccatgtgtgaataaattttgagctagtagggttgcagccacgagtaagtcttcccttgttattgggtagccagaatgccgcaaaacttccatgcctaagcgaactgttgagagtacgtttcgatttctgactgtgttagcctggaagtgcttgtcccaaccttgtttctgagcatgaacgcccgcaagccaacatgttagttgaagcatcagggcgattagcagcatgatatcaaaacgctctgagctgctcgttcggctatggcgtaggcctagtccgtaggcaggacttttcaagtctcggaaggtttcttcaatctgcattcgcttcgaatagatattaacaagttgtttgggtgttcgaatttcaacaggtaagttagttgctaaaatccatggctctttgccgacgctgagtagattttaggtgacgggtggtgacaatgagtccgtgtcgagcgctgattttttcggcctttagagcgagatttatacaatagaatttggcatgagattggattgcttttagtcagcctcttatagcctaaagtctttgagtgactagatgacatatcatgtaagttgc

SEQ ID NO: 14667 - DNA, 1728 bp, Oryza sativa
  unsure (1)..(1728): unsure at all n locations
gagcaatggaggggaagtgttcacaaagccgggttcnacggtatcaattagcccgaaaagaaaaaggtggagaagtgttggaccaattcgccggactggcgagaaagggcctgacgttaaacgcggccggagtggggttcacaagaagaataaccctcctctcccacacaatcttctcacgcgacatgaccagcctcgacgaccatggcgcgtccaaggagttccagcaggtggtcacgaacatcatgggggcagccgaaagccccaacctatcggacttcttcccggcgctcgccgccgccgacctgcagggctggcgccggcggctggccgggctgttcgagcggctgcgccgggtgttcgacgcagagatcgaacatcgcaggcgtgtcgtcggaaaggagcatgggaaggtgaaggacgactttctgagggtgctcctgaggctcgccgcgcgcgatgacgacacggcaggcctccacgacgacgcgctccagtcaattttcacggtaaggacatactccctccgtcccataaaaccccattcctaccatctgtggcgaatccaggcctatttcgtggagtcgactgacccacaactttttaaaaaacatcgtataaactttgattttcatgtataaattcaaaagaatttagagaaatgaccccacttaaatacgaatcattagtaattaacccagaagcttaaatttttagctccgccactacctaccatctcaagaagagattagtgaagagtaaaaaattaaccaaaatacgtctcattattgaaaaaagtagtaatgttgatggtagataaagggtatttaagggagaaaatttctcgtcttatgtgccgaggttagatagaatattagaagttggtttttttgaataaaattcaaatttcagaagttgagttattttaatggaggaagtacatggtatttcctctgtccaaaatataaaagcctcgatttttttagtgaatctaaataatctatcgaaattaatggtaaatgtctcatcgaattttatgacgaagagggtgttcagctttttatgtgctgaaacgtctggcgagttccattatagctagtgtaggcaaccacaaacagcaatagttaaattaggtttgctgtcgatgtcgcatactccgttcggttttattttaattgacattttggacaatgatacggtctacaaagataatatatctttgaccttatttttctattataatatatacaataaataaatgcatgtataattttattatagtgttttgaaagacaaatctatatatgttgttctagtttttttaaacaaaatatttttaaagttattgatggtcaaagttataaaagtttgacctcaaccttgtccaaagcgtcaattattatagaatcggagggaatactcgttccttttttagccgatactgttgttaacttattattgggtttagtcccgcatcgataattaatgatgatgaagcataacataaaagatagggggtagtccttacctatcagatagtcttttgggctgtgtaggtccagaacttaaagttatggctttgattgggtctgtggtggaacaggacgatcatacatcaccagtccttaactttttcaaatcgttcaatttacattccttagttcaacatcttagttctaagaaatacgcatgtagctcggaaatcttaattccgtatctcttcaatat

SEQ ID NO: 14668 - DNA, 4574 bp, Oryza sativa
  unsure (1)..(4574): unsure at all n locations
gcgcggcttttgattgcgattttgagatcagctcggnacccgncaataaaaaacattaacttatgcaggaagataaacaattaattaatcaaagttcacaaaccttggcagggtatccagcctttttaattgcagncttcaagagctcaagaccctccttgttttcctgcaatatcacacaacacaaacgattcaaaccacatgctaagtatattcatttagatttctaattacggattagcttcatacatcaaaacagaagttatctcagcatctaacatcaagccaattccaagcaaaacagggaaacattattgaagggaagcacttcacatggatcaacagcatagtggaaagaaagataattgaattcactgctgcaggcataagtacctgaatgttaggagcaaaaccaccttcatcaccaacattggtggcatcctgaccatacttcttcttgataacagactgtacagataaaattaattaattttcaatgacgtaagatggggaaaaggtttaaaatgaagatgaaagaattaccttcaggttgtggtacacttcaacacccatcttcatggcctccttgaatgaagcggccccagtaggaaggatcatgaactcctgcaatatagagcacatcattaaataactttatgagcaacacatagaatgagaaaatcttagttcagatcactgcctgcatggcaagcttgtttccagcatgtgatccaccgttaatgacgttgaatgcaggtacgggcaaaaccagttgcttgtttccagcaaggttggcaatgtgctgcaaaacagaacatattatcagttggcaaattcataaacgaatagataagagggcaataaattgcacatcttaacatgcagcaaacctggtacagaggaatcttcttgatgatagctccagctttgcaaatggccagtgacacagccaggattgcattagcaccaagctgcacatattgataaaagacttagtagaatccacttacaaatggtacatctacaattttcatgactaaggcccatgaccagatggattagataataccttctgcttgcaccacccccactcatttttggttccatcaagctgctgaaccatgaagttatcaagctcagcctgtgacgtagggtcctgcagaagaaatagagcatataatgaattctggatttagtctcaaaatacaacagaataggtgaaccatgagacaaaccttgccaatcagagctggggcaataaccgagttcacattgtcgacagcctgaaacaacagaaaaaaaatgtgaagaaacaaaaacaacaaaaataaaacattgtaacaggtaccagaaacaaattgattttttataacccatgaaacaagtatacatcatgatgcaataggaccagtatagcaagttgactaatttatttaagcagttaaaaggtggacaagtcataattgatttgactttgtctttttttagtttagccaagacaatatgactttctcatctgccactaattatttgatagagagaacatagaatctgaactcttgagtagtttaaattatagcacagcaaggaatgcaactaggaacatgctcccatggctacaaggaatttaaccaaaaatagcatttgtttggattcaatctccgatgctaaaatagatattatcaatagactcactttaaatgctaagagagcttgatgctggtgaagcaataacattgaataagggcaggatgttttatgttaaaaaatcaactgatctcttacatagttaaatatctaaaatagtttgcaacataaaaagtatcaaaggcaaaccttggaaacaccctttcccaagtaatcagatccaccgtccctcaattcgagagcttcatagacacctgtagattatgaaagagatgagattagcttctagccaaaccataatcacatcatttaagataatgtgaaaccatggttatgagcaaacaaagcaaaaaaaagaacatctaaataacccaccagttgatgcaccactgggaactgcagcccttgcaaaggttccatctgagcagcacacatcgacctgatgcacatatgtatcataaattatactagcaaccaaataacattttgtcgcaacagcatgaaaacaaaatgaaacatttactgtatacatggtaagagttggatttagaactatcgacccacatcacaattaccacacccacggtcaacaatgcttcgacaataatgaagccacgagcaagtgcaggacccacagatctgtaccatgcatccttcaaatccgtagaaaaatgtatgacaggtgggggaattcgtgcacggcgcagcatctaattgatctaggcgataaatcaatattcgcattaaatctaggcgataccttaaccctcgctttaaatccaacacaacagtcgttcactgtctccagatcccacctaccctccacaaaacccctcgcgaaaaggggttaaaccctgcaccaaattccgcaaacaaccccgcaaatcgcctaaacccccaaacaacctcgccggaaaaaacgaatccacggtcatcgcgacggcctcagcgccccccaccccgcgagatcgacggaatcaccacaccggaacggcccatctggccagatcgaagcagggaggccgcgagaggaggaagagatcagatcggcagcgggagggagagagaaagctcgtctcggcggcggtacgtacctcgacggtggggttgcccctgctgtcgaagatctggcgcgccttgacggacacgatcgtcgccgccatgggaggaggaggagagcttctagaaggttctagcagcggaggaatggaggaaggagacggggttggtgctaataaagtggggtttcgatgaatgcgagacatttagggcagaccgcccatttataatggagggtggtgagttggaagcagccctaatagttacggtcacgaggagggtcgacgtccagtgtcgctgacagtgggcccggtttggggtgggattggggtgtggtcccacgtggaggtggggttgtcgatgttctcgatgcggaaacttgtgggcgtgatggaaatcggcgccgccctcgcgtcgcggcccgccgatggaaggaggtcttcgccagccgtcggattttgaaaagttgggagagagaggagagcaccggtttcctggctggtctcgttttttttttcttgcttctaagcggctgagggggtcgtgccattagtacggtgggtccagccagatgaaagcgatggacgcgaaagccgaatgaagccctggcgcattgggcagttgacaagggattgagaatttgaaatactcaacggtatatttcaccgcgcttttatcacatggagccaacaacacattagacttatatgttagtgataaaagcacggtgcattgactatagaggatcctgattcgttgacaaaaagatttaagcattattagggaaacaattttaatcatcaaatcaaaaggaatgttcccttgtcatctgaaaattttgataagaaatattaatgattccacgtatactcaaaagctcttatattttgggacagagggtgaatgtgaatagtttttttattcatgtgtttggtcatggccacatattttttagacgatcaacaactaatcagtgtgttcgtttattagcgcatgagtaaatagcatcattgcaatctccacctatgcatgcgcctaacaccgaagtgactccacacctttatcgatgagatttagtttcaaaatgaagagggttttgttgagttggtctcagcatgatttgtgaatagaccgaagggagagttgttgcgtttgttgacaaatgaatcaatataacataggttcgaatggtatgtaaaggtacatccaactcctgttagaacaaataagactagaaaagatgtctaataacaacccatggaatgttttaaagagtgaagtaaatgaacagtacataaacttaagcgggtgtgatatctaggtcctgaactctcaaaaatatttttagtgcctaaacatgttttgggtgttatgcaagttcaaatgggtttccgtaaactaacgtggggtgccacgtagcatctacatattagtgcgatccacatgtccgtcacaaattgaacggttatacttcatatcaaagtgggtccagtagttgtaaattgatgataacatggaaacatgtggccatgtggggagaaatagaaattatttaatactccctccatctacttttctacttttgatagttatatttccaaatctgaaaaatttatttttgataggcatatttcaatccaacaacttatcatcttaatggctttcttgaatttaatgcgtgactcttcattcttccacactagattggctacatgggcatcgagaaatgtaaatattaatgaatcgtttgtttacgaggaatgactagtagcatatttaaatggatgataagtagaatcacttattcttggtctatgtgctaaaatgaaatatgactatcaaaagtagatggagggagtataacttag

SEQ ID NO: 14669 - DNA, 6448 bp, Oryza sativa
aattatatatggtgattaattgctgcgcgttagattttacatgccaatatgctagtctgcaacaaacaatccatccctaaaaaaagaaaaaaacaatgaaagaatcttaaagcggaattgctaggcctcttggctgttactaagtaattcattatctgataaaaaagcaaaagcatgaacttagcctctaatatccatttatttgtaaccacagatttacctcgccactataatttcgattcctaaaatcttagcatgttatatactccatcggtctcaaaataagttatttctggagttcaaaatttgtcccaaaatatgctgatttctatccatatttttatactgggtccacaaatagggcatttctatctattcaataccatttacctacctaccgtattaattctcttcatactaatttgaatcccgattgataggaatcaatttattatgagaccaagggagtacatcttgtgttccgccggtgataaatggtagacgaaaaatactatattgtccaaatatagatatgttgatatgatttgttatccatggaaaatgattgaaatttccatgtattgtcatgctaaatttctactatcatcgtcagtcggtatgtaaggaatgttgccccctgcatgtttaaatcctggctctgccactgactcgtagttggaactgataaggttgaggggctattcagttgaatgaacaagattttgatgcgtactgcatgaatattcggatacttgttggatggtaccaactagtctttacttttaaaattacagatttatttgcttattgagagggaacagttgagtcaaaagggctgtaatgctgtatggtgtgaaaacagctgcttgctaatttatctttgcccaatatcaacattttgtcagcctgttacacaaggttggtttccggccaaaacctcaagtgttatctgaaaccatatcttatgatggctaaacccttcagttttgttttatttgttcagtaataccacatgttagaatctaatttgaggtgcaaatagtagcaggggtctctactgactatatttttttatagatattaaaatctctttaactaatttcaaagattattatgctgagatgagcattatgtacgagaatatttctatttcattgtttcttgtgccctaccttctatgtccaactacccaatagttatagatgggtcaccttttttcctttgatactccagacatgaaggaaatagctgacaaggattctgaagaagctcaagatgaagataaacatggggataatcataagggtgaagttgctgaccaattgagcaatgatgaggatgttggtggacgtgaaaatgatgaatcaccaaatgatgaactcgacacctcattgcttgtgctggattcagttccagatgggaatgacaaaacccttgaattatttgtcggtggcttgcctaaggactgtgttgaagaggacattagagtggtgttttctcaatgtggagaggttgaatctattagaatagttaaaaagagaaagcgcattgcattcgttcgttatgcagatatcagtgccacaaagaaggctcttactgaatttaaggatggaatcaaggttttgattttatgatgctttcagtcctttgaatggtttgactttgaatcagtcgttgcttatggagtaatgatcgtattccctctttcatgttttcgttaggtaaatggcaaaagtgtcagagtatctgttgctgaacctcatagaaaatctagtgagcagaaggctcttacgaaggtaataatccagtgccagtttagcatattaaagttgttctctgaagttctatttttcttttccttattttattccttcaacgtttttttactagcacctatttgaaccattcaatggactaggctttttagtggaatcctgattcagaaacaacagttcaagcgtcatgattgatgacggcatagaaagccatgagagcattggtggggagaggaatgttttgtacttaaataaaacttaaaacattctttctagtgctttggcttggaagttattttgcgcttaatataaaacataaagcatgctattttttcttgctcatattgctatttctgtaggttaaaacagtatatctggaacattttcctcgttcttgggatgagagaaatatcgaagaatgctgtgaaggatatgggaatattcaaaaagttaacattttgcggtcaaaaaagaaagttgtttcttttgttgaattctcatcacggaagagtgcgttagcttgtgtcgaaggaataagcaaggccaagatcaatgatagggaagttaaggtattttatatctttactcataccactgttgaatccaatccaagtaccacttttgctttctttgttttacctaatttggctgacatggcttttctcactccatatctagttggctgcaagtcttgctcgaccacaatctaaagttcaactggccaatgagagtagtaagggtggtttcaatgtccacagtggtgcaacttctaaaagtcctgataaatctaaaatgaaaaaggaccagacagacgagactattgtgaagaaatcacagcttaaattgttgaaaggtgatgagagcaagctgccctccaaagatgatgtggaagtgccacaaacatcaacccattccaaaggaaaagcgaaagttggaaagcgtcaaaatacatctatagatgaaaggccatcaaagaaatcacgggagagtggtatgttctctctgtcaattctatgatgtgaattataatgtgaaatagaactcaccacgttaatttctgaaaggtgagagcaagctgacctctcaagatgaaggggaagtcgggaagagcaaaagtaaatctgtaaatgaaaggccattgaagaaagcatcgaaaaaccgtatgatctctctgtcaatttcgattttaaaattatttgattaaggaagtggttatcaataataattcaccaatgtaaactactgaaaggtgatgacgttaagctggcttcgcaaagtggtttggaagaaccacaaacatccaaccgttctaagcgcaaaaagaaagtccggaagaatagaagtacaacttgtaatgaaagaccagtggagaaaagcatgaaagaatcgtatgttctttctgtcgattcttcgtttaataagtgttgaataatggattgtatttctgatactttatattctgcaggaaatattaagcattctgcaggttctcgatatgtaactagccaccaagcttaccccactgtgggtgcaacttccagatctaaaccacattcccatgatttggtagtatagcacttcaagtttattgatcttgagttattgacattcttaattctaatgaacattattcttgcatgtttgttttggtcactgacgtgttcatgtttttaggcacctcatgctggattcatccctccttcaagtcgtgttcaaaggactcctgcacgtgatcaccaaaggttcattttttttttcagcttgttacttctttggttctgatcagatctaagcctcttactaatcctattatttccatgtttttgcagaactgcaccgtacaatatccgtcagatcagtggttctccttatgctagaggtacattgttgaaaatgattcattctgtttacatatgcatgtattaatattttagtaattatcccacatagtatgcattatcagtgagatgagttgcatctgttttgttatctttgtaataatctttgttttagttttatctggtgttattttcgtaattctattttgttgacaaaacttatcgtgggtctacctggcatatggtagactgtttgacaactgcaattatatacctggaataatttacgctatggagtacctacttctgtgtcatgccctctgacattccttttgtgctcttgtccacaacctgccttgccatggtcttgttgtggccattttgcttaggctagtaccagagtctttatcagtcacacatatattgcaattgaagtcttacaactgttcagtgtacaattttttgcttagtctggctactaagtgtactatatacataaaacagatgttcagattctgtagaagtttgcaatttatacaataattttagaagctagcaaagcttgtggcaccatctaggtttgtgaaccctcaagttacccttctatacaatgggcccttttgattaatcgtaactctagtttaatactctatcactgcaagggtcatatgaaccataatcatggaaattttccgctgaacctagcatcaaaagaaaggaataagtacatttattccctccttttgtttgagtggagttcacccttaactataagcagtcaaacttccatctcataactataaattctgccagtgtattatgtgcacaacaagatgggactcccagtttggtactagtgaattgatattacttgaaatctttgtagtctgtcattagttgtcaagaagatgctgcctaagttataactttttcacaactcttataatttgtagtttaattttcgtttgttccttttgccagaaagagtagctccgcgaccagcatattctgttcacacaagcaatgctgctggatacgaggtatgttgattactgatgttggcatgcttgtttaatttacactagaatatgagctagaattggttaagagtcaatatgaatacagatctctagtgcccacatgcacctcgtttgaaagtttatacgtgattataaataaaagatacctcctgaagaagttactaacatttatagtttctactttctggaaataatctttactgttctgcagtaaatgtattgcattccaacacaggaaattgcatttaaaccagatgagagatacagttcttgttacctatcaacttctaaataaggacaaaggctctctttggatgtttttttttccttgaacacgcaagagactttggatggttattggggctataaaaacttcttatgccacgttagaaatttctgataactttggtgatgcacatttaattattcttttacagcacgctagtaatttttctaaatcagctttgacaatcttttggaaattatatcatcatattggccatgctgatttttcctttttttttgttttttttttgtgatgcccttgcaggctggatatgcatacacctaccttcccccaccaccaccaccttcacctagtatatcttatcatccacctcctccggcaagtatatcttatcatccggggagtggcccatacatcatacgaagatactactgactgaaaatccaggtggctacagcagtcaacatgcctcaccatggtctcatggtaacatactttacagctcagtggcaaccttgatgctggaaatgtacaagtttaattgaattgtagatagttttgtttgtttctttctttgtgaaatcagatgtacatgctttggttgttcagttcaaaaatgtcgttctagggaaataagaacctgtgccttgtctcgttggctattaaaaaaggggtgaaaataataagaaatgcagaatgtctgttgttaagcatgatttcttggagggggcacagcgtggaactatttgtttgtaaattaatctttgactgtacgaaatcattgtccactaacagtggtcaaattagcatatactaccaaaccacgccctatcaacacagtggtagattttgtttgtggaatatgactactcaccattaaaaaaaaagaaaatactgattggattgctacgtatacgtcacgtaggataaaaccgctctggattgaggtaaggggggtaatttgtccggaattaaaagttcagggtaaatgatgtctggttttcgagtttagggggtaattcgatcaaccacgatagtttagggggtaattcgtactttttcctataaaaaaataacgttactacgtgcaagatattttcttttatccttgtcatttactttaatataaaaaaaagagagtaaatttcataaaactgcaaatattttgtacagtctattataaaactacatatttaagaacttttccacaaaattaaagattcagtggcttcatttatcacaaaactacaggtactttgcacaatatatcacaaactacagatttaagtacttttataataaaactacatatttaatatcttcatttatcacaaaactacaagtttagtgttttcattatcccaaaactacaagtttgagcattgttaaaaacatgtagttttgtgataatagagacaataaatctgtagtttcgtgataaatgaagaccctgaatgtgtagttttgtgataaacaaatacccgaaatctatagttttgtgaaataaattcttaaatgtagggtacgagctggaattcaaaccacgcg

SEQ ID NO: 14670 - DNA, 3902 bp, Oryza sativa
gcgctgagacctactttctcgcctgcctgcaagtcgactctagaggatcccccatgtctctttgttagcttggggttataacatgattagagtttggactaggaattacttagccatgcttagttcaactagttcacaatggggaagatcttattaatgattagactgttggttctaatggttttgttggattagtgccaccgctttggtggtgcatggttttgctggtcgcacccatggcagttaaggaccggttcgcgggatgccctggaaaaacttatcgtacttaccacaagccagcgtgggcaacggctgggcttgtagtgtagctttcctctagccgacgcatccaggcaagggtgggcgtgatggagtttggatgggccctgcgacggcctatgcggcttccggattcacctaggcacgagaggggacttgcccgctgccttgcgaggagtgggggtgaaacctgaggtgtggtgtgcttggtcagagggggttatgcgaatggtcctgtcacggcctctttccggtatgtcgtggtggcatgtcggcgcacggaaatgtgtcgtggggctgtgtcttgtgggtacagttgtacatctctgatcagagtaaaactattcgaatagccatgcctgcggttatgggcggtcaaccagattcaccgtgattagtctcaccctagtgtaatcttttgaaattggatagtttaagtggatggttgggcctgtcgcaacgtgggatagcgttggacagtggatagttaatattaattaattattacaactgtttaatctttcaacttctgtttataaatgctcgctttatgcaaatgaaccactttagctcttctttgatgattccctgcatcatgcctctattccggtatgacttgctgagtacagtgggtagtactcagtcttgctctaattttcccaaccccagagcacgagtatgtgtcagacgaaggtttctccgaggagtaggcttcgtccgtgccgtcgaggatgcctgtggagtggtgttcccgctgcagttctagtcaaggcttagcttctgttgtctttctttctttccgctgcatttatgtaagacttttatgatgtttgtaagacgtggatctgaatgtcaacattgtcgtctgtgtaccccggccggtcctggacggggattttaatgcacattctgcttggaattctattcgggaatttctgggcgtggcaagttggtatcagagccgaccttgaccgtaggacaagccaaatggaaaaacctaagagccctctgaatccttttcattgcatatgttctttgcaattggatttgttccgggaaaattgggatctgttcttgtggttcaagggaaaaatcttggtcgctcgtttaagtgagatttgtcaaaaacaagtcagtccagggttttagtaaaactgttgagatttattcgtcagtcagttgggatttgatgggtgaaatgcattaggtcctagctcaagaacatgggtagcaaggtatttatgctcttattgttattatagtatgtatctaatttccccattattttatcgttatgtgagtctgtcttatttattcgctctcatgcaaaatgatctatgcataaaatttcgctcttattcgattcgcttatttgagtcttttattgctttatttaaatttggatttgagcatgcattgatcctactcctttgtcttctctagatggccggccactcacccaaccaccgtggagaaggcatgatcgactttgtggcagagttggcacgtatgacactggtggtgggctaccccaacgcgccagagtacacgacggttccaccgctcagtggcgagcttcctcaccgtgttcgcttggaggtccacggctacgtgggtacctgcctagctaatatggtggttgaggcatctggaggcacagcagatcacgcctgtcaggaggcagcatacctgatgatggccagactacgggagcgccacaactacatcttccacgacacggcgtaccgatttcaccctcgtcgagccagtggtgatgatgtcagtaccttccgtccgacagccggcgagaacgacaccacctttggtcacatgtgtgctgtgatgagaggattggataggatgcactcggacctgcacaaggcgaccaagggccttgaatgatgggaagctcatgaggatcgtcgctctgaaggacgagatagcgcgcctgaagagggagaatgctcagttaaagggtcttcccgcgccaggaggagacgtggatctgaatgtcaacattgtcgtctgtgtaccccggccggtcctggacggggattttaatgcacattctgcttggaattctattcgggaatttctgggcgtggcaccgaacctatataaaaatccatgtctccatctcttttacctcaatctcgcatatatcctagtaccaacgatccccatattatgcaaataccggaatcgcgacatcaaacgtcgatagaatctttcaactcaaatttaagttgaaagtttttgaaatttaagttgaatgcttttgaattttgagatgaaaattttcaaatttaaattgaatgctttgaattttgagatgaaattttttaaatttgagttaaaagttttcaaacctgagttaaattttcaatctcgacttgattttttttaaatttgagtttgatgttttcaactctgagttaaaaattttcaaatcttcattgaaagtttttaaatcggagttgaaaatttcaaaaagttcaaaatctttagcttgaaaattttcaaacccaagttaaaagtttcaaacattaatttgaaactttttaaatcctgacttgaacgtttaaatttaagttggatgtttttaaatctttgacttgaaaatttaaattttaacttattagttttcaaatctgagttgaaagttttcaacgagtgaagagaaagtagattggataaggtgtacgctgcttcgctcacttccgtatgtctccttcaaatagaaacccctataatcgcagctactgggatgagggcctgtttagatttcttggcaaaattttacaccctatcacatcgaatgtttggacacatgcatggagtattaaatataaatgaaaaaaaaaactaattacacatattgcgtgtaaattgcgagacgaatcttttaagcctaattacgtcatgatttgacaatgtggtggtacagtaaatatttgctaatgacggattaattaggcttaataaatttgtctcgcggtttataggcggattctgcaattagttttgttattagactatgtttaatacttcaaatatatgtccgtacattcaatgttacaagctaaaactttagcagcatatgccatgctagccttcgtactactactttgtaaggaatttttttttcagattagagtttctatctagactctattttgggcctgttcactttgatgccattttcaaccttaccaaattttagtaaagttaccaaaaatatggctacatttaatttgctgccaaattttgttaactatataagaaatccttaccaggttttttttagcatcaaatttaacaggcgcttggatactgaaagattggaattcagttttctaccctttgcgaatttgcgaatcagaacagcaaaaacctaagcaaaccctagctccggcgatgcctcccgctgccgccgcggaggcggagatctccccgccgcccccggcggccgacgggggggccatagcggataccgcggaggctggtgtcgcggctgaaaaggagagtgacgggatggaggtggaggatcgcggcgaggtggtctcccaggaggccacggcggtgaagccggatgaggcggaggagcccgaggaggatcttgg

SEQ ID NO: 14671 - DNA, 5050 bp, Oryza sativa
cgcgcgccgatagagggtctcttccaccagcacgtagcgcttggagatgcgctggacgcgttcactcccttcgcggtcctcgggtagagtcttatctgcgaggtacgcctggatctgagcgattccaagcaatcaatctaagggagctgggagcgctcccctcgggtcccgaggcttggactccgacgggcctcgggggccgttcaggcgcgtccgtctcccctagggggtcgggtcgcgccgacggctgggcaagcctttcttcaaagctgcccggtggggtctgggctcgcgaggaagcaagccttgagagttcgtcggcgaccgcgttatcccgtctgggcacgtgccgaagctctatcccgtcgaaatggcgctccatacgccgcacctggcgtacgtaagcgtccatctccgggtcagagcaccggtactccttacagacctggtttacgaccagctgggagtcgcctaacacaaggaggcggcggatccccagtccagctgccaccctgagtcctgcaaggagtccctcgtagtccgccatattgttggttgccctaaagtcgaggcgaaccaggtatctgaggacgtctccactcggcgaggtcaacgtgacccccgcaccggcgccctgaagagacagggagccgtcgaactacatcacccagcaggcggtgtgaggcagctgtgaggggcccaagctggcctcgagggcggagacgggctcgagagctggggtccactctgccacaaagtcggtgagggcctggctcttgatcgcgtggcatggttcaaagtgcaaatcaaattcagagagttcgattgcccatttcaccacccgtccagtaccctctcggttatgcaagatttggccgagggggtaagacgtaaccaccgagacccgatgcgcctgaaaataatggcgcaacttcctcgaagtcattagaatagcgtaaagcatcttctgggcctgagggtatcgggtcttggcgtcccggagggcctcgctaacgaagtagacgggccgctgcacctttcggcggggccgatcctcttcgctaagggccgcatctccagggcgctcttcgtccgagaggccgcacggggcgcacttggcttctgcgccgatgacctcggggtcagagggcgacaggcgcggccttcccgcagtggccccgaggccatcctgggggtcgggggcgcctggcaccgtcggacaagcgggcggagggccagctccggccgtcgggggcctcgggccgccgttcgactcgggggcctctcctccctgctctctcccgggtcgagtcgacacagggtggggacgcgcgaagtgagggttgtcctcgtcgcgctccacgaccaacgctgcgctgaccacctgcggggttgccgcgaggtagagtagcagcggctcatctggctccggggcgaccaggatcgggggagaactgaggtaatccttcaactgagtgaaggcccgctcagcctcctctgtccaggtaaacggcctggagcgtttgaggagcttaaataggagtagcgccttctctcccagcctcgatatgaaccgacttagggcggccatgcagccggtgatgcattgcacatccctaagctggctggggggcgcatccgctctatagctcgtatcttctcgaggttggcctcgatgcctcgggcagagaccaagaacccgagaagcttacccgcaggcacgccgaacacgcatttgtcggggttcagctttatgcgagcggagcggagactttcgaaagtttccgctaaatccaagagtaaggtctcttggttgtgcgtcttcacaaccaagtcatcaacataggcctcaacattacgtcctatttggctacccaaagaaattcgagtagtacgttgaaaagtaggacctgcattctttaacccgaaaggcattgtcgtataacaataagttcctatgggggtaatgaatgcagttttttcctcatcctccctagccatgcgaatctgatgataaccagagtatgcatctagaaaacacaaaaggtcgcaccccgcagtggagtcgacaatctgatctatgcgtggaagggggtaagggtccttaggacatgtcttgttaaggtcagtgtagtcgatgcacatccgaagcttgccgttcgacttgggaacgacgaccgggttcgccagccactccggatggatgacctctcggataaatccggcctccagaagtcgcgccacctcctcgcagatgaaggcttgacgttccggggcctgccgccgcactttctgccgaaccggccttgcgtccggccgcacggcgagacggtgctcaatcacctccctggggaccccgggcatgtccgccggtctccatgcgaagacgtcggcgtttgcccgcaggaaggagacgagcgcgtcttcctatttgtcgtccagaagatcaccgattcgagtggtcttggacgggccgtcgcccagggcaacctccttgaccgggaccttgtcgtacgtgatcatccgctgcctcggggcggctgggacggagggtctaagcctctcgtcgctgcccgcgggcttggacgccgcggcgaggtggtccgcgcgctgctccatacaagcaagcgcgactttgaggtcgccatggacggtgatggggccaccggggcccggcatcttcatctggaggtaggcatagtggaccgccaccatgaacttcaccaacgcgggcctccccaggaccgcgttgtagggcagactgaggtccgccacatcgaagctcacccgctccgtgcggaagttggcggaaccaccgaaagtgaccgggaggtcgatatgacctagcggccaagtgtgccccggcgtcacaccgatgatcggctgggacggtcggagcaccatccccgggaccttgatggcgtcgaaggccgcgggggaaaggatattgagggctgcgcccccatctatgaggactcgccccaacttcacattgcaaatggtgggggaaaccaccatcgcgatctgccctccccgggcaacgcacggcgggtggtcggtctggtcgaaggtgagggtaacctccgaccatcgtgcccgccgcgtcgcctcatgggtaggggcagcggccaaaagctctcgcttcatggccttgaggctccggcgagaagcgtgagtgcacgctcccccatcgacggtggcgatggtggccccaggtcgccatcgtcgatgtcctcggtgggtcccttttgcttggcctcacttcgccggttgccggagggagccgccggggccttgccctcacggcgctcctgcctcctctcctcttcccacttcctcgtccgctcagccaaacttttgaccgcgcggcagtccgcgaggtcgtggagggaggtgttgtgcacggtgcaccacttgccagtcgggcgctccctgctgggagcgccggcctccttctttttgtcgctcgcaggcctcccctttcgggtggcccgcgaagcaccctcgacggcgaggacatgaccctcgtcgtcggaatgggccgacctcttcttcctcctcctgtcccgccgccctgaccgagcagcggacccgggggcggccgaagctgccacaccggaaccggaggagttccaggtccaggcctcctccttgcgagccactcggtccgcgagctgaaaaagctccgcggtagtctggggctccttggaggcgatcttttcgagcatgcggttgtgccgcacgcccccctgaacgcgtagatcaccacgtgtgcagggatgcatggtatggtgttgcggacttgacagaaccgctgaatgtacgagcgaagtgactcatcatcccttcgctgtaccgcgtgcaagtccgcttcttcacctgggcgctgatatgtgccttggaagttcatggtgaactgctggcacaaatcctcccaagagtggaccgacgcgggtggcaagttcattagccaaccccgcgcctgtcccttcagggccatgggaaagaaattcgccatgaccctgtcgtcacccccggcgtcctcgatcccggtcgtgtagacctggagaaactcggcggggttgacgcttccgtcatatttttcggcgatggtgggccggaaccttgggggccaacggacgtttcgaaggctcgccacaaaggctctacagccaacaccaccaaccgggggcacggagggctggcccccgcgcccgtactgaagtggcgctccggacgaggaggcgccctccgttgcgtgggcagcacgacgaccattgcgccgacgctcgaaaccgaggcgggcatccggccccccacgcacatcttcctgggtcggaggcgttgacgagagaatggcagacgaacggcgggtaacagccgccgctcgccgcgccctccacctcgacgacacggagccggcggtagcagcgccagaggccttggtggcggaagaccgcccaccggcacctaggcgctgctgcgccgtcatgaccaagtcggccacgtcatccaaccaacgtcgggctagagtctctggatcggggacgacgggcgggtgacgcaagagcgcgcccgcagcttggagcacgccctggggcgtgctgccatcgccgtagacgaggaggcgacgctctccgtctcgccgtccttctccatcgctcgtgggcggcaaagttgcggatctttcgaccccctcgagcgcctcctcccgcctaagacttcggcgagaggggggcggtggagtacgagctcgacggcgcgggttctgctccccgtcgtcaccgctagcactcagagagaggttgtgcgcttttgctcgttcggccattgggttgaacgggagaagcttggcgcacacgaaagaggatgagagcttagaaaaacacacgcgccccctacatggcgcgccagatgacggagcgtggggctcctcaccgagagaccgcgcaggcccccctttgccggttcggcggggggcgctaagtgaggttctaagccctcggtctgtggaatattcgcgagagaggcaatgcacgagacatgggcg

SEQ ID NO: 14672 - DNA, 4658 bp, Oryza sativa
atggtcttgtagcaccatgtggtcatgcatatgtttgcaggagcggaggcatgcatgcaggcctaacatagctagtgctaaagtccttacgcttacctgttttagagtttaaacccctttaaatcatcatatgatatttggattaatgatctaaacatcatctctataacaaagcaaatacaaaaggcaggtttttttttatctcatggccgcacggaatcgtggagatgtccattaaactcataaattattaagtgtattggttatttggctacaaaagtgtgtcactacaaattagtcgccggctctctttttacataattgatagaaattcgatctttatatttataagtggatatatacaggtaaaagtttcacggctgcatatactcatatctcatgactgagatacatacaaatacaaacaaatcaaaaataaaatattagaagtctacctacaagattgttctcatcgctttcaactggaaggatagccctctccatgccgtctcactaccattgcagcaatcaaaagcttccccatttcgtcatgagcaaatacgaaggctagaactagtccgcctaattgttggctctcttatctcttcatctattttcattccacgtaagattatactaatatcaactaacttgtagctagtctatttattgactacttcctcgtttcacaatacaagactttcgactttgaataaattcatacatcaatccaaatatatgccttatatacgtgttaaagtttatatagatattagtgtatctaaccgagggatggagaagctataatatcttataacgtgaaacaagcatagtatcggagtatatcttattggccctgctgctaacaattagccgatcattgtcatcttattgccctgcttatttccaatagtcaatttgatccctaaaatgatgatgggtgggattgcctttctcgaatcctgttccaccacaggatcgaagagatctcagatcgccggtgcttccacggagaagacgaacaagcgccattgtccagatccctatggccgaactacccgtggattgtccagatccccatggccgaagcaccccgtggggcccacctgtcggaacccgccaagcgaaacacaccctcttctcttcgtcaagctggatcgcaacgcaagggcccgcgtcctcttccctttccagccaaaccgacgccgatgctgttccactgcagggcgggccccaccacctctttccgagccatgggtccacccgtcagtcacccaagaaaaaaactaattgctattgtgggtggggtccaccccctccacgtccacgtgggccacgcggcatccgggcccactttcagtgagcgaggggctcccttcttcttaacaccggaggagagatccttcccggccgtctcctccttcccctctccgctcgcctccgcgattcccttcccatttcgccgccgatgaagggcggcgggggcgcggcggcggcgtcggcggcgccgggggactacgtctacttcaagtccgtcgtcccgctccacaagatctcggtaagcaattttgcacggtggaggagctccccccctctctcgcgtgcgcctcgctagtgctgctggcggcgtggatttcggtcctcggcggtggaatttggtgcggttggttgtggggattgtggttgaggagggttcccatgcgggtttttggggttgattttgcggggaggatttagcatgcgggatctacgggatcacaatgtctgggttggatggataacggggtccaagtatgtgtatggtttagttctagttttagggagggaggaaatgggtttaggttgattggcatttccccgttctggatgatggcatttggtgcggtttttgtctagatcatgatcatcaattcgtcatgatcatgagtaattcgggcagcatcttttgctccgttggatgagatgccgacaatgattcgaagctccgatgtttatgtcgtcatttctctccagtgccttgattcatagtatctggttatgatcctctcttttttttagagagataaagagcgttaagctttagtattccttagttactttgccttaaatttcttaaaatctcgtcaactccaccgtctagcaagtgaacaaatcaagttatctagtagcaattaggggttggtttggttagatgtaacctgctgactaaatttggtacctatgggagttatccgtatatattttttatctttgccttcttgagtgtcatatgcagtgtgtcttggtgattctgtgcagaattgacactagtaatgtgatctgaattgcgatgtatgatgggattggcttatggtgtcccagagtccccatgtttttattgatcttcttttttcctgcaatttctttctttttttttattgcttttaccttgctattgaaatatgtgtgcttgactgcttgcttttcgctatgcataatagaatatcttagattaagctattttgctttgtctacttaacttattcatcgattataacagcagatatgcatattgcatcattctctgcttacgagtttcctcaatctgtacaaagtgaactgtaggatgtacaaattttgaatgtgaatatgcgttacatgccaacttcttctcaactttgtattattataatgtgtgatggatgccattctaataaaaaccaagctgctttcttcaattctttgcatgaatttctcaattttattcatatggttgaccagtttctctgctttgttcttcaacatggcagaattataatttgtgatgtatccctttttgaagaaaataaatttgctgccttcatttttttaagaactaattttttaatcattacatacgattggctagattctaatctgtttccttattggaggttttgtagattggaccgaaattatggaggtactatgattttggaccaaagactgttccacctcttgtctgcatcccaggaattgcaggaacggctgatgtgtactacaaacagatcatgtctctctctatgaaggttcctagtatctgctttgagactatttttttcatacctgatctggttttggttttcagtttcatgcatacctacaaacatataccgatatgtttattatttgcatttgtagtcttgtagtgctaagttttttttaaaaaaaaaactacaaaaaagtcatggtcaagtgttctgtacttggtccttggacctgttctcaatcattctaccaaacaataatttcgctctcaacataaacagtttttatcttgaactactaaaatttgaagtatcaatgaagatctgaagtaatttggaaatattagtacatgatgcatagtaagactgttaatatgatcaagaatccttgtattcttggtgcagctttagtacctttggatgtattcatctttaggttatatttagtgtgtcagttttgaatacgaacatctccatctacttgtaattaatttgaatgccactcatatatttctgaaaccttgttgatctctgttctataggcaattagttaatcgcaatttactacacccttcatttctcacttctctttcagggttatcgagtgatgtcaattgatgttcctcaagtttggaatcaccaggaatggattcattcatttgaaaaatttttggactccatgaatatccatcatgtaaggaagtcttcccttccttctgcatttcttttatgcattgcagtcttagaactgtccaaccattcatattttaagccatgtattcttcatttccactcttcttgtgcctcttgcaacctataaggctgtgttcgttttgttgttttgggggggggggacccttctccccagcacgcaaaacggagtggtggattagcgcatgattaattaatttttaactcaaaaacttggaaaatagattaatatgatttttttaaaagcaacgttcctatataaagtttttgtaaaaaatacaccgtttagtagtttaggaagcgtgcgcatggaaaacaagggaaatagaaattgggaaagtgtagtgtagaacgcagcaaagtatgtactccctctattccattatataagacacaaccacttttcttagatgtttcataatataaggcatgcatgcaagcatgaaattaactattacatcttctccattaaattattacttttttaaatactccattctcatgttatctaatcctattggatgcatgcattatatttattaggatgattcaaactagaagatgataataattatttcttggtctttgggttaagggtggttgtgccttatattttggaatggagggagtatacaggattgtcatagcagtgagaatataaatatgctatagtcagctctgaacaatgtgaaatcaatttgatgttacctactacttcgtgaaagactgcttttgcttattctttctgcaattcccagtttgcatgattcacttctttattaaggagtctatagtagagtgtgttagtttgttccttgtatgtcagcagaagtttttgtttcatttcgttgagttttgagttatttagtactaatttatttattttttcattggagaaaacaggttcatatttatggtacatctcttggtggatttcttgca

SEQ ID NO: 14673 - DNA, 1767 bp, Oryza sativa
agcggtacctattgacaggaatccgagatggcccccatgaaccgtttattgcagactcagtggattttgttgtgagtcaggtcaggatcaactgtaaacattttatttgatgtttgaactaatttcatacatgttataaatatgagcattcaaactttatctgaaattgtaatgttaggtattgctagttagatgactactctgtgcttgacaacgcattgttactcagtgttgctcttctattttactgggcttgttattgttgttaacaaattaaaatctaaattttgcatgccaggttgagacgctgtcaagagatgatctctcatcaaggttgatgttaaatgttaatgttgcatcagttggatcattaatgctacctgattcactcatcactataatggatgtaagttacctcgacccaaataatacaagtgattctcatgtgtttctgtttatatagggtttatttattattattttccattctattgattggctgcaccagttaagagataatctaaggctagcatggtattaagaaggaatgattcttaatcagtatgtcatgtgtaggtatgctgggagataagcatgctaaatttttgtaccttagaagttacaatcaagtatgaagttgaaatcatcagaaaagggtgcccaagggttcccattatcagagaccttgagcatcccagtgtcccttgaatgctaactgtgtgtgttgaacatatttgcacagacaaacgactattccgctgttcctcagcagttaaaggaccaagtgaatgaaaggtacccaggtgcaaggcgtgcagtactaaagacgggtggtgatttccccttcctgtcacgtcctgatgaggttaatttgtaccttcaggtattgtaaacgcttcttctgcaatctttcagttttgaaggatttatgaatgacaattttgaaaacaatggcagctacatttgagacgagttggagtagaacctagaccagatctggtccaaggtttcacacgtaatggcagtgctgggagctcaaaggaccaaaaagatggtggaaacaattttgacaatcatcctggagataatggtggccctggttcagggggtcatgatcatgagacacagaattctggatcagaatcacatgattctgatgaatcaataccaacgagcacaatgcttgccaataccattctaggtacggttagctcaaccctgcaagcttcactatgtgtgctcttgatacatcattactatgagtctgctttgtatatttcgtcgagacagccattggatgtatgaagtagggaatcaccccttttgcccccatgtagagctcgctttgtagaatatcatcgtggtacgagtgtcatagcttctttggagtgggttcttacttcgttgctgccaacgggaaaggcacatcaacaaccaggaaaacaacttctgtatgtttgtatattagctcttgtttctttatcaatccttctttttgtgtttctaggcctgtaaattgaatttgatctgcctgagacatgaatatgattgcttaattttcttgtagttgcaccataaaaagttgcgtacagtttcatgatttcatccaacttatttttcaccaattcatgattgttatgcctattattatatttgattgccatcaacatatctatcatgaacagatcgtgccaatcttcttgtggcaatttctgtacatggagggataatcagattcagttgaagtatctacctttgctatttctg

SEQ ID NO: 14674 - DNA, 4828 bp, Oryza sativa
tctctttttcttctcgtttcgttgggactactaggtgaggtagggcggatttcatagcctaccattttgatcctgaaggtgtttttccttcctccgtccattttccattgcactgtttgtaaaccaggtgaaattatttctatcttgatgcatgtccatagctaagatatgtgccgcttggttgcagtgcgccgtaccgaattgatattgaaatcttcaaaagcctcaccctttgttttttatttttattttttggccatcgtatgagtccccatgtatcaatcgttcaggaaaatcaacaatatatttcgtacctgtacactgtcagtttctaggattatttctgtactcctatttcttctgttagctggaaccagcatcttcgctagcgtagcatcgttgtgaagtacttcattccgttgattagtgcttaattaagaacttatagtacactggaggcaagtagaacagccgctccagtggcatatacagagtagttattgtataaccaatattgttctacttattagtctagtttcctctcatctctcacgaagtactgtcatcttaaagatataaattgtacgagcaataaggctaaagtcacatggctacagagaatatccatcttaaatctcatgtgtatcattttatcatacaaaattttccatagcaacaatcagggttacttgtacgaatgtacgattgtagtttcagatggggcttttgttattcatcatttgcctgaatttttctaatctagtaccatttttttttcacaacagctcacatcgcattgtgactcgtacaacttcaaaccatctttgtccccctacctgcggcgtcacacactgcacccaccactggcatcggccacctctcctcgtgtgctacctcccttcctcgccggtgtgcgaaactccaccgtctctgatagcttgtaccactaagatgccatcatcttccgcctcataaccaatgtatatctacactggtccgctgccctccttcattcttatggctttgacgccaccagcaacacaccacggcctatctatgtccatcgttcatggtcagtcttccaccaccccgcccatcactctaaagccaccatcaccgccttctgcctccatcccatcgtggccaaccctgaaaccctaatttgtattggagttcgtgggttgtaggcagaaagtttgtcgctgttatcactatcgttgtctacgtctatggtgagtcgtgttgaccaagagttatgaaaatataatgtggactaatcaatagtattccttccattttgaattacttatcgttataaatttctcctaagtcaaacattttaatctttggcatatagtttatctttataagatttacattattaaaaaaaaaggagatttggagggagagacgtccctctaaatattttaaagaagaaattatgagcatgttagagattgaacacgacacatcaggattgaaaccacataccacataccccttaccactgcactatcaacatctcataagatttacattattagattcactataagaaattttgatataattcacatgtaactaatggtcaaatatcaataagtttgactcgacggaataagagagatcaaatattgataagccattcccaattcgcccaaatcgtggcctttatgaacaatcctagcaatgcaagaaataatgacacattaatttgagtttttttcaattaaaaacgtatgtagttcactgatatggaaatgcattgaacttaaatgacacaattttttgttggagactagaagaacacgcacgccaagttaaagcagagacagcaagctcgtcacacgataatacttaagtcgaaccatgtagcttcgtccccgacgcctcctccggcgtcacctcgccgcggtgcccttccaccgccggcgccggcgccgccgccttgaacctcgcgtagatgtcccccctgtagaaccccctcgtcctccacaccagcaccagcgacacgatcacggcgaagaacgtcgccgccgtcacgatcaggaacgacgccctgaagcaccgcacgccggcgcacgccctgtgtccggcggcgccgccgccgccgttctgcctcgccgcctcggcgtcgtacagcgcgccggcgacgcgcacgttgaatatgtacgcgccgatggggctcgccaccatgcccaggttgtagagcgtggcgtagtacttgagcccgaacacctcggagacgatggagaagagcagcgtgtacagcccgccgaagctgaagccgacgacgacggacgccgcgtacaggccgtgcggcacgccgagcgcgatgaggaggtagccggcgctggagacgacgagcaccagcgtgagcatcagcggccgcggaaacctgtagcgcgacaggaggagctccgagagcgagccgacgccggcgcggccggcgtacatccagatgttgatgagcgaggcgaaggtgttcacgctcctcgccgggtaacccagcgactggctgatctgccccatgttgtcgatcgccgtcagcgagccgccggcgccgcagatgacgcacacgaacagcacaaccatgtccacgctcaacgccgcctgcgggatcgtgtagtcctccccgtgcgccggcgggttgaacgttcgcttcaggcacgagccgacgccgcatgtcgtcgccggtggtggtggtggtgtctcgacgacgggctgaggcggcggcgccgccgcggggagagtttcttggacatcggcctccctccggcttctgagctcctgtctgatgacgaccgcgagggggaggaggaggaggatgaggaggagcacgatggccgtcgcggcgtaggcggcgtgcgagaagctgatggttttctggagcacgatcatgacgaggaggtaggaggcgacggcgaaggagatgtagaggaaggagaagatggggccattgctgcctccgccgccgacgcggccgttcgtcggccggtgcggcatgacgcggacgacgcggaggaacacgagggagatggcggcggggagccaggcgatgagcagtatcagcgacccggcgtcgtggccgccgccgtagatggcgaggtagagctgcgggaggacggcgccgctgagcccggcgaaccccttgaggaggccgacgacgacgccgcggctctccgggaagctcttgacgcaggtgacgagcgcgccggtgttggcgaaggcctgcgagtcggcgccggcggagatgcaggcgcacatgagccagagcggcgggcgcgcgacgcggccggcgacggcgaggtagacgacgaggtagcccgcgaggctcatgcaggcgcccacggcgagcacggccgacggcggcgccacctcggcgacgaggccggagacgatgccggcgttggcgccgagctccttgaagaaggagagcgtgttgagcgtccgttggtcgtagcccagcgacgacttgagcgcgccggagtagatgctgaagatgttggtgccgcccgacgccgacatgatcaccatgcacgcgagcatcatgaaccaccgccccgtcaccacctgcttcgcgaacagcgccgccgccggcatcttccccagccgcggccacggtctcccgccgccgccggcgcccgcgccgaacaccatggcgcgcgacgcgacgcgacgcgcgcttacgtagctggcttgctctagctacgtactcgagcttgtcgcttgcagctgggatagcgtgagtgttgtacatgtatttatagagtgttgaaggaatacggtacgtacgtaacgtatctgaaattccacctgcataaattaggaaagtttattttcaaaataaaaattgcttcaagcttcttaaattagaagagtctaccacttcaaaaggaggggaaaaatacagagaaatgtgtgtattgctcgattataaattaaaattcgtgaaggtttctggttttaatgtaaaagactcaaccgtttgatacagctcctaggagaattaggagaatgaagcggagctgatgagtggtgagaatatccctccatcctcgtattgtaattttttagcaacggagcgatagcttcgttatatgttatctaagattttgaaagtgtttgatagagttatagctctatgggacaaaaacatcaaagtaaaagttgtatcaaacggtgttttgtttattctgaataaatatccgaaattcagagagagaatcttagtacaagcgatggatgcataaagaagtattgcatgagtagaatgagaggttggggagaataaatattgacatattctacctaaaagatagaaaatgaccatgtgtgacaacttagttagttatttgtacatcgtcaaggggttgaactccgtggctcattggtctttgcacgaactcgaccaccctagctcagccaccggtcctcactcctcgctcctcggttagtttgtgaagcaggggcaaaaaatttccagcgacactttcacaaaaatacattttagcattagaaaaaatattttgttgtccgcaccatactacctttaaaaaaaatcatttgatgctcaagatataaaactcttatccctccattcctttgtaactttttttttcacagaaaacttgttagtgcgccattcccaagtcctaacatgcgtttttttccaattttaccattaacggcacaaacaaagttttttttccttttttcccctaagactggagcgtttcccttgattggacaagtatcagtagctttttgctccatgtgcattttccaactagattgggagtactttaaaccaggagcatttagccat

SEQ ID NO: 14675 - DNA, 1813 bp, Oryza sativa
ttcagagtcaggaaaacgatgacgaagttcttgagcattttcccaagtgaccacatgcggatcatctacagaccaccgaaccagcaactgctccaccatcttggatcctttccgaatgaagcgacgatccagcacttgcgatggaacaactgacgtaccagcagtggactgaattctgggcaattgagaatacaccacctcacttggcaccaatgctttcttaagctgtgagacatggaccaccgggtgtataagactggtagctggtaaagccaatttgtaagccacttcaccaactcgagagagcacctgaaaaggaccataaaaacgaaaagccaacttgcgattagcacgagtgaccactgactgctgcacaaccggctgtaatttgagataaacccagtcgctgacaacaaatgttctttcagagcgatgttgatcagcctgaaatttcatacgagcttgagcacgcaacaaatgatcccgaatcaaactctgaatctgctccctttcatgtaaccagtcagctaactcagtcgactgacaagctgcatttgctgacaaaccaaaataccgtggcttatgtccatataatacttcaaatggagtggtccccaaggctgaatggaaggaagtattataccaatactccgctagagccagccatcgactccactgagaaggacaagcatgcacaaagcagcgaaggaaagtctcaagacattgattcacacgctccgtttgtccatcagtctgaggatgataagaagaactcaaccggagttgtgtaccagccaacttgaatagagtagcccacagggtgcttgtgaaaatcctatcacgatcagagatgagtgactaaggtaatccatgcaatttatgaataaactgcatataagcttcggccacatccatagctgtgaaagggtgagcaagaggaacaaaatggctatacttggaaaacttgtcgactacccccaggatacaattaaaggtagctgactttggtaagccttcaataaaatccaaagaaacaacttgccaagcatggtcaggtacaggcagtggttgcaacattcccggatacttgacatgttctgatttggcttgttgacaaacagagcaagcagtaacaaactgcataactgtagtgcgcaattgaggccaagcaaacagttgtttcaccctttggtaagtgacatgaatgcctgaatgacccccaactggtgcagtatgcaagttagccaaaatcttttgttgaactaaggtattgttacctatccacatccttttgagcaggtgtataacggtagggacgcacattgactggagtagctcctggcatgggtggaattgtatgatcaaaaaccctggacggtggtaatccagaaggttcttcaaacacctgtccaaattctgctagcacttgttgaatttccacaggaatttgctccttgtttgaagattctgacagagtgcacaactgaatcaggtgagagatggcctgtctatccttcaactccaaaaactgttgagaagagagttgagaacactgttcagtttctgacaaaattccctgtaatgtaatggattcctttctccaggaaactgtcaagagcttgttaacccaatcgacctgcataggactatgagccatcaaccagtccatgcctaaaatcatgtcataacttcccagatttaacacctttaagtcagtataaaacacccatccttgggtcatccattcacaccttggtactgaagtaagacaagtaagtatggaaccgtttgctactttcacttgtactggtgg

SEQ ID NO: 14676 - DNA, 2580 bp, Oryza sativa
gtagattacacatgttccctgagttcgatatccttttgcggtcacccgaaggtgaagtgctacagcggtattccgtgcgcttgcggatttatctgtggtcgtaagaaataccaacacatacaaaacggaaccgtggcggcaaaggggttggtagatacgacgaaccgcgaacggggggagtgaaccgggaatggttcacgaccaaaggagggagaggaaagaattattaattcaactcctgacattttaacttgacagtattacttcctctactctgtatattcctctgaacgtcctgttaatgatttaaagcaaagctaataccaaaaaaattctccctgaccattccaattattaaatgcattattaattagggtttcctcctagttaacagagttatatagttaacagagttatagatgattcaacaatgatttagaaactacgaaaaatggaaaaactccaggtgtgatagccgccaagtcaaccatagctagatgcacttgtgtgattatgatgaatataaagcaacaccggcttcgaccaacaggagtatggctattacctatcagataaggggcccgagcgtgtataaaaattcttgtctccatcttttttacttcaatctcgcatataccttggtaccgacaatctccatatcatgcaaataccatagtcgtgactaaaaagtcaacaattaggaaaaagtatagtccattttattccttgaatttcgctcgaaggttatttttcacccccgaaagttggttgtcacacccaaacttttaaaacaagataaaataacaccgtaaatcatatttcattgtagttttatttggtaaaatgaacttcaagctgttaattttcatggttgtgtaattaattaacatctacattaacaaaaatatgcataataagagtatgggatagaaaactgccgcatttcagataaaaacatcaggaatatgttataggatgtcactagtctttgataactgaggatgaaaaacaacctgcttgtattgaaaaactgaattttgaacaaagttcaaggcccaaaaaagggctttacccttgaaaaaaaaattacaataggaatagttagcatatttttttaacgatcctagaccagtggcttgctcctggtagctccctaccagttgagctatccactgtttctagtcagcatatttcatatgatatagaacatattttttagaaaaaagaaatataatctaggatgttatttattttattttgaaagttaaggatgaaaaataaccggtttgtaatttagggtgaaaaatatggactgtgaacaaaattcaacagtaaaaaatggcccaagaaaacatcaaagttacaatctgaaaaatcagaatattcatatgttataaaaataatttttaacaaattaatattacaatttgagtaggaaatttcggaaaaagcacaaaccaaaaacacacacagagacgaagaaatagccaatagctcactctttctcgaaagtgaaaactgaaaacccaaaagcccaaaaccctagctctggtgcccggctcggctaccccgtcgccaccgccgttcgtttcccaaattcacacaagccatggtgctaggcctctacgccttcgccgacatcgccgccgacggcgccccccacctcaactccgccgccggggaggagctcgtccgcgtcgagcgcgccgctgccgtcgccctcggctcccgcgcgccggagccccccgggaccctgttcatcaccaccaggtagtaaccgcgcttctcttcgttctccacttcccccaagtagttgcctctccattgcctctgacgcggcggagcgtgcgcgtgtgcttgtgtgttgagctaggagggtgatttgggtcagtgaggtggagaagggcaaggcctacgcggtggatttcctcgccgtctcgctccacgccgtctctcgcgatccggaggcgtactcctccccctgcatctacacgcaggtaatttctttcaactgtagtttgagatagcttggggggcgaacatttgtttgattttagagtattcacagggattggctgatcagctgtagggttttattagtgacatatttgagaaatttgtgcagcttgggtaatatataggatacattccctgtaattactactaatttagtgtttgaattagacttataatatggattggccatcatggtcatgttgttattcaattttatttcttaagttcgggtatctgtaattctgcattgttagcttttggttggggcttatggttcatgtgatgttagatatttttttattttgtttttttaatcaccagctattggtttcaacaaaacaaaaaaagaaaggaactaagtagctctaggaaagaaaaagcttgtgcgcttggagtttcaagtgcttcgggtccaactgagctacttctctttggagtttggaatatggcttggtcatgttttacacaatgtattgtctatagcacttatgaataatctttcatgataagttttatatattcattttattgcttatgtcgtgtatagtttctttggattacatt

SEQ ID NO: 14677 - DNA, 2460 bp, Oryza sativa
tgtttgatctttgttgggatgaagtgcggttgctcgatggatcgtctcgagccgatgcagcgagctattttttttgttcgtgtagcctcaaaggtaccggttcctaaaccggcgtctttgaggacacctcaaaggtgctgactaataggtgctggttgggaaaccggcacctatagcccttttttagtagtggtatgtcacgtataaaaatactaaattttgaacaattatttttatatctcacaaatgaaatcgagtaatttggacaatatttttcacaacaaacatctcatctttatatgcaattaatttgtttggtgaatttaaatgactttttcgttggggttcacatgagtttccatctatttaaattgagtatccaccacatatttaccactttttctaaatgtctcggcacctatatctcctcttaactttacaatgtaatactcaagccctatttctctttaaccgtctcttgcaagaattagctctatgtaaactatgaactaaaataattaatgatcattgaaattggactcaaccattaaacatgcctccatgtttccttggattatttgggaccagactacataacgtggaaatggggggagtacctagctcgttctgacgacgcttggatctaccgctctatgtgacactgaggtggtctcccttgaagtgcttgtgctggactgctggctgggtacaatgcatccacgcaaaactctcctattttgcatccacgaaaaactctcctataaagttagaaaattttgataacatagattaatacgtgatatgatatgtcaccctcataaatatgagcaagttcacatttattaacttctacgtgttgaaaaaaaaaaacagggcgagtgcacgtataattagagtttattttttttctacaacttgttgcgatcgaaattgaacttgtatggttgtgaatgtttcccaagttacaaatcacatgttaatttatcttattatgttagaaaaatcatagctcttcgtattcccctcgaacgattagaatcggtgtcctgacccatgcatgcatggttcagcgaagctgcgggaggacacagagaggcatttgctggacggcaagctcagggtggcggtcgcatccaaggccagttaacccggtgattattactaatataataacgaacttggcactaatctaatcagaaacggcaactgggttgagctatagctagctagctagcgagcagagttaacccaacttgcacgattagacccccagcatccccgaccgagaccacgtgaagtttcccgttgcaaactaacacatgcggtacgctatgtacacgagtaggggtagtgtggcaatattgttcttatcaagcctgacagtctgacaccgccgagttaaaaaaaacgcgaggaagatgacaacgcttggaacatgggtcttctgtatcctcttgtataatttagccggtctccgatccggtctctccaagcagatcatctcatagccgcctataaaacgtgtacacaaactccgaattaatcgatcaatcaatcagtgagccacaaacgcctataagctgtagctgaaatcttgatctgtgtagctccatggagtcggccatgaggaggaagatggccgtggtggtgatgtcggtgttgatgatggcggcggcggcggcggcgaactacgcggcggagccggaggaggactgcgcgacgcagacgacctacttcaccaactgcctgaggcgcgggatcagggaaggctgctgcggggtggtgaagaaccactggtgcctgtgccaggtgaagcgggaggcggaggtgaaatgcatccccgggcgccgctgcgacgtgcccaaggccctcaagatcgccgacatggacctcccctgcatgagaaacctcaggtgcagcaagcacgcctgatataaccaaatctgctacgctatatccaacttaattagatgcctactgcctccaagttatgttactctgtttgttactgcatcctatgttttttttctagatgattttgttgaagcaatcaatcccaacctgatgtatactgctcattgtcctatatattattattatggtcggctccggatctcatattcacgatatattctaaatttgtattatttaattatagtggtttagaattttaaattttatttaaaaaataatgatttatccaaatgttatcgacgaaatcgtagatctagatcaagaatttatggggctagaaatagccagctacaaataatcttggatcagttgtacaaaagagagcctcaatcgatcagttaaaaggagctaaccacagaccttaaccttcatggtgtattatatttgcttttccaaatccaatttaaatacccaggcaacgattgaagataactcacaacccctctagaactggaaagctagtggatgaagcagccgcagagtgat

SEQ ID NO: 14678 - DNA, 5897 bp, Oryza sativa
gggagtagtatttgttttcttgataggactggtcagaccggggtttgtgtactgttcagaccaaacaaaatattgtgaatagtgtttacaatgaacaggtttttttttgtcgtgtgaagctcttcagaccgaaatgcaacgtgcagtcagaccggctagcccaacggtctgaccggcataattatataattatgattagagtcggtttcgagttgtttattttgatactagtgattatctcgtggttatgacttctagataatttatatacgtgtgtaacattgttttgtgataatgttgagtcacgctatgaaaaaatttgtgctcggatattgtttcttgtttgattcatatgtaggtgtgtcttgatgcttcagaagagtattgccagtgatggattaggagtcaacttgagagaatatggcgttcagacgatcaagatatcatgcgggatgcttaggctaaagaacagtgcacgtgattagtgaagatttcatgtggcttacaagaggaggttgtgtgcatatggatgaggagttgaatttcgagggagtccaaatttttgacaattggagttagaagagttggatacttgtatgggaaggtttctgaatgcattagaagtactgctacgagttggaacgtggcattcgtacagccatctctggatataaatagaagaggggttgatgtctttgggtatcgattttggagtgagttgagttgagtgaatagttagggttttaagtttactcgaattttgagagagtgaagttgttgcactttgtgacacgaatagaagcaataaaggtatatctattttcaagagttctttaatttgtgtttgctcgtgttcagcagttacatcggcaagcatatagcggttagaccggcgactattcggcggttagaccggcggcttcctagcggtgtgactaacaacatcaggcgacatcaacgaaggcaaggaagttggaccggagatacaccatcggtcggactgatggtatcctggcggtcagatcaccgcatctacaccggtcaaaccgttctccatcaagtttgaaggtaacttttaattccgctaaaagtgttcttaattccgctaaaagtgttcggttctttatgttctactatttaatcctctttggtaggcttagttcttgttattcgatcctacgtaaacaaaaaagatataacgattggttgtcctagattacatgcaacattcactagtacaaaagtgatttttgcagatagcccaaaagaggttttcgcatgcagtagggcagcccgcatgctctggagagtctgcaaaaattgctatctttgcatattggggcattttcgcgtgtgagtgcttatgtcgtctgcatgcaaaaataaaaatcgcaaaaaaaaccaaaactctagcatcccagtggcggcgactacggcagcggatagccggattgagctgcctcctcctcctcccggccacctactcctcctccttgtcggcggcacacggcaggggacggggatggcgccactcccagtcgttgcctcgccggtggctgtggcgccgctgttggtatttcttaacaacattaatagaaatataattcccagcaatggcgtagaaatattcatggtatactatagttacatatcatatccacaagcgcatggatataccattgtagcatttcacctgagagtattccaagggtatcgtatttatttaatcccgagggaagatttataagagagaactatgctaataatttatatggtacttgtaatagtcagtccaaacaggagttaatttaattcatgggtatagtgacacgaagcagaagaactaaacactctcatacatactaatgctagactaagtggagaaataataataaaaggattcattcctatacctctattataaatacaactttagtctataatttctagtatacaatcatacagttaataccccctttacaatgccctcctggtgcttcgagaaaccacccctgattatcgagttcgttacaacaatccgtcatggccatccaactggtactaaatacggaggagtaccctccctaggaatataacttaggattatctactaatgtggaggaatacctgatgaggacatcaacaccaacgatacatccatgcctccacaagtacaacttcatggtcctactacacgcgctcatgcacgtcaaatcaactatcaagtacatttactcttaaattcatatgattcttatttatatcccggagacacgtacacttttgttttactcaggaaagtggagaggatcaaacggggagaggattcggggggatggattcggactgcagcacaacaccaacttctgacggccgccacaacttcatgcgaactccgatttgggtgtgcaagtacttcatggaaatcttgtcaagtatactttcaaatggatccagcctcatgtccatatcagttctggagcggccgcaatcttcgttttactaccgagtccttttctgtccacagtgctgcgtcacctctttgggtccaatgggccgtgtatcttgttgggtccattagagacgcgtcctagggttagagaacgaccccagcacccctgtggtcatcctcttcctcttcttacagctttctccgctgccaagaataatcgggttttgtttagatcaaagtgtagcatcgctactttgccgagttgatcccgtgatcgattagatcgccggattgcttgttactgaaccccacttgttactactgttgattcaatccaatatctttgattcgcaaattgagttgcttgttcatcttgttcttgctgattctcgattgcttgcaggaacaaataccctcgtggttgggttgatcgtgcatccgtcgagattcacggccgcctttggagttggtgtaacgattgctaaggcacaacatccttggatagttgtagtcggatcgccaacatcgcttcatccaatcgacttatccctctcatcgaaagatcgggacacactcgcgcacatcaatacccatactgagttgtcaccatcagcggtccacctttactgttccgcagcatataaacccaaataatgctattcaataatctaagaaccacgcttaaattactaaataatactctacaatcatcgtcacaacttagagtagtcattaacatgatcattatacccacaccaatgcatatcatgggtaggttagctgtacaattataacaagataaatatatcgtcaagtcggtacttgaatgattaggataaaataaagtaccacaattgtatatagaagaatattccataaatcgtacaatccttacaagagaaggaaaagctactagagccatacccaaactcttccgaaaactccgaggactaaggaaactattttattcctactccactagctctagaatactaactaaacttgagagagagctttgatcttcttgcttgagtatgtgttggagtggagaatgagctcctccttaaataggctgccaatgacggttgtgacggttagaaatgtcctaactgcgctgcaaccgtcattgaagagtgatctaaagcatccacgtggaaggccaggatgggtggcctcggctagggttcggccgaacctaagctggcccattcggccttcatttttagcaggtggattccttgttgggctttgttcccaatggcatgagagttgtgcttgtttgcacgtgttaactttgtgttgtcagcccatctattcagaagtctgccactcgacggacgacaattgattgtttgattattttccatcgatcttcctccattttatgtagcaaactctgcaagcaaataatatccaagtacaagtggaaatagattattctaaaacaaatatgtattgcaagcatagctagctctcctttattttagtaatattgactgtcgaaattggtctataacgaccgtcaatagccgccaccgccccctcccgtacgtcgcttgctcccagccgtgctcgtccttgtcggcagcggtgccaagctgccgccgtccgccgcccgccatcgtcacccgccacccccactgtcgttgtcgtcgtcgccgtaggatccgccgccggtcgctcccgctgtcgtgaggaagagagagagaggaggtgagaatgaaaggaggggaggaagtgagaagaagataagggagagagaaactcagagataaggtttcaattgtttttgaatatgatgaaaaggaaagaggatgtagctcagacttctgtgcggacctttaagaggcctgtctacgaaaatatattttcttgtgcagtcgcttaagaggcccgtctgaaaaaatagccctattttcctgtgcggctgcttaagagggccgtatgcgaaaatatattttcgtatatgggtctcttaaggagccgtatgcgaaaatgagggtcgatgtttgcagacacgtatacttacgttccgtctgcaacctattgaggtgctcgtccagataaataatttgcgtagtagtgattatgaagatggagcaatgggaaaggtagagttggatgtaatgcagcgcgcgttggatgtaattaacgtcaacgagattggatcagggaacaatgacgacagataaaatagttaattactgtttacttgctatatacgttcgttccaatgcccatccaaagggacatcttccatactgttttgtttctcggtcctctgtttaatttctccaaaatccttctttattcgtgtgtgatttttagatcctatgtttcaaagtgtcctacaagattgtagaccaaattggcataatcagataaattctgattcactcgcaacttcaggaagaaccacaatgctgattcaaggctctgaaaatcatagttgctcacgtgcactccgctgaactatgataatgatctgatgttgtgcatctcgcagcattattgctcacccacatcacatagacctttgacacatattgatattgtattgctctgcgccccatcgatcattactccaatagaacatattctcgtgaacatactagccgactaaggctcaaacataataatcaataagcattagccaggatcccaagataagtgccgtttcttaatgaaacatttgcatgtgcactcttaccagcctatagcacaatctcgcagatatgttccatggaacataggaaaatatacagtgaaaagtgaaaaccagaacttaggtttaaactcgtgtaaactccatttaaaaattcatctaatttcaccaaaagtaatcacacatgtagataattaagatgatgttagagaaaatcctgtccaaacactaaactctccacttcttaataaaactcatagagatcggcactataggtctcaaaacagttaagactaacacctatagtgtttgttcctcctccgtaggctgaaaacacataaaaccaacacctttaaacaactataggtgccggttctaaagaaaaaccagcacctatagtactataggtgtcggtttttttaaaaaagggtacctataatttattataggtgtcggttataggttttagttttctaaaaaaacggtacctataccgagctgagccagtgagccgatcaagcgccggccttatccatcgtatgcatgcctcccatccttatcttatcccttaatttgcaccccccccccctctccctctctctctcgctgtctctgattcaccgtctgtctctcgctctctttgtctctctcgctctctctatctctctctcacctctctctctctcccttgctctctctcgcttgtctcggcggcaatctggcggaggcagcaccggtggcgaccacgcccttccttctgctagatccggccagagggga

SEQ ID NO: 14679 - DNA, 3508 bp, Oryza sativa
gccacaagccacgccgttcgccgggctactgcgcacgcctccaccatccccacccgccccccgccagatctcgccgcggttcgctgacgggatccatggcggcgccggggagccacacccgccgccgcgcgtggccgctgctgttcctcgccgtcctcatgttccactcgctcgccatctacctcttcacccgcggcttcctcctcacccgcaccgagctcgacgtccacagccaccgcgacgaccgcatcggcatctccccgggctgctcctcctggcccccgcccgccgtcgaccgcctcgtcatcgtcgtcctcgacgccctcaggtaaaatcaccacccctcgaatcttagattccccaagagagaaattaaatctcttgttggctactgcgattatactcagtgttgggttaccgagaaagtaggataagtttggagctgacacagttgtgcaatgcactgtcctgcaggttcgattttgtggcaccaagtacattctttcaaggtgatttactccttttatgtattactataatgctcaacgtgtaacatgtgagaatgtgatttgtaactctgagatgaggccatgattcgctgcagagaggcaaccatggatggacaaactgcaggttctgcaaagattggctgctgatgagaagacctctgctaggatattcaaagcgcttgctgatccaccgacgactagccttcaacgtcttaaggtgatcaactctgtttctgttgttgttaatccagatattcattcattcatcaacagagttaccctgaaaaattgttgtcctttcctcaattcagtgcagtataagattatcgcattatatgcattcatgaattgagttgacctgatatgctctgcacgattcagtgcaatcaaatggttgtaactttgtgtgttcttcaccccccaggctttaacatccttgctgtaaaattctatactcaggctctgacgacaggtggtctgcctacatttattgatgtgggaaatagctttggagctccagcaatagtagaagacaacataatgcatcaggttcttgtcacaatctcatcttgcatctaacattacaaatatggtgtcagtaaacttactcagtttattctggataactaaccgtggaagtatgtgttgcctattgtttctttgtactcaatcagtttgccaaaaatggaaagagggtcgtcatgatgggagacgatacttggatccagttataccctgaacatttcaacaagtcatatccttacccttcttttaacgttaaagatcttgacacagtatgtcatatcttttgtaccattcttttccttgttctgcagtgcgagtttttttcctcccataaattttccatgaaattaccagtaattgtatttatcgtatatatcaggtagacaatggtgttattgagcacttgcttccatcattacacaaaaatgattgggacgttcttattgcacatttccttggcgtggtaagttattgtgcattctcttatgccttagcttaaaaatttaatccttttatcctgtccgttttgaataaagaacatgtgagatcaacttcctttaggaccatgcagggcatatattcggtgttgactctaccccaatgatccagaagttggagcaatacaatcggatcctagaggtcagtcacctcatgcacaaatatataatgtggctttatgcttacctgcttatcattcttttaaatttgacctcattatgttctttattcccatatgatggccatattaactatgataatcaaatgctgctatatttaactcatacaggatgtaattgacacattgaaaagtctatcaacatcgggtggtccccatgagaatactttacttcttgtaatgggggatcatggccaaacactaaatggtgatcatggtggaggaactgctgaagaggtgatctatcttatgttttgttgctaaatgctgaagaggaacactaaatggtaatcatgtctacataactaatgctgttactattataggttgaaacatcgctctttgcatggagtccgaagaccccaccaaatgctgtcttgtctgttcttggtaaaaatttatgcaacgctgatctggtacattttcttatcctatatgttctgctaactaattatgatttgagctatcttgccatgtatggcgataatgttatgatcaggactaagttttcaaacaattataattaatattcattggccatattataacctgagttacattttttttgtctagaacacttaaactagaattgcgtacagaagatatttttctaatcccttgcttccatattgaatgccttactgttgtatatttggtttgacatctaaaaccgtagggcaaagtgattgactattttaaactctactctgactgtgttatgcatggctatgaagtactgcatgcagcgttttttaatgaaaagagtgggaatgagggcctgtagattttaggaatgtaaatttgaaataagcagtgattgatgtaatacagtttttggccaagatacatgttaatcgtagtacattttgtttagccagattttgcttgcttttatttgtgactgtagtaatgtgcctactaatcacacgtttatttcttttctagcatggtaaagaggtgtgcgtcagcactatgcagcaggtcagtgctaactgcattcttttatgttgatggcttatatgatcaatattgcttaatttttctccttgttcttagcttgattttgcagtaactatagcagcgctacttggtataccttttccttttggaaggtgtgtacgctttacttggtacttgcttgtttctgttgtttgcagtgtgtgctactatctggtttgactagagacactatctagttgcttttttttttcattatatatactgattcgacttgattttatttttcaattgctattgtccctacatccttccatagttgtagtacttaattcagtatatttacgaaatgtgttctattgtgccatatctagcattggacgtgtaaacccagaattgtatgctctgagtgctggaacatgggataatcaacagatcggtgccaatgattgtacacagcagaatgatctagaagcatggatgcggagatatgctgaagctctctgtataaattgttggcaggtaatatgaaagttcatttgtatttgtttggttgggtggattgctgaagctctacgctgattttcagttaaccctcataggtaaagaggtacattgatcgatattctgccacttctgttattggatttcgagcagaagacctgaaccatgttgcagatctgtattcaaaagctcaggcaaattggtcctctgtcctgaggtctacatgtccagtggaaacaagcagtcaggatgaattaaaggagtgcgcaaataaggaatgcacaagttcagctctgcggttgcaaattgatgcatactctgacttcttggagagctt

SEQ ID NO: 14680 - DNA, 3147 bp, Oryza sativa
acccctcggggagataaaaggcggggaggtctcgtcaccctcaggcccgacccaagggtgaccgcggctacccaaacctctagtcatgataccctcggccccatgtcatcgacaagtactacctttgtttcaggttataagactttctagcattgcgtactactaatctaaaatcccttttattaatctattcttgttctatatcctttataaacaaatattcctagagaataacctgacaataaactaataaaatcctacaaaagcataaaagatggccactttgaatctttgattatgttgcacctcaaaaaaatatatatcatatattaccctaaaaaaaccatacacttttccaatttcagacagccaaaagaagagagagtgagagtctgagagacagcccattcagaggttagttagagttgggccgagcccatatcatctcctatataaatggcccttccgagcgaacctccgccccctccgaaaccctaacgccacccgcgccgccatccccgagcaccaccaaccccaccccccgagcgagcggagcggagaacgcgaggcgaggcgaagcaaacatggcggcggctgcggtgtacggcgccggcggcgcgatgaagggcgggaagctcggcatggaggaggcgcgggagctgcagctcaaccgcatccgcatcaccctctcctccaagaacgtcaagaacctcgagaagggtaatccattctttctctttttcttctatagtttcagttcgttgtcgttcagagaggattagattagatcggatttttttttgctgagagcgcgaagctgattcgtgtgtttatggttgcagtttgcgctgatctggtgaagggcgccaaggacaagcagctgcgcgtcaagggccccgtcaggatccccaccaaggtgctccacatcaccacccgcaagtcgccgtgcggtgaaggtattgaccagttgcagccacctctaattgcaatgcttgattgggtttgaatccatttgtttttgtggtatgtttcgactcatgggtatagctttggtttaggtggttaggaaatggattggtggagacagatgccactgtatagatgccagtgtatagatgcttggttaagctagatcctggtctaaattagtgctcttggttggtgactagtgtggattgtgtgaccattggaatcatttagtcaaaactatttgatttttcaggcaatctctttgttgaaatttgccttagttagagtacttcactaagtgttattgttgtatggccatgttcttatagtgactttcggctatctaaaatctgcaataaagactaccagcaacaagttgccaccaaaatgtaatgaaggatgaatgtttaagttttcgagtgaaagcacatggtatagcaagttgagtagaagggttactattggaggtttgtggtgaataagtttggtttacctgttctttgtcgacccaaccatttcatcacccaaccatttcatgcatggagatggatgggcagcgggatagcaagcgatggacactgtcaagctacaacaaactaggatattcctatgttattcacttctagataagggaatgatctagaggcaagctcagaaaacttgccgttacccccacagtctcatattaagggggcagaatatacagacgtttcttcaattttagtgttattattctccacatgtcataattttaaagatagccaagccaagttctgaagtcaagaaggtttagtaagattttgtttagcagggatttggaaggcacatatgttggtattctattggaatgcaagtgggctggcttttgaacccatttatgggctattcaagtgggtaaaccataggttggtgcacttaaatggcctataagtgggtttgtgggctggccctcttgtatcctgatagtttagtatgattggtaataatagcaatgctacttttaaatttaaggtttgttatggactagtgataactgttatgggatcgagtaccagtggcacaagaaactactggctagtctcgtagcttgctaggtactccctctgtcccaaaataaacaaagctagtacggggatgtggcacttcctagtcctgtactaggtttgtttattttgggacggagggagtatcatagtttgttactcctctggttactatttatctttttggctcctaacctacaaaggtcgcagtgtagtaaaacctcctgcccaaaatgtagctctctttggctttgaatctggatatgaacttgtctagattcatagctagatatagttacaccttgggatggatgtagtattgtactccctctgtttttaaatgtatgacgctgttgacttttagatatatgttgacaattcgtcttattcaaaaaatcgagcaaatataaaaatataagtgaggcttaaggtatatttgatgataaaacaagtcatggcaaaattaatgatacctgtataacttttttgagtaagacgagtggtcaaacgtagatttaaaagtcaacggtgtcatatatttataaatggaggtagtattagagaaggaatccattgataaacaagattagtgctcttcccactattatagcaaccataggctcgaagcctgcattgcgcaagagacttggttgcaaaaagacatcactaaactaaaggatcaaactttacgcccatttaagtggacatgtgagtttgtttcatgggatttattattatgtgaattcattgatttgttaattggacaaagtacatgatatgtttaacttgtaatgtatatcctttttgtgtgccaatcatcctgtacccctgtttacctatgctcatgtagttgtagcatattgttctgatgattgacagtttttttactttcatgcttatctttcatcaatatatcttcaggtcagtttatgcttgcaacagttaaactggacgctctttgttagatgaaaccactttggatgctagttgcttaagctagggaaatttgctgacatcttgttggcttaacttcacattggttgggttttcttgtgctaattcaggactattttgcgttcttttctgaccaggaacaaacacatgggatcgtttcgagttccgcatccacaagcgg

SEQ ID NO: 14681 - DNA, 9899 bp, Oryza sativa
ctgtcactataaaaaatcattttttttcaacgcccgctctatctagacctgtttagatgggatatcacatcagatgtttggatactaattataaatattaagtatagactattaataaaacccatactataaccctggactaattcgcgagacaaatctattgagcctaattaatccatgattagcttatgtgatgctacaataaacatgtgctaattatggattaattagtcttaaaaaatttgtcacgcgaattagctctcatctatgtaattagttttataagtagtttatgtttaatactccaaattcatccgatatgacagggactaaagtttagtccctggatccaaacacccccttagtcacaggcgagctaagagcaggtacattagcaggctataagccagctataaacatatttttaaagagataaagaaaaagagagaagagcagcggactatagatttatagctagctgtagcacggactccaagacgtaatgtgtgtatgacaggtgggaccaggtattaatagtatattaagcaactattgtatgaattggctattacattggatatagatgatttgtagatagtagttgactatactattaaactaaataacatcggtaaataaaaggatttgggtgatgtttagttaaggattgtttgtgaaaatctatttttatagatgtacgctttaagcgagaatcctaattcgcgcgcacgcccggcctacacagcccagcacgcgcgcgcccgaatctttttttcgcgctgtttcttctcttttcttttttcactttctctttttttctttaatttttttccttttccttttttcaaatctggacttgaaagtttttaaatctcgagttgaaaattttcaaaattcaagttgaaagttttcaaatctcaagttgaaagtttcaaaaaaaatttaaatctgtacttgaaagttttcgaatctgagttgaaagttttcaaatctgagttgaaagtttttaaatatttcaaatctggacttgaaagttttcgaatctcgagttgaaagtttttaaatctcgagttgaaaattttcaaatctcaagttgaaagttttctattttttcaaatctggacttgaaagttttcgaatctcgagttgaaagttttcgaatctgagttaacagttttcaaatcttgagtcgaaagttttcaaatccgagtcaaaagttttcaaaatttgactttaaaatttaaatcttaaatcaaaagttttcaaatctgacttaaaaaaatttcaatctgttagtaaaaaattcttaagaatcttccataattacccatcattagtgttaagtgttaactaatatagagtagttatagagagggaagggaaggagatgtgctcgctgctggcacacacatgccagctagcaggccccgctttaagatacccatctgcgaaaatagcatatttttaggctggtttaatttcaggctgcctgaccaggcaacattggttgccttctcggatgctatatattcacgcatacaaatttctaaggcagggtgctcatggctccaaccaaacaggctcttcatccaggatattaagaagccaagatatcccatttgccgctggaggcggtgatctcaagtccagtattgggtttttattgcttcataaaaggaaaaagtacaccgaaggtccctcaacttgtcatcgagttacaaaatcatctcttaaccacaaaaccagatatatgacatccctcaacttataataccattcactttaaatttttaggtggctttgaccctggttttggttttatctgatgtggcggcttaatcagcgtgggtcccacaagtcagggcgtccacgacagccccctctctatccctttttctctcccttcgttctctctctcaccactgctggtcagcgggcggggagaacgccgacgggagaggagggcgtcggcggccgcgagcgcgcagcggacgagagctgcagcgagcgggcgggcggcggagcggagcggcggtggcaggcgagcgagcggtcgtccgacggggagctgctccggtcgctgcaccgcctggcacgcgacctgtccgccgtcgacacacccgcgccgttcctgcgcgccttgttcgcgtccatctcgaggcggtcgaagctactggcggccgcgttggatgacctgcggggcgccgccgaggagttgccgcagcccgcaggtttatctttcctttctggtctgtgttttcatgttcccttctatgttcaatttgattcttttttgggactgtctaacaatcattcgacagattttctttagaaaatcagtcgaattttcaagccatcaccatgtgctgctcaaatgaaaacgtatcaatgtacgtcagtcactggacattaatcacgtcagtgatgctgctaaaaagaaaaggaaaaacaagcaacttacatcaacttacgcatgtaatttttggggttacatatgtaattttgaaacttacgctataaatatattaaaattacatatgtaattttaaaacttacagcgtaaatatattaaaattacatatgtaattttgaagatttacgatgtaaatacgtaccgattatttttttatgaaaaatatgacggcatatatatagtccgaaaatatcaaatcacacctcaaacaattaggttaactacagtacaacaaaacaaccatgagtaaaaaaattaccatccatgtaaaacaaaaattacacctgtatctattaaaaattacactgtaaatgtagtgtacttaactatgaaactgcggtgaaagttttaaaaacgttaggtatagcagcaaagtaatcagtcgcttcttgcacagttggtacgatgcacgtcatgttatcccgacatcatgtggttgattccctgctctagcggcattttttttttcactcgaaggcacgcgcacaaatctcaaagtaaatcatacggtgaagaaatcgacagatttttaactgtcgacagatatacagcaattccgttttggttttcatggatcgatggtatatggtattatgtttttttttcctgtgttttgaatcgtcctctcttgctcctgttaaggttggggaaccaatatctccatggtgtcaccatctttgcaagaaggggatagatcgacgcgtcaagaaatcgtttctgttgccatggctcgagtaagcaatacgattgttgcttgcgtacaattttttctttttgcggggtgcgtacaattttttcttgatgcagactagtttcttttcttgtaccctgttttaaaaaaatctcactcctctgtttatatctgttctgttcatgcaccgtgctaaccccgggcttgtcggactggaatcctttgaagaatgaagccccaatgaggcaatgactgtgctagatccaccatgccattcagtgttgcaggtcatgatgctttgagctcgtgattgtgtctgtgtcagcgtaatggatacattcagctatcatatttcctctaaaatattcgtgttttcgttcattggatttactttgttagatttggcggtttggcaatgatgatacaaactttcagcttaccatgccagttctgcttctgagaattcatgacagataaagctgatatagatctgaactgaatgttttcttttgcattatgagtgtgcggcgccgccggggagctgatatagatatcgaggctgtgcggcgccgccgggagttgccgcggttggcgtcgctatgcctgcgggaggtgctcctggtgctgcagcggttcaacgccatcgtcgccgattgctcggtgcgaagccggatgtggctgctgctggagtcggacgagatggaggcggagctgcgggagctcaaccacgacctggccacgctgctcgacctcttgccggtcgtcgagctgggcgccttggcctcgccgacgacatgctcgacgtcctctccctcgtgtcgcgccagtgctggcggtgctcgccggcaccggaggcggtgcaggcgctgaacgcgagcgtgctgtcgctgatacaagaaatcgagcccccggcaccgccgtcggatttccggtgcccaatctctctcgatctaatgcgcgaccccatcgtcgtcgcaagcggccagacgtacgatcgcgactcgagcggccggtggagtggagcggagcggcggcggcatccagcgacgcccagggaaaaatgagagaggaagagagagaagaggggaaagggagaatgtgtgctgacgtggcattctgacatgtgggtctcacatgggtcccacgctgactcagcctccacgtaggacaaaaccggggtcaaatccacccaaggatctattgtgaccggttttaattagttaagggaatatcatatatctggttttacggttggggacgattttgtaacttgatgacaagttgagggaccttcggtgtactttatccttcataaaatctttttgaataagttcacattgactcccttaactagcggtcgaatttaattcatatccttgaaccacaatattactggatatatccaccgtcaactattaaaaccggtacaatttgatttcctcggtggttttggagggtggttttgccgacgtggtgcttacgtggcaatattgaccgagtcttcgttccatgtggtgttgaggtggcacttaggtggcattagaattaaaaaaatatgtgtaggccctatttatcattcacaaaaaaaaaggtgggacccacggacacgtgggctgtcacaccccgaagttttcctcccaagccaaaattgtaatttttataaatgaccctaagaaaataccggtgcaaatcaagagaaaaccctaagaaagtaatgcaaataataatcggatttgacatgtggaatttttcttgagttctacatgtcgaaattcattaacaggatttttagtggaattttcagagctctagaaataattttaaccaattaaaattgagcaagcaatacttttaattcctgggaaaatcctttttcctttttctttttctttttcctctctttttcctcctttttgtcaaatgggccgtcggcccatttctcctttcctccccctcctctctgctgggccggccgcaggccgaggcccagccaggccgcccgccgccctcctctctcggggtcgccgacaggtggggcccacctgtcgggtccttcccccacctcccgccgctcccggccgccgcgcccgcaaccgccgccttcggccatggtttccgatcgccgtggtccatctccctctctctaatccctctcttctccttccttagggcaccccgaagctcgtccgcccgccgacgtcgtcctcccgtggcttgccgtcaccgttcgccatcatcttcctccgcgccgggcaccctcggtgaggcaccccctcccctcttttcccctccctctccctcctagccgccgctttagcgccgccgcccgttagtcgtcgctttagcatcaccgcccttcggcgccgccttgcgccgccgtctccgccggcgttgccgtcgtcggcaacgcgcgtgcgcgtgcgcgcgccgtcgccgtgaccggtcggccggctttgtgccgagccgagcctagcctggccgccgccgcaccgtccgatcggccccgggccgatccgggccgtcgatcccgtatatcggcggtggatcacccgcgtggtcccggtccacggtagaccggccacccttgagtcgctgaccagtgggtcccgcgtgccgccgccccttcctctctctcccgggccgctgaccggtgggccccgcatgtcggcgccgcgccccaccttgatgacgtcagccctggaatatattgcgcaataaatgatttaaggtttttcttttatagtaataaagacagtgaatattctaaaattcataactaattcatccgagctccgtttaagcccattcaagtctcagtaaatcaagaaaaatgtgtagaatccattaaaaatggttttgttccctgttttagtagtcttatagcctgtttgcaatgtttgctttgtatgtcgctagattccgattcctctgacgctccggtgtacttcgagatagtcgccgaggttcctccagcagcagagcaaggcaagtcatgcttgtcacttgaacatgttaatcctatattgcaaatgccctattgttttctttcaaatattgcactgttttataacattactatgggatggttacctattgttacagccatgctttttggataccatgctcctttgttagcttggggttataacatgattagagtttggactaggaattgcttagccatgcttagttcaactagttcacatgggggaaaatcatattaatgtctagactgttggttctaatgataatgttggattagtaccaccgctctggtgttggttaaataaaatgaatcacatggtgggctgtgggtgcatggttttgctggtcgcacccatggcagttaaggaccggttcgcgggatgccctggaagaacttatcgtacttaccacaagccagcgtgggcaacggctgggcttgtagtgtagcttcctctagtcgacgcatccaggcaagggtgggcgtgatggagcggggtgggccctgcgacggcctctgtcgcttccggattcacttaggcacgagaggggactgcccgttgcccgctggggacgggggtgaaacctgagatgtggtgtgcttggctagagggggttatgcgaagggtcctgtcacggcctctttccggtatgtcgtggtggcatgtcggcgcacggaaacgtgtcgtggggctgtgtcttgtgggtacagttgtacacctctgatcagagtaaaactattcgaatagccgtgcccgcggttatgggcggtcaaccagattcaccgtgattagtctcatcttagtgtaatcttttaatttggatagcttagtggatggttgggcctgtcgcaacgtgggttaacgttggacagcggatgattaatattaattcattattacaactgtttaaatctttcaatttctgtttataaatgctcgctttatgcaagtgaaccactttagctcttctttgatgattccctgcatcatacctctattccggtatgacttgctgagtacagtgggtagtactcagtcttgctctacttttcccaaccccagagttcgagttcgggtcagatgaaggtttctccgaggagtaggcttcgtccgtgccgtcgaggatgcctgtggagtggtgttcccgctgcagtttagtcaaggcttagctcctgttgtctttcttttcttccgctgcatttatgtaagacttttatgatgtttgtaagacgtggatctggatgtcaacattgtcgtttgtgtaccccggccggtcctggacggggattttaatacacattctgcttgaaattctattcgggaatttctgggcgtgacaagttggtatcagagccgaccttgaccgtaggacaagccaaacggaaaaaaaaacctaagagccctctgaatcctttctcattgcatatgttctttgcaattggatttattccgggaaaattgggatctgttcttgtggttcttgggaaaaatcttggtcgctcgtttaagtgagatttttcaaaacaagtcagtccagggttttagtaaaactattgggatttattcgtcagtcggttgggatttgatgggcgaaatgcattaggtcttagctcaggaacatgggttgcaaggtatttatgctttatttgttatcattagtatgtatctaatttctcattattttatcgttatgtgagtctgtcttatttattcgctctcatgcaaaatgatctatgcataaaatttcgctcttattcgattcccttatttgagtctttattgctttgtttaaatttggatttgagcatgcattgatcctactccttttgtcttctctagatggccggtcacccacccaaccaccgcggagaaggcatgatcgactttgtggcagagttggcacgcatgacactggtggtaggctaccccaacgcgccagagtacacgacgattccaccgctcagtggcgagcttcctcaccgtgttcgcttggaggtccacggctacgtgggtacttgcctagctaacatggtggtcgaggcagctggaggcacagcagatcacgcctgtcaggaggcagcatacctgatgatggccagactacgagagcgccacaactacatcttccacgacacggcataccggtttcaccctcgtcgagccagcaatgatgatgtcagttccttccgtccgacagctggcgagaacgacaccacctttggtcacatgtgtgctgtgatgaggggattggacaggatgcactcggacctgcacaaggcgaccaaggccttgaacgatgggaagctcatgaggatcgtcgctctgaaggacgagataacgcgcctgaagagggagaacgcccagttaaagggtcttcccgcgccaggaggagtctggatccgcactacgccccgcaagactacgacggcacccgtgcgcatccagcttgcgcccaggaacccacctccatcagcagctcccgcagcacctccagttccacccacagttcctgcagctccagctccagctcccgcgtccgctctctccttcgctccagcatcagccgccagaggtccagccagtggcaccggaggttggttgtctgctactcccagtggcagccgcgatctcagcagcagcagctccagtggctcagagtcaggcagcagcgagacttatctgccaggctccaggagtcgctcagagggacctggtgacgagcaggaggacgccttcgactccaccgaccgcagaagccgttccgagcattaggctcgttttttcccattagtttatcgactgtctagcttctgcttgttagtttgtgtgtttaggttgtttgtttggggtcagtcgacggtcgatatcatgtgcctatgatatggctgtcttaataaggatttttgcttgctttttaagtgttttaattcagatcagaacaattgcagttaatttcttatgtaataaagcttagtttctgagcatctgtttttcttcttttccccgtctgcttttccctccagatggtctacaccaggaatggtagccgcgcaacaggcgagggcagcaacggcgaagagcgcactgatggggcgcacccccacagcgattctggcaatggtccgccaccacttcccgagaatccgacccttgcccaagttatggcacatcagactcagatgatggcagccatgatgcagcagatgcagcagcagcaccagcagatgcaccagaggatgatgcagcacgtcgaacagcagcaccagcactttggtccccctccccctcagtccaagttgcctgagttcttacgtgtcaggccacccaccttctccagcaccaccaaccctatggaggcgaatgactggctccatgcaatagagaagaagctgaatctcctgcagtgcaatgatcaggagaaggtcgcttttgccacacaccagcttcaaggtcctgcgtcggcttggtgggacaaccacatggccacccgcccaccgggtactgaagtcacatgggcagagttctgccgtagcttcaggaaggcacaagtgccagatggggtcgtggcacaaaagaagagggaatttcgcgcactccatcagggcaacaggactgtgacagagtacctccacgagttcaatcgcctcacgcgatatgcaccagaggatgtccgtaccgacgccgagaaacaaggagaaggtcatggcgggtctggatgacgagctgaccaaccaactgatatctggggact

SEQ ID NO: 14682 - DNA, 562 bp, Oryza sativa
tttgcttgcccgccgccattgccgttcctctttccccgacacggtgctcccacccagccggctctccaccattggatgccagcgctgccgctccctaatgccagatgccaccgccgccgctacccgccgtcgtccccactgccgctccggtggtgaagagaaaggtcgggggagaaaaagagagaagcgagagatagaggggaggaggaagaaacggaagagagtggttgttcatgtggggcccatgtcacgcccagaaattcccgaatagaatttcaagcagaatgtgcattaaaatccccgtccaggaccggccggggtacacaaacgacaatgttgacatccagatccacgtcttacaaacatcataaaagtcttacataaatgcagcggaagaaaagaaagacaacaggagctaagccttgactaaactgcagcgggaacaccactccacaggcatcctcgacggcacggacgaagcctactcctcggagaaaccttcatctgacccgaacttgaactctggggttgggaaaagtagagcaagactgagtactaccca

SEQ ID NO: 14683 - DNA, 666 bp, Oryza sativa
gagcgtcaattgttcgggatagaggtattagtggaagcagaagagaaagtcagaattatcagggcacggttgaagattgcccagtcttgacagaagagctacgcggataaccgtcgaagggagctcacttttgaggcaggagattacgtgtatcttcgtgtcactccgctccggggagtacaccgttttcagacaaaaggcaagttggcaccacgcttcgtggggccatacaaaatcctggaacgaaggggggaagttgcttatcagttagagcttccatccaatatgattggcatccatgacgtgttccatgtgtcccaactaaagaagtgcttaagggtaccggaagaacaggctgattcggagcacattgatatccaggaggacctaacatatgtggagaagccggttcgtatacttgataccagcgaaaggagaaccagaaacaaggtcacccggttttgccgagttcagtggagtcatcattcagaagaggaagcaacctgggaaagggaagatgagttgaaagccgcccatccgcacctcttcgccagctcctccgaatctcggggccgagattccgtttaaggggggtaggtttgtcacaccccgaagttttcctcccaagccaaaattgtaatttttataaatgaccctaagaaaata

SEQ ID NO: 14684 - DNA, 2654 bp, Oryza sativa
tcaccagaggccgcgcttcactcccggacagcagggtggacctaccaccatgatcgtccgccagtaccgcccgttcaatcctagcaactttccccagggctctagtggcagtcagaaccaccatggaggtcaatccaaccgcggtgcagctccacgcccaccaatggcaccggcacagtcaggcccgtccgcgcaagctaagaaggagactggggcaaaaccagggtcctgcttcaactgtggcgagcttggccacttcgctgacaaatgcccgaagcctaggcgtgccgggccaaggtttatccaggctcgtgtcaaccacgcatctgcggaggaggcacaagcagcaccagaggtcgtactgggtacgttccctgttaactcgatccctgcaatagtactttttgattctggtgcgacgcattctttcatttcaaagaaatttgtcgggatgcatgggttaataagagagaaacttagcacaccgatgcgggttcataccccagggaatagctccacttcggttcaattcagcccttctataacaatagaaattcaaagatcaccatttctagccaacctcattcttctcgaatccaaagatctagatgtcattcttgggatggattggctgaccaagttcaagggagtcatcgattgtgcgaatcgcacagtcaccttgaccaacgagaaggggaaaacggtagtgtacaaatcaccagactcaccaaagcaaggagtctccttgaatcagattgaagcggaaatcccagtggacaccgtggagaagaatttgaggaaattggaagacatacccatagtctccgagtacccagaagtgttccccgaagacctcactaccatgccacccaagagagagattgaattccggattgacttggcaccgggaaccgctccaatttacaagagaccgtacagaatggcggccaacgaattagccgaggtcaagaagcaggttgatgagcagctgcagaaagggtacattcgaccaagtacttcaccgtggggtgctccggtcatttttgtggagaaaaaggataagacgaagaggatgtgcgttgattatcgtgcactcaacgaggtcacaatcaagaacaaatatcccttgccgcgaatcgacgatttatttgatcaactgaaaggagctaaagtgttttctaagatagacctgcgatcaggctaccaccagttgagaattcgggaagaggatattccgaagacggccttcaccactcggtacgggctatatgagtgcacggttatgtccttcggacttaccaacgcacccgcattcttcatgaatctgatgaacaaagtgttcatggaatttctggacaagtttgttgtggtgttcatcgacgacattcttatctattcaaagtccgaagaagagcatgaacaacatctccgtctggtactcgagaagttgaaggagcaccagctatacgccaagttcagcaagtgtgacttctggatgacggaagtcaaatttctgggtcatgtcattacagctcagggtgtggcagtcgacccatcgaacgtagagtcagtcaccaagtggaccccaccgaagaccgtgtcacagattcgaagttttctaggactggcaggttattaccgccgattcatcgaaaacttctccagaatcgcccgacccatgactcagttgcttaagaaagatgagaagtttaaatggacagctgagtgcgataagagtttcgaggagctcaagaagaaattagtatccgcactagttttgattctgcctgaccagatgaaagacttccaagtctattgcgatgcatcccgtcacggacttggatgtgtcctaatgcaagagggcagagtggttgcgtatgcctcgcggcagttgcgtccacacgaaggaaattatccaactcatgacttggaattggcagcagtggttcatgctttgaagatctagaggcactatctgattggcaaccgctgcgaagtatatacggaccataagagtctgaaatacatcttcacccaaccggacctaaatctccgacaacgaagatggttggaactaatcaaagactatgacatgagtattcactaccacccgggtaaagccaatgtggtggcagacgcattaagccggaaaagttactgcactgccctatgcatcgagggcatgtgtgaggaattgcggcaggagtttgagcatctcaacgtgggagttgttgaacatgggttcgtagccgctctggaggcacggcctacgctcgtggatcaagtcagagcagctcaagtaaatgattctgaaatagcagagctgaaaaagaacatgagagtcggaaaagcccgggattttcacgaagatgagcatggcacaatctggttgggagaaagattgtgtgtacctgacgacaaggaactgaaggatctgatactcaccgaggctcatcagacccagtactccattcatccaggcagcaccaaaatgtatcaagacctcaaagaaaagttttggtgggtcagcatgaggagagaaatagctgaattcgtcgcactctgcgatgtttgccaacgagtgaaggcagagcaccaaagaccagcaggtttactccaacctcttcaaatcccggaatggaaatgggaggaga

SEQ ID NO: 14685 - DNA, 5849 bp, Oryza sativa
  unsure (1)..(5849): unsure at all n locations
cgcgtgccattgaattgactaacctcgttgccngcacgncgactctagaggatccccaaacccattaccaatggctaaagcatgcgatgaactgcaacgagttattggatccacaagaagaattgaagaatctgatattggtcgactgccctatttgcaagctgtcatcaaagaaacatttcgattgcatccacctgttccatttttattaccacgtcaagctacaacaacaattcaaatattgggctatacaatacctaaaggtgcaaaagtgtttataaatgtctgggctatgggtcgagataaagacatatggccagaggcagagaagtttatgccggagagatttctagaaagggcaactgactttaaaggtgcggattttgagctcattccattcggagctggaagacggatctgccctggattgccattagctgttaggatggtccatgtggttcttgcatcactactaattaatttcaagtggagactcccagtcaaggtcgaaagagatggagttaatatgacagaaaagtttggtgtaactctagcaaaagccattcctctatgtgctatggccacatcaacttgagttagaagccaggcagccacttcactggactgctcaaaaacattgtatcaggtatgacaatattttgctgtccagtggtctcttttaccaatcatgatggaaacggattgtcaggtttctctgcagttgcttcagtccaaggagaaggataggtctgatttggcatatgttatcaatgcagtcaaggatcttatgggcggtgacagggaaattctctttagtaaagtctgtcgtagtcaaaaccgggttagccaatgtttagcgaataaagctcggtgtgaatctctgtcaggcctgtggccggataatagttgtaatttcatttcatggttagcgaataaagctcggtgtgagtctctgtcaggcctgtgtttgagtaatatagatccttttccccgaaaaaaaaatgtatggcaatattagatgattaatgtggaatattgtaataaatcattacgtgtatttgtggggatatattgttccaataggataaataagctgagatttggatatttactttttcttccacttgctaggaaagcaaaaaacaaaaaccacaagaagatgaacacgacattaaactaattgtataagtggaacgacacggcaaaagaaggccaacatataaactatacagtgtagctctgaatattattttttacaagattaacaggcagctctgaatatttttcgagattaaagtgtgcacatagtccttaaacttattcaacattctaatctatctccccgtactcttaaaaaacggatttacgtatcacaacttgttaaaatgcatcattccgttttgaattgccataacttctctgcgattctacgtggggttgagatgacatgccacacaaacactaaagtggtatcatcactaagtctacactaaccgacaaataagacccgcctagaaaatttctttttatttttttccttctatgttttttcctttctttttcatctcctttttctctcttcagctgcagccgccaccaccgccaccaacctcaccatccttccttctcctagggtgaggaaatccaagtgtgaggaagcccatgttatgcccaccaccgcaaagctccacacccccgccaccacaaagcacggcctcaccgattatgtcgctagttgtgataatgaagcccacattcaagataacaagtggccacctagctgagctcgagaatgttggccctcggtgcgcgctcggttgattggcataagtccgtcgacctctgctgcctcagcgtactcggcttggtgcctaacgagcatctcctgctccagtttgtctatctcctcggtcgtcatggcaaccttcgactgtagccaccagagctcatcatgcccgctgcctatctcaccattgccgaacacgaaagtgtagaaaccctagctcaaccgccagagagaaattgctaaatctgtctgtaccgttggcctcctccaaaactaaaggtacaatcactttctttataacacttccaccgtttcccatctccttcccattgtaactgttgttgaatctcacctaatcatcgcgaggccgtgtcagggggctccatgcatgaatattttccatgtcactcgtccatgtcagcgccggagacaagtcagacacgtgggtcaccctgtatttctcagtgattttgcaaaagcgccccactcttattcacattttgtttttttttctcacgatgaatcagtcacctgaggaattgagggcaaaggtgaggtggagtggttgcctgcctgaggaatcaacaacgaagtaaaggacgatggcaacttggcgatgccttgaaagtggacaacggaaatatcgctccactgagtggcgttgacgtggccaatgtggtggtgtcacatatagcctacaagcagccagtaggcgcacgcatgggcggggattaccaggaggccggtggggaggtgcccggtagatgaaactgaccaggcggctgcgtggggcgtgcttcaatgtgcttttgctgaactagtggtcggagtcgaattgatcgaacaggcaatctctgaatcttcttttgatttgcgaagtaggcattggccagaatctttttttatttattcctaattaatacacgaatcataattacctctaaatttattcctagttttgaataaactagcagtatatacatatttctagatggttaattctatttattttgaaagatacttttaacaccacaaaaaattacttctatttttctagagagttacttcatctaccaatatagctacttctgaaactgtgaagaattacttttaataccgtgaaaagttatttcgattcttctagatttagagtgaagagttagttctatttttatttttcttgattcagttatttttctttagtaatgtacttctaatactgtaattattttcttaattctataattattttcttagagttatttgtcctttgctctataggtacttttaatatcatcaacattaattattttcttaatactgtaattattttcttagagttatttttccctaggtatttctaatatcgtcaacggttactactattctcttagagttactttcctatattatgaaaatatttttttcaaaaaaaatatattttaaaataaagataataattgcatttactcgtgaatgttgtcaacattgtacttcacaaagtttcttatttcaaaattgtccttattttcaatgaaaagaagtaaattacttttgaatgtttaaatatatttaacattgaactcgttttgtcatatattttgaatggagagctatactttaaatggattttacaataatacacgatttaaaaattataaatcatggaaagttgaaggaagccataaaagaaaggagctagtgaattggttggtgttagggcatgtacaacctaaggcacgggtagtagtagcctcatgtgggccataccacctaggctacacaaaggaatctctgtctccaatggaggatacactcaaataggtcctataaaatcaaagggtactataggaagatattacatcccacaatgggtgttctagcccacaaaaccaccagtgttgttttactctcctaattttattcggcgatgcctccgactcatctatttccacctctttctcgtcgcctctccacctgccccagaacgccgcctctgacttcgtcggttcgccccaccgcgccaccgatgacttcgccacactgcgccaccgctgactccgccacaccgcgtcgcccacaagcttccgccgctctctctctccctctctctttcaaagtgtgggagcagcggcggcgaggcccacgaggagcacgagcaggaggaggacgcggcggccgcagcagcggcggcgaggcccacaaggagcacaagcaagaggtggcggagtgagatccagtcggtcttcttctccaagtcgtcaccgtctctctctcccttcgcccgtcatcgccggatctggtaggtcacgcctcctactccccaccgtgctaccgccaactccgccccaacacgccgctgagggtgaaaggggaaactaccactgcgagagcgggaccacaagcgcaaggcttcgccacatcatcacccaacgcgaagccccaagctgtggcttgacgaaaagtagtcgaggagcacgtcccaaggagaggaggaggcgaaaagaagtcaaggagcacgtccctcacaaagacgtcgtggctctacgctggccgctggggaacacctccagctcgaaaaggtacggcatttgaacggcgtcgccagggataggcccttggccccatatccccatcacataaataggcatcctgtggaaggttagtagattgttggtgttagccccatgccccatcacataaataggcatcctgttccacactagagcttctcgatacagaagatcacatgtgcccggtacaactaagaaaatagctataggccgtgtttagtttcatttaaaaaaaataaaaatttaaagtatactgacacatcaaatgtaattagactcaagatgtgcaattgattttattttcaccatgcatacgtcaaatatttaatgtgacagaaaagttaaaaatttaaagggaactaatcacagccataataacaaaagccatactctctgtattaaagatccaacaggttcagagaacacgcaagctcagaactacacatcaccaaaattggagcaagtttgggggtacatatccgctcatacagtggaggatttatttctcgattctacgagctttttaactagagttcgaccgggaagtcaattacggatagaaatgagcatcctgtcttcaccatcaagtttagtagggctccacgggtgcgcggaacttggcaccagcgtagacagcagccgcaccaagctcctcctcaatcctaagaagctgttgaaataagaaatagcatgaattagtataataattttacccctttttaatgactagcttaagcatatgcatggattcgttaacgcctgaacaaaaatatgcatgaattagtggacagtattaactgaactacccattaacgcatgaaagcatctgagaacaaaaaaaatcatgcttgggctaaagtaatcattcaagtctttcagatctaaacagcacgtaagaaatgcagatagaggttggctgggtcagctgattggttttatacggtacaaaatatgaaaaactacttgcctggttgtatttggcaaggcgctctgatcggcagggtgctccagtcttgatctgaccctgtttcagaatgacaaagatatattcagccctcacattcagtacaagagtaacaactaatacaggatgccgtaaagttcactacagtgaatgtagagcacagaatcttaccgtggccaaaccaacagccaaatcagcaatgaaggtatcctcagtctcaccactgtggcaatgaaacacaagtcaatatacaaatggttggtagtcagaccaggtccaccaggaataaagacaggtaagcatatcagtatacctcctgtggctggtcatcacaccccagccagcacgctttgacatcttcacggcctcaatactctcagtgacagatccaatttggttaacctgttgaaagacaagggtgatatattcgcacatggaagataaactattaaacgtgaaggaaagaatcaataganccataccttcagcagaagagcattgcatgacttctcctggattgcctttg

SEQ ID NO: 14686 - DNA, 3177 bp, Oryza sativa
cagagcttcaagccttcaatccagttagcccacaactgatccgggcggcttttttttcttaaaaaaaaaaagggacccgggggcctcgtgacgacgtggcttctcccaccaccgtaactcccgccccctcgcagtctccttcccaacaactggtccatacaccaccaacccccatacccccgccgtttcacctaccacactcccggctttcctgcaccgggcgcacccaattcacacccacaaacgcacgcccgcacgcgcgcgcgcgcgctcagagacctccgtcgccgcccgccgcacgccggcgacccaccgcgccgcacgatgccgccgacctcagtgagcccaccaagaacagcgccggggccggcgaacccgagcccggcacacccgtcccgcgtgcgggtgatccacccgggcggcgggaagcccggtgggccggtggtgtactggatgctgcgggaccagcggctcgccgacaactgggcgctcctccacgccgccggcctcgccgccggctccgcgttcccgctcgccgtcgcgttcgcgctgttcccgaggcccttcctcctttccgcccgccgccgccagctcgggttcctcctccgcggcctccgccgcctcgccgacgacgccgccgcccgccacctacccttttttctcttcaccggtacgcgcccttttctttttctttttctttttctttttcttttgtctccatccgtgacgatgacatgtgggccaccccgtcttgcgaaatgtgacgtggctttttctctggctcgctgacaggtgggcccgcggagatcccggcgctggtgcggcgccttggtgcgtcgacgctggtcgccgacttctcgccgctgcggccggtgagggaggcgctcgacgcggtggtcggcgacctgcggcgggaggcgcccggcgtggccgtgcaccaggtgagcgtggtggcattgctgtttgcatcaatcttccaagaaagttgggaatctttttggggatggataatgaattcgccggagaatttagagattcttgtggaattcttcgaatgcaggtggacgcgcacaacgtggtgcctgtgtggacggcgtcggcgaagatggagtattcagccaagaccttcagaggcaaggtgagcaaggtgatggatgagtaccttgtggagttccctgaattgccggcggtggtgccatgggacagggagcagccggagggggtcgactgggacgcactcatcgccagggtttgcaggtgcggatgataattctaaggtgtattgggtggtaattttgtttgtgtagatatggatgactattgattcttggttgtttgagcagtgaggcggagaatgtgccggagattgactggtgtgagcctggagaggaagcagccatagaggcgcttctcggcagcaaggatggattcctgacgaagaggatcaagagctatgaaactgaccggaatgatcccacgaaaccacgggcattgtctgggctttcaccataccttcattttgggcacatttcggcacagcggtgtgcgctcgaggcaaagaaatgccgacatcttagtcccaaggtgctgttctttaactgatttgttatgattaaaagagttatgatcctcttgcaatgtaataaattgttagatggcattgtttttctttaccgtgaactggctagaattcttagtgatgttgtttacctaatagatgtttgaagtaacatgtgttctgaaacagtccgtcgatgctttcttggaggaattggttgtaaggagggaattagctgacaacttctgctattaccaacctcaatatgattcgctgtctggtgcatgggaatgggcaaggaagacactgatggatcatgctgctgataaaagagagcatatctatacgtgagtaagttgccctttataatttattgtcacaattttaaccaaattatcttcctgacgatgttaaggtaaaagatcttcgctctaattggttatttgttaattgtcattttgttttggctaggagggaacagcttgagaatgccaaaacacatgatcctgtaagtgctattggacgtggtgtactctgttgctgatattgaagttactctaacacactgagttattttttttctaaatgattatcagttgtggaatgcatcgcagttggagatggttcaccatggaaaaatgcatggattcatgaggtaatatatcatgaccagactcttacaaaatcacgcaattataaaatgtttattgaacagttttttttttatgaaactgcttgttatatttcttctgtacccatggcacattctagttagttgcccataacctattggcccacttgttgacaacatatggttattttacccatcatactgatggtgtggtgctaacctaaaggcattggattgcccccaccccatctttgctgacataactgattagtttgctttgttggatagatgggaattttctgacgttgtggtttactttatcctatgtcagaaaatatgaagttatttgaaaaaaagcattccttaaaaaattagttttctgtagagtttgtgtagttccaataaatttatgatgatctatgtgatatgtctggtagcaagcctttggtgcacataattctctttgattctgggcaaaccttttacactatttttgttcaacttttgttttggatctggaaagaaagaaaagtaagttgttttggcgaacatcaaagaatgatgttatatctaattgattcttagttctgaaggtaacagtgcctgtaaggactttttcctttcctaatgtagtagttgtctgtagaatgtactgggccaaaaagattctagaatggactagtggaccagaagaagcactttcaactgcaatttatttaaatgacaaggtaagacctatacacatgtttgggaaatacagttgtgttattttgaatttgtcctttttatagttttgctagttgtagttaaaatagctatatttcaacacatggaacatgataaagaaacatggaacatgataaagaaactgctcacatgaaaaattgtaattgaatagcaacttggaagagtctgcccatgcttaaattagttcctgcgccgataaccgaaaagttggagtcacatttatcaaattaagaaatatata

SEQ ID NO: 14687 - DNA, 853 bp, Oryza sativa
  unsure (1)..(853): unsure at all n locations
actgtcagtctttctgggtttaaggtgcgtgttttggtgtngnctnngtnncatacncttttntttnnntcttnttgatgatgtgtatattttnttnnnntnnnnnnnnnnnnnnnncagttggttgattgcacatcgtattnnncnnnncnnnnnnnnnnnnnnnnnnacacccnccnncnnnnncccnnnnccnnnncacnnnncctttaaacagtgtgtgcntcccagtcnatctttgttttttaatcctcccccccgaccccggggggggattgcccataagggtttcagcggggtttcagccggggaggcatctagacgttgcatcggctcataaggattgcctatacatataagggggatttaaccgaagggaacaaagatattaccgggcaatctaatcttggggatttcatgacatcggacctccagccgatggatgctttaaccttcagaatagtgcttaatgctgttatatcaatgctagccgagtgggttatactggactatattggtattttattacatcatcatcaaccgattgcctttatatcattatctacattggatatattggcgattacttaaaccctatcgctatcggctggaactactccatcggcttgtcagccgatcggctgttttatctgctgattacatatcttgtcaggggccggatcaaactgactggcacgtccgcatctcatcaaactttggacctgcactggagctaagcagaacacctaggctggggtgttcgaatttttcgccaacagttacatgggaaacggtaggcagggtacaacgcaaataccactatggatggagtgaaattcacaattcaccacag

SEQ ID NO: 14688 - DNA, 2348 bp, Oryza sativa
cgaaattaaaataccaataaatccaatattaattagcacatggccgttttatatggtttcaaagtccaaataaataccaaagtcgtacataatttacgtatgacggaattaaatgttttcaaatttttactaaatagaaataaacaggatatgcctaagtaaatggtctcaaagtataaataaatagaaataatcatttataattaacataaggccaatttaattatattcagagtgtaaataaatagaaattatcatttataattaagatatgacctacttaattgttttcaaagtggaaataaataccaataatcagttataaataacatattgcctaattaattgtattcaaagtgtaaataaatggaagtaaccatttataaatatcatatggttgaaaaatagtaatacattacaaattaatcagttgtgaataatatattgatccaaattgttcgaccttcaatacaatacaaataatttacatcttccatcaaccaacttaggtcactgttttactcacgtactttctcctcactattgttccttcgctatgatcgttgcgtgagtacggcgtgtcctcctttgatagtaagatgctcggagtcaaccgtcactgcaaacggaggttgcccctcaaacagattgtaattttcgtcagtcttatcctcgactccaacgattttcctcttgcctaggagaacaacatggcgttttggctcatcgggccctttccccttctttggtttgctatccatgtccttcacgtaaaaaacttgcgttacatcattggctagaacgaatggttcatctgagtatcctaccttgtttaggtcaaccgttgtcatcccgctgtcatcaatcgttacgcctccaccagtcagcctaacccattggcaccgaaacagagggacctttaggggtctatactctaattcccaaatgttgtcgatgacaccgtaatacgtgctagttggaccatcgtgtcctatggcatcgatacgaacaccactgttctggtttgtgctctttctgtcttgggctcttgtgtaaaaagtgtatccattgatttcataaccttggaatgtagttaccgagccggagggtcccctagccaagaaggctagttgtcggtcaatcgtctcgttacccaggaggtgttctcgcagccaagcggggaaagtatcaatatgatggcgtgtaatccaggtatcggacttgccactgttttctgagcgaacaatcgcaaggtgcttatcgatgtaaggagcaaccaacgaagattgttgcaaaaccgtgaaatgtgctttacggaataaatcgttgtctacagtcataattgctctccttccaagtgtgccctttccccgtagtctcccctcatggattgattcgggtacctcgattggctcgaggtctttaataaaatctacgcagaactcaatgacctcctctgttccataccccttcgtgatgcttgcttccggacgagaacggttacgaacgtacttctttagaacgcccatgtacctctcgaaaggaaacatgttgtgtaggtacacaggaccgagaataccgatctcttttacaaggtggcacagaagatgcgtcattatattgaagaatgacggtggaaagatcaactcaaagctgacaaggcattgcaccacgtcatgctgaagggcggctaaactttctggatcgatgactttctgtgaaattgcgttcatgaaagaacaaagcttcgttattgttgcctgcacattatcaggaaggataccacgaattataacaggaagcagctgtgtcataagcacgtgacagtcatgagactttaggtttgtgaacttcttatccttcgtgcttattattctctttacattcgaggagtatccggacggtaccttgatgctctctaggcattgaaacatactctccttctcttccttgcttagggtgtagctcgccggacttaagtaatggcttcctttctcgttcggttccggatgaaggccctcgcgttgttccatatgcttgagatcattgcgtgcttcgagtgtatctttggacttgccatatacacctaagaagcccagcaggtttacgcaaaggttcttagtgaggtgcatcacgtcgattgcgtggcgaacgtccaagacctcccaatagggtagctcccaaaaaatagagtttttcttccacatcgccgcgtgaccatcttcgctttctataggttggctgccaggcccctttccaaatactactttcagatccttcaccatttcgaacactgctttcccgttgcgatgtttagggggtacgagtgaatatcaattcaatgcgcg

SEQ ID NO: 14689 - DNA, 8293 bp, Oryza sativa
tttcgtgcatccttgccgaagtctttaaatgttctgtcgatatttcgccactgcgacccgtcagcggggtgtctcagcatctcatcctgtttacgttcttctgcgtgccaccgcatcattctagcatgtgatttgttcctgaaaaaccgcttcagccttggtattatagggaaataccacatcaccttagcaggaattctcttcttcaaaggctgtccgtcaacttcacctggatcatctcgtcttatcttgtatcgtagtgctttgcaaacagggcatgcttccaggttttcgtactcaccgcgatacaggatacagtcgttcggacacgcgtaaatcttctgtacttccagacctagagggcagactgtcttcttagcttcgtacgtactttcgggcaattcgttcccctccggaagaatgttctttacgagtttcaataactcgccgaatgccttgtcactcacaccatttttagccttccattgcaagaattctaggatggtactcaactttttgtagcccttctcgcaacctgggtacaacgctgttctgtggtccgctaacatgcgctccagtttctgcacctccttttcactttcgcagtcctcctgtaagtcccgcaatattcgaccaagttcatcagcaccatcattcccttcaacatccagctccgcctcgcccattgtgttttcttcaaatccgccatactgagccgagtccggaatgttctcatcttctacttcatcttcttccattgcaaccccaacctctccgtgcgaggtccaacatttgtagctacgcatgaacccccattgaaacaggtgggcatgaatagtttgtgtggtggaatacttcttctggtttttgtacttatcgcatggacagcttataaaaccgttacgcttgttatcattggccacacccaaaaaataatgcacgccgtcaataaactctttcgaccaccgatccgcgtatatccattgccgattcatctatatgaaatacatataaatcgtaattatacaaaatccaagatttacaaggtaattacataataatacaataattgaatataattattcatacaattaatcattactattaaattcattgtacatatttttcatgttttaattacattataaacaaatatttaatatgtttttcttattttaatattaaattagcttagttttataatttcatacaaaattatatttaattattcaaacaagtatttataatcttctttattccctacacacactttctctctcatcatcttccatcacattttctagagggaaaaatatgtaaaaaaatagctccaaatgtagatgctaagcaaaacaaagaataggatgaagttactaaccttttgaagacctcaaatttgtatattaccacaaaaaaaatttgcttaaaattttgacggtacctccctccctcaaagcttaattttgaagcaatggctcgggctggaggaggaagaaggagtatataaagctgtgcaactttagtcccagttggtaacaccaaccgggcataaagatctcaaatcacattagtcccggtttgtattaccaaccgggactaaagatataatctttagtcccggttggtaacacgaacagggactaaagatcccaagccccccgacagaggtctgacatgccctgtcaggaggcgaaccgggactaaagatccctttgtcccgttgaagtaataaaccgggactaataagccactttagtcccggttcgttttggaaccgggactattgtggaaatcggctgaccctccaaagacttcttctctagtagtgaggcactccgcaattccgcatggcggcgttgatggacacgaaccggtgggggaaatagcattattagggatttgatggaccgttggtcatgaagggttgacagatcggttggctgattgattgttcttcggttctcatcggtattttcggtttaacaaagatccaaaccgagctgtgtaacgagtaccgaaatgcgtgaaaataaaaaccattcgcaccaccgaacacctgaacaaaccgctactttatatctcggttcggttcggtcttattgatgcacaagatcgacaatgacaattactcactgaaattgacttcagctatttcttgtgccctcaccaaatatattgtcaagtggatggatttaccattgtacgatttcctctgagatagaaatatccaaatcggtaattatctacatactatcaactattttaaatacatataaaagatataacatcaatgatcacgatcacacagataaacaatgccttaagaaatacggaaaaggtaaaactagccagaagaacaatgagcagagaaaacgtttcatagaaagaaaatcaagctgaacacttgtcccaagtggtgcaactgtaaacattggttgcgtgggtagattaactcaagatatgccattattttgtgttggtttccggagttcaaaaagattgaaaagtcaaacccgaaaatatgttttgttcacttctgaacacaacatattatcacagaagaggacaagaacatgattgaaaccaattgcctccgcctcgcctactaactagacctgacgtggctgactacaagggatggacaggactgtcatcacctaccacctatcgtcccctgttgatctagataccttcctagattacataggaattaggaaccgcaccgatggtcgatcttactactctaacttagttgatcgaagcagagcaaccacactagaagcctacgagttagaaatatattcattaaaactgcccgataaagataatatctaaaagataaatacttgaagtaaagtaaaatgtatattaaatggattcggcatttggctattgcgaccatgatattattgatgacgttgttcagcaccgagatcttgcagtacgtgaagccttgcggcacctcgagctgtgacatggacaccgccgactagcttgtgaaccaccggcgtcataagccgtacgtggagccgatgacgcccatctttgtgctgaaaagctccatcacacactggtggtaagcaaccttggccggccggatgtactgcctctactagaaaaaccatttttttgcagacgttaggtttttttttttcagacgggtatcacccttggagacaaatggctgcctacaaaaatgacatctgtgggggtgagattgttgtccgcctgcgaaaatacctctttttgacgatattaaaaacgccgctacccatcaccaaaatctctaagtcctctcctctcggcaccaaacgcctctccctctccgcctctctctctctctctccgtttctcccacctctcctctcccgggagctgtggcggtgacggcgcggagggcggtggcggcgcggaggtggcggttactagcgggaggcggagggtgtatggacagcggcgtctcccctccctcctccaagatccggtggaggcgccagagcggagggcaatggcggtggcggcgcggatgttgtagctaccggtgggaggcggagggtgcatgggcgacggcgtctcccctccatcctcccagatccggtggaggaggaggcgaagggaggtggcggcagcggctaccggtggtgatgacgaggagggtagaggcggcggcgtcggcggcagccctcccctctggatctggcgtggcgacagtgaccctcccctccgaatctagccggtggcggcgacctcccctccggcgacgactgtgatgctatgtatttgttttgattatgaactattttgtttctatgttaatttgtgatgtttatgtgaatttggtttgactggatttgatgggaaataggaaccgaattggatggggaatgggaactggatttggaaacatgaagctgcagccggccgaaacggcgtggctgccatttttttaacgctagaaactctttttgcaggcggaccaatcactatttttacaggcgttgcgttgcacgtggaccagttgtccgcctgtgaaaactgtttagcccgcgtgaaaaaatactttttctagtagtgtgctgtattagctagctgcgatgtcatatacaccgagatcgactacacacttcatcaccatcgacaaggcatagcccagtgcatgcatggtcatggaacttgctgtcgttgcagctagaaaatccccaaccaaacttgctaatctccaggagctgcattccttacagatgcgtgagccccactacctcaggactggaagtttatgccatttaattatgagagcctgacgatcacttatcaatatcctattctgcttttattctccgaagatccgaaacatgccagtcttaacacgtcgcagtcatatgttgatatgcattatatattcggaactttaattcacgtggccactcagtcgattgtgagatcaggggtgattgtgcagagaactaagttaattaactatctcaatgatctctattaacagctagagagtctcaagctaaatatgaaaaaaggtatgatgtaagattggatcgattgatatcgaattatatattacgatatgtcatctctccacagcacgagttgatgcatatttattgggtcgttgattctcctgaaactcatttgatagtgaagatcatgttcaatgcatgagtgcggtgattgttcagaaaaaaataatttaacaaccacaagactatatatgtttggacaaaataggacgaaaatatttcgattttaagttccccagggaacatgtgatgattttttgagaatttctccaagtcattaaataatgcagacagagttggggctagctagagccagatagtcgatgtaatagtataaatccacatagccagcaccaagagtttccatccatagacgcatcacataatcatctctctctggcaactaatttcacaagcacacattcttccatttccatcgaccatgcctggagcagctaccaccgccgttgttgacagccgccggggcacacagcacgcggaaggccccgccaccatcctcgccatcggtactgcaaacccgacaaacattgtgcctcaggatgagtttactgattactacttcggtgtaaccaagagcgagcaccttaccgagctcaaggacaagatgaagaggatatgtaagcagatcgatcaatctacttattatcactatcattaattagttttcattaacttcaatgaaaaaaaaatatgaaggcccttacatttcaaggactaccatgcaatggtttgtccgaaactgcacatatatgtccaaagaaagtagacagtatatatgtatccttctatatagagaggttatatccaccgtctcgaaatcacaaatgaacagcgttatatcatatattttagtttttaattttttttataataaatgtccaatgatatgttttaccgttgtacctcaggaatattaattactaactaatagagatcttccttattcattccaggtctgaaatcgggcatagagaagcgctacatccatcttgatgaagagatcatctgtgcccacccaaacataatcgataaacagcagccctcccttgaaactcgcgtagaaatagccgccaccgaggtccccaagctcgctgagtctgccgcgaggaaggccattgccgagtggggccgtccagccactgacatcacccacctcatcttcagcacctactctggttgtcgtgcccccagcgccgacctctagcttgcatcgttgctcggccttcgccattctgtctcccgcacaatccttagcctccacggctgctccggaggaggcagggcgctccagctcgccaaggagattgctgagaacaaccatggtgcgcgtgtccttgtagctctctccgagctaaccctggtatgtttttccacccctaatgaaagcaaaattgttggccatggactatttggagatggcgctggcgctatcattgtcggtgcgggctccttggccgatggtgagcgcccgctattcaagatggtagctgcctcgcagaccacaataccaggaaccgggcacgcacttggcatgcaggccactgatagcggcatagatttccacctgtccatccaggtgccgacattgatcaaggataacatccaacagactttgctcgatacctttcgatcggtcggaaataacaatcctaactggaacgacctcttctgggcagtgcaccccggcggccgcgcaatcctcgacaacatagagggtaagctccagctgcaaccatggaagcttgcggcaagccgtcaagtgttgcacgattacgggaacatgagtggtgcgacaatcgcgttcgtgcttgatgaactacgccgccgtcgggagaaagaagaacacgagctacaacagcatgaatggggagtgatgctagcgtttggaccagggatcacgattgaggcaattgtcatgcgtaacccccagctaagtggtcttaaagaaaactaattaccactatcaagaaaataatgcaaagggaatcatctgatgttccggaatttcacgccatgatgtttatttaacgggtgacattgaatcagttgttcacgcttaagtgttgtcaactctactagatgttgtaaataaaattttatcatgttcatgtctcctcttattcttaaactttcatgatttgtaacgaaatttggaataccctgtcacctgtcatctgtatgtataattaaattattacctctgtcaatgtcctgtaataaaactatggttaagtggatcttatcattgcaaatataccatattagaaaaatgttaccgttattcgagatattggctatgtcccattggaatttggagaaattaaaaccatgccactcccatccaatttagtcaacctccgtctaaccccaccgaaaagcgtcgtcacccgcattgagtggagttggatccattgtcgttggctccaggataagttcgccgtccccgagtcccgttgaccacgcagaggccaaccagtgagctctaggaaggtcagtcgcggcgatcggttggttggaggcatagttattaagaccggaccggaccggcggtcggactggaaaaaaccggaaccagagcctccaccggtccggtccaggtaaaagaccggcttacaatcaacccggttagaccgcccggttttaggtaaaaacagctattaaaccggcatgtggctgctgtacacgcgagcaagggtgtgttggaaatttggtcataattcagcatattttaatccaaaataacaagataataaacatgatatttacaatgggatttgatccagtgatagtggtgaatgtaatcaacatgagcatgcttaatgtagaataagcatcaacaatcacataataacacaatattgacattgcgatgaacattaacagtaaaacttctaattgaaataatgtaagaaggttataccccaagaatggtcctccgttggagtttgaggcagtgttgcctccgttggtattaacgggagcctccttctccttgtctccagtgttcgacatgttggtgaaggtgaagtagatgttgacgaacagtgagtagtcgtgtcgtgcgctccccaaaaacctgatcgcccgctcgtccatgcaaacgttgcagcagcgcgtggtttcagaggcctactctcccaacgcgtgtgcacacactcgtcgggataggattaccgtagcagcaacaatgcatccttcactacacaaccatcaaccaattaggaataattgatataagatttaaataatttaaatggatcaattacccaattaaatctaacagggtgttggtgggggaaaattcgcaaaaatatggctgtggctgctgtacacgcgagcaaggtgttggtgggggaaaattcgcgaaaatatggcttcggtgggctttgaacccaggaccatatgggagttagtaaactctccaaccactaggctacctagttccttgtgtttgcaattaataattaatatatttaaacggttattgaaccggattagaccaccgattcaatcggttgaaccagtgaatcatcgaaccgagagcctcaccggttcgattactagtccggtctcaataactatggttggaggggcagcacggtgggtgatgatctggatctcttccaccgccgccgcagccatagacaacgccagcagccctcctcgctagatctgggccagaccctttgtcttacacagctgtggaccaagaccgggtaccgagctcgaatatcaaacat

SEQ ID NO: 14690 - DNA, 2766 bp, Oryza sativa
  unsure (1)..(2766): unsure at all n locations
cctacagatctatattttgcaagcgtgaagggtgagtagattggtggcaacagactggtcaggtcaaatatagaattatctggtagaaacatgatatatctagaactcggtgatgaggagttgagatatatggagttggaccagaaatgaagaggaagagcaagcattatggtggtaattttttcgagtgattagaggcaacggtgaacttctaaagttatcatcgagctcggtctaaggatgtggaaagcgtggatgttagatttgttagctcatttcataagactacaaggaagaaagggttgttcatcggtatggcgagtttgatttgtctatttggtaatgacacgagttgtctagccatgagttagataaaaccaaatttaagacataagatgaaggtgaacatggtctttaaggagtttagtatgtggcaactagagaggtgtccaatttcgcatggcaagatgactgcgatgataagagataaggttgaacaatgttgcaggaggagtccagtgaaagatgttatagggatagcggagtctcttgatagtggcgggtctagcgcagacttgtcgggcggcttgcagtgaagctgtaaagaagataacccttgtctggaggaccggtggatcagcatggtgattctactacttttgcttggcatatatttttcaaggtggagtttgttagaatatgtgtcgaatatactagtactatttgattacagttagacttggagttgtaataagtggtaggaggtggagttagagttggactctgtaactcggaaactctcgtaaatagaggcgagcactacaatgtaatcaatgcgactatgatgtagtgtagacacgcaggaagatgatattggttagggaggagcacccataatcagagcctcggagatgtaggcttcggctgaagttagttaataattatcgtgtgttgctatattgtcatctgacgtgtcttggctgatcaatgactgaagtaatcgataaggttagtcgttgttcctctatatcgaccaaacttttataacattgtgagtgatgagtccatgtagtttgaatgtgtgattgagatccattgtattttggttattttttgtctttatattttcttctgagttctgaatgaggtggcaactaggaagagtaaacattttttttatttcaccagtgatgggtggtgttgagtgcacccgtttcccattatccagacttacaacgggcatcaaaccaaccaatcgcaggtgactcacatgtgatggatggtaataacactcttcatacgtgccaacctcatcaatgaccgatctttttctactgcccatcagagatagtgttccatcatagatgaggctgagttatcactgaccattcatctatgacgagaggggtctacccgtcacaaacgactttatcgagcgtagtagtttgcgccattggccatcatcaacgttgaccatcgaactcgacccaccaatggcgcaaacctcaactgtggggcgtagcccagcgcatggtcatcgaacttggcaaggacagcgagcaaagtcctgcaggactcactttggccaacggtgtttcctttgccttgcctaccatggcttttacagaggatacggtgtgattagaagcttaattaattaggaaaactagagacgtcgctcatgcccattcccaggcaaacttgccaatataatctccacgacctgcattcttagagatgcgtgagccccactacctcaggagtgggaagtttatgactgcatgtcattgatcgatatcctccgaagatccaaaacataccagtcttaacacgtctcactcatatgttgctatgtactacggagtattatttattcggaactttattctcgtggccactcagtcgattatcagatcaaggtaattgtgcaaaaaaactaaattaattatctcaatgatctacattaacagctagatggtctcaagctaaatataaaaaaagaatactgccggattggatcgattaatatcgagttatatattatgctatgtaatctccacagcacgagacttgatccatatttaccaagttgtttgattcttctgaaactcatgtgattgtgaagtttaagttcaatggagtgcggtgtttgtgcagataaataaattcaacaacaccaagactaagttttaacaacatatatagaaacaatatatttcggttttaagtaccccatggaagagttggggctagctagtgccagatagttgatgcactagtataaatccagaggcagcaacacgagttaatttccatccatccatagacgcatcacataatcatctatctctccctcagggcaactaatttcacaagcacacgttcttccatttccattgaccatgcctggagcagctaccaccgccgttgttggcagccgccgtggcacacagcacgcggaaggcccggccactatcatcgccatcggcactgcaaacccagctaacattgtgccccaggatgagtttgccgactactactttggtctaaccaagagcgagcaccttaccgagcttaaagacaagatgaagaggatatgtaagcagattgatcaatctacttattatcactattatttaatttttattcattaactctagtgagaaacaatgcanattatgcaagcccttacatttncagtactatcatgcaatggttttgtctaaaccacatatatattattctatctccaaagaaagctaagtg

SEQ ID NO: 14691 - DNA, 3557 bp, Oryza sativa
cacgacatccagagtaggtgctgaagatgaggtgggtaatgtcggtggctggacggccccacttggcaatggccttccttgcagcagactcggcgagctttgggacctcggcggcggcgatttcaacacgagcttcaagggagggctggtgtttgtcaatgatctctggatgggcacggatgatctcctcatcaaggtggatgtatcgcttctctatgcctgattttttacctataattaaaaggaagacccaatgcctctattaattaggttgtacctagtagtcttgaggatagaaaaaatatatagaacatatcattgcagatttatatctctgttgcaaataattacaaaactaaaatatatgttataatgctctttccagaacaaaatcacgcaatttgttttcgtatgtattctccaaatatttagaaagctgtacatgtttaaaatttggaaagattgacttggcacatggttttgttgaagtaccaatggtctcatgatgtagtatttaaatcctagtcccggccagcaataataaacaatttagtgagatttcaataaaaatttagtaagacccagagattattgttgtgactccctctgttgagatctaattaaaagtgggaactcctcactcataggtaagtgcttgtggtgtgcgtgcctgatttttaacgtgacaaagaccattaatttggtttttacctgcatttatcacttagattgcaaaatggcaaaaacacttatgaagcgtgtctaaagtcgagtattatcatactcttcatttctgattactagatagtgcggcatatatatctaacctctatataggacacgtagagcctacattcttttcaacatagaataaatatatgtgtggtttaggaaccatggcatgatattgctagaaatgtaagagcttgcataacttgtttctgattgaagtaaatggaaaataattaataatagtcatatgataagtagattgaacgatcttcttacatatcctcttcatcttgtccttaagttcagtaagatgctcgctcttggttaggccgaagtagtagtcggcaaagttatcctgaggaacaatattagctgggtttgcagtgccgatggcgatgatggtggcggggccttccgcgcgctgtgcgctacggcggctgtcaacaacggcggcggtggtagctgctccaggcatggtgatggaaatggaagatgtgtgcttatgaaattagttagcctgagagagatagaagattatgtgatgcgtctatggatggagcctcttgctgctgtctctgtgtttttatactaagcatatcagctacctagcactaggtagccacgaactctatctgcattagtaaatggcttagagaaattctcaaaaaatcgtcacatgttccgtgggtttaatgaaatgaaatagaaatatttttcttctatagaccacatataatatatatatataactcaataccataatatatgtagtaacaccctgatcacatggccatgaacaaaatcatacattaagagaactataaaagacatatcttccaaactctaaatttacaattaaagttgggtctgccattcaatccacagctactgtggtctggatcaaggaccctttttccacttcatgtcctctaacatcgtgcaaagtatcaaatgagcaaaatctttacacgagctttattatattagaaggagctgctacgtacctggctgctatcatgattaattccattgcatcgcgcgttattatttttagataacaggaaaaatatccctgccatgttcaatatatatagtatcttattttcacgatagactatagattagagtatgtaattaataaatactaacatataatattgtagagcaaactagtttagaatgcgataccgtacccaaatatttcagcattaattcgtattttcatatgcagcttgcgatcgtcgagctatcattgtagtccaaacatagctggcttggggttgttaaattattttttctgcacaatcactgcactcctgcattgagcttaatcttccctttcaaattaatgagtttcaggagaatcaactagtgctgtggagtttacatatcttaatactccctccatctcaaaatatttgacgccgttgactttttaaaaaatatttgaccgttcatcttattcaaaaaatttaggtaattattaattcttttcctatcatttgatttattgttaagtatacttttacgtatacatatagttttacacatttcacaaaagtttttgaataagacgaacagtcaaacatgtttaaaaagtcaatggcgttaaacatttaggaaaggagggagtatataactcgatattgatcgatccaatcctacagcataccttttttttatatatttagcttgtgattgtccagctgttaatctagatcactgagatagtcaattaacttagttttccgcacaatcacccctcatctcataatcgacagagtggtcactagaatcatgtaccgaataaaataatatgtatcactcatgactgcgacattggttaagactggtaatgtttcggatattcggcgattaaaagaaaaatatgatatcgattgttgaaacatgaattcagcaataataaaaggggtagcacacgagacctaaaagtggatggatgcggagacaaaggatttagacaggttcaggccctctcgatgagaagtaataccctactcctgtttagggatttgaatccgccaggtgtagtatagatctgacgatcatatgtgctcatgccccctagagggcctcctgcccaccttatataggatggagggcaggattacaagatagaaaccttaaccaatacggtatcggtttccaatattatcaaaccaggactttaggccgttccgtaatatacaaggaaacgtaatacccaagtcatgatctggtacatattccatagatataagttatcccctataactagtcagataaccatgccgtgtgggtatggggtacccataatctccacatcgataaatggtcgtcattctctcataattaaatgtcataaacatgggtaccgggtatcccacgacctgcaaagatgattcttgcaggcggcgtcttatgtgctccgcctgccataacctatcttcacagacggaccgctaactcctccccggtactcattttcgccggcggagtttttctccgatgaccatacctgcctacgaaaaaaatacccaacaacggcaaaaatgctttttctagtagtgattcttcatgcatcgttctttagcctgagcatcccacataacatcgttgattgtctagaccccaactcccactaggttcaattctaattccatcaccgacattgctccttcagccttaatcaatgcctgcacattaacagcaatgaaattgttgtcgaaaaacaaccacttctgccgaaaggcaggcttcacttgaagagtggaaaaggaaaatagtggttgtgtattaatttcttcaaaattagctcccccact

SEQ ID NO: 14692 - DNA, 3517 bp, Oryza sativa
ttggtggagtgggtttgaggctttgatttgcttgctctcctctagatcatgcaaaactcacaagtttctacccagtttcgggcctccctgaggataacaatcctactcctacatttcctttttttggattgaataaactagggatatacaaacccaaatcatttttcctacataactcgagagtctgtcttcaaatgttttcaaccccttcatggggaaccctcggccctttatatagtatgatagagggacaaaaccaagagaaccgtgcaaacacccatgatggtctaagccctagttgctgtgctactaccacattgttgagtagatcagatgctagctaatcctgtcagcgggcaggatccactatgtcccccccccctagggatttctaggctgccatccgctcatagcccttgggaacgccgtgcgttcggcctaatccacctctgggcagtggtgtaacagacggcctaggtttaccaatctggggggtggtcccggtgggaccacacaaaaaataaggcaaccgacccaactatatatagaaaaaataatagaaaaaaagcgcatgaacctggaattggaaaccgaaacgtcgcgcgcagcatcacacgattgctacgcgtcctcttctcacttgactactcgtttttcgcgctgcctcctgccacccgcatttgcacaagcaagtccatgtggagaggagcagaggacggaggactgcgactccacgagcgcgggctgccgccgccacccgcctatcaccggccacggctcgcaaagcagagtggctagcgtgacgagactacgagtccactctccgctatattgtagatcgctaattgttgaaacatgcagcaaagaaaaatagttttaaattgctttcttccccagttgtggtataggagcacactcaggaccaagacgttgagaagatgtctcaccacccccgccgcgggtttatgacattgacagccttccacatgatcaagaggaaagactacccattgtaagttatcttgtcaatgatcaagatgcagttcggagagcatatgttcttaaaggcccatttaaaccttatccacatgattttaagaaaagaaaaattggaaatagagatcggcaataacaaaagggagcagcgcacgagatctaaaagtggatgaataaagaagataaggatttagacatgttcaggcactctcaatgaggtaataccctactcctatttgaggattgtatccgccggatgttgtattgatttggcgatcgagttatggttatgtcctcggagagctccttgctcacttgtataggttcggggtagatttacagagaagaaacctatttgaacacggcatcagttttctaatctattatatgataacctaacaaaacctatgggctatgccgcatgatacaagccaacattattctcaagcccaagaccattacataatgctatgggtccaacccacctcctatttccaattggatacgtaggctgagtggatatgtggtacccatgatctccacagttcagcctgaggaggtaccttcaaatctaagagtccaggatagcattacaaaagcctagcaaataaataccacagataagaaagataagcaaaataaaagaaaattggcttaggatagagttaaaacaagtaatttgaaatggaggaagtaatgtttttcattctaaagacaaaatagacggagacattcatgtccaagtccgaaatctacatgattctgagttgtttatgacaattaagtcacaataatatagttgtttctgacaatcaaatcgcaaaaatattctgatgatacacctaacggatagaacagggagtcttgaaaacaaaaccccaacattattcagaacacagcatcaatgtaagccccattagccaagtgaaatcgcgacttgtgcgtggtcatttgaagctccactctcccatttctgtttccgctgcaattgccgtgattcacaaccttggttacctccacaccggtcaagattacaaaatcctgccaagtcaatttattgtcaaaatcgccacccaactccagtttttcaatgaaccttgcgatgcagaacctgcctgagcccaggttaacaagttgaggatcctgtgttacctgccataccctgttttgttcaagttccttccaactgctaactagctctggctgggaatccatggctgacagatcagcagcagccaacagctggtcctcggcagagaggccaaaccagagcttgagctcgggaacatactcgaccttgcccaagaagggtagcgtccactcgcccactcgactccacatgttgctggccacgtccaaacagtaggttcctgcgtcctcagccgatacgaggatgcgccacgaaccgtcgtcatcgccggcaaccacggcataggatgtgattcgatggcgtctctggctgtaggcgtaatcgcggacgtatggcggtggcgggagcagctggcagtaccacgacatgaacgacgctgtcaccgtgggcttgcggtagacaaaggcctcgaactgatcgatgcaccgcgcgctacaccccgcctctgatttggggcttttctccatgatgtagagactgttgccttcaccatcgccgccgtcgttgtccgtgccggggacgaagagggagaagggcctccacttgggtttgttgaggcttggcattgtcaccacctggtctgtgtcggcgtcgaagaggaatgcgcggccagactggtccacgcagacaaccttgcgatctgcaagcgggaagcagtcgatattccacccgtaatcaggatcagccgcttgagctttgaagctgaagattgggtcgggaagctggaacttctcctgcaccataaacgctgccccatccgcatgtttgttcttcgtattgaaggcatcagcagtctgttgttgctgcgaaataatgctgctgctgctgcacgcttccattgttgttgccgttggtaacggtgggtgaaagagtgggtagcgtgtcaagtcgatgcagctaagtgatctgatgccaggatccgccccgttctccacgatcagattcagaaaccgccgcgggaggctcatcgtctttcaatcaaccgaaactcaaactttggatcggaaacaattgtgactttgtgaggaaggaaggaggagtacctcgtcctgcggtcgaatcgcccaagatggcatcataaaaacccaagcaaataaatacctcagataagataataaagataaagcaaaagaagagtaaattattggctctcgatcaaaaaagaagaagatgatgaggcggacctgatcagctgaggcgggtgcaaggtcggagaagtgagaagaaatctcatactttgggggagtatgagattgctgaacgtctagggtttaagaaatctcagccacaggcgggcgcttgggccgttctgtacgggcctcggccacagcccacagccacactagtaaaatgttttttttttcgaaacaa

SEQ ID NO: 14693 - DNA, 779 bp, Oryza sativa
  unsure (1)..(779): unsure at all n locations
acccttattggcaatcaagaagcaggctagagattatggttctaaacacgacttagtagatcaaacttanctgatgcagcnctaagtatgaaaagaaacataatatctaggtaatcaagccgttgactgagttttcagggtggtagatgtctaagctaatctaatctagcaacgcgatttagccgataccggcagaaaccctaaaacgaggagcagccgatagagctaaattgatatgctaagactagattaacagagacatatgataaataggtaggcaaatatatcatccaaactagagcaatccaagaggttgaatgtactgatgcagccttgaacgacgacgacgtaaacgatacaattgcctgggccgacggaacattagacttacctcttagctggagatcgaacaccgatgcagccccgcgtcaggtgccaagtcccgccggacgataaaataaagtagaaaaggtaaaaggtggcgatgcgccgaattgtaatgatcgtgaagatagtttacaatgactctgagtgtacatatttatacccatgggtagatactagtccttgtaggacaagaaagaaactttcctaaagataaaaggaaaacataaagtccttataggacactaaacacactttcctaaagataaaaaggaatctaacaaactattcctaattaatagatacaactaacttcttcggactcgatcagtacgtggcaatcatcatgaagcacgtcaactcaatccgacaatgattacaatatcaccttgcca

SEQ ID NO: 14694 - DNA, 997 bp, Oryza sativa
ctttttttctccgtgaaagcgttttctttttttttccagtgattatctcgtcgcatacgatgtttttcacgaaattttttattgtattttataaattgaatctgtcagggttatggataccacatacctaatagtagttgactaaatctcggcaggacccaccgcataccatgtcttatacggaaacaaccttcgcatataggaggagttccgcataaggaaggatgactagagttctacatggaaacgacaaggactactcggattgtatccatattggttttcctagttctacttggacaaggggatacccatgggtataaatacaaaaccccctaggaggaaaggggacacaatcaacatacagggacaacatagacgccacaaagccataagccaatacaagccaacatacgccaagacaagacgccggatatcgacttcagggataagcacggctagtcccctacagtgtctccggatactgtcaggagagacgaaagcgctatctctgatctcgtcgggcacagattcgaggaggaagactaccctgttgtcgactacgagtcggaacttcagacctccatgtcgacaacaattagataggctaccccaaatattgtactggtgtgattatggtgaataaagtggaacttcggcttcggccaacaggatgtagggctattacctgacaattcaggggcccgaatgtcacaccccgaagttctcctcccaagcctaaaatttaatttataaatgaccctaagaaaataccagtgcaaagcaagagtaaacccttttaaatcaatgcagataataatcggaattgacatgtggaatttttcttgagttctacatgtcgaaattcactaacaggatttttagtggaattttcagagctctagaaataattttaaccaattaaaattgagcaagcaatattttaattccagggaaaatcctttttcctttttctttttctttttcctcctttttt

SEQ ID NO: 14695 - DNA, 2103 bp, Oryza sativa
atatttttatccttagtacctaagtatctatactaatatttaaatacctttacatagtacctgtgattgagaactgttggatctttacccttttggaatgcaaacaccgtaaaagttctcgaatgataaaggaggaagacaaacccattaggcaatcatgggtacaaacttcagcatatatattttagttttgtaattatttgcaacagagatataaatctgcaatgatatgttctatatattttttctatcctcaagactactaggtacaacctaattaatagaggcattggttcttccttttaattataggtaaaaaatcaggcatagagaagcgatacatccaccttgatgaggagatcatccgtgcccatccagagatcattgacaaacaccagccctcccttgaagctcgtgttgaaatcgccgccgccgaggtcccaaagctcgccgagtctgctgcaaggaaggccattgccaagtggggccgtccagccaccgacattacccacctcatcttcagcacctactctggatgtcgtgcccctagcgctgacctccagctggcatcgctccttggcctccgtccttctgtctcccgcacaatcctcagcctccacggctgctctggcggtggcagggcgctccaactcgccaaggagcttgctgagaacaaccgtggtgcacgcgtccttgtagcactctcagagctaaccctggtatgtttctccaccccagacgaaagcaaaattgtcggacatggactgtttggggatggtgccggtgcaataatcgttggcgcaggcccgttttctgatggcgagtgcccgttgttcgagatggttgctgcctcacagaccatgataccaggaaccgagcacgcacttggcatgcaggccactagcaccggcatagatttccacctctctgtccaggtgccaatgctgatcaaggataacatccagcagagcttgctcgaatccttccaatcggtcggatacacagatcctgactggaacaatctcttctgggcggtgcaccccggcggccgtgctatccttgacaacatagagggcaagctacagttgcaaccatggaagcttgcagcaagccggcaagtgctacgcgagtttgggaacatgagtggtgcaactattgcattcgttcttgatgaactatgccaccgtcgggagaaggacgaagatgagtcacagcagcatgaatggggagtgatgctggcctttggaccagggatcacaattgagacaattgttatgcgcaacccattggcacgtggtcttaagcaaaattagttaccactgtcatgaaaataatgcaatcggaatcatctgatgcttcgatatttcactacactatggaaattaattaatgggtgacactgaatcaattgtttatgcatgcttaagtattctcaactctactacatgttgtaaataaacttttatcacttccatgtgtcctctgattcataagctttattgatttgtaacaaaatttggaataccctgtgtcatgtgtatgtataattaaaatactacctctgccaatgccctggtaataaaaagaacaataattacaacacaggttacaacatcggaatttataaaatatttatgctgaagtttgtacccatgattgcctaatgggtttgtcttcctcctttatcattcgagaacttttacggtgtttgcattccaaaagggtaaagatccaacagttctcaatcacaggtactatgtaaaggtatttaaatattagtatagatacttaggtactaaggataaaaatataattttgttaatagagaaaaagggtaaaattgttcctacctccaaattatatagataccacggatgttcaatatggcgaggtaagctctagctgttaccgacatgacttatttgcctttaatattgtgagatttcctgagatttacaatgtggctgaggtatggcaaaaaaaagacactagtgacacatgtgcttaaatcactttctctagaggtaccttcttggaatctttgatgttctcttttgcgggatatttttagaactacatattgtggtcttataacatggttct

SEQ ID NO: 14696 - DNA, 1915 bp, Oryza sativa
aggatatgaaaaaagttacagatatgttactgttgacgaaaaaattgaacacaccggcctgggagatttgctaagctcatgtgcaggtccaaatcttagtgagatgagggcgtgccaatcagtttgatcctacaactgacaagatatgcaaatagtagatcaaaacagccgatcggctgacaagccgatggaatagttccagtcgatagccgataatagccgatgccgatgccgataccagccgatagtgatagggtttaaacaatcggttgtatgtctaatgtagataatgatatgaagacaatcggttgatgatgatgtaataaaataacaatataatccagtataaaccaatcggcaaataatgatatgataaataagcatcgatctgaaggttaaagcacacatcggctggagttccgatgtcatgaaatccacaagattagattaaacagtgaaacctttgttgtcatcggataaatccaacttatatgtatatgcaattcttatgagccgatgcaacatccagataactcaccggctgaaaccccgatgaaacccttattggcaatcaagaagcaggctagagattatggttctaagcacgacttagtagatcaaacttaactgatgcagcgctgagtgtgaaaagaaacataatatctagacaatcaagccgttgactgattttcaaggtggtagatgcctaggctaatctaatctagcaaggcgatttagccgataccgacataaaccctaaagcgagagacagctgatagagctaaattgagatgctaggactagattaacatagacatatgataaatagccaggcaaatatattatccaaaccagagtaatccaagaggtcgaatgtcctgatgcagccttgaacgacgccgacgtagacgatacaattgcctggaccggcggaacattggacttatcccttcgctggagatcgaagacgatgcagccccgcgtcgggtgccaagttccgtcggaacgtaaaaacaaaagtagaagtaaaaaagggtggcgatgcgccgaattgtattaatcgtagcgatagattacatagaccccgggtgtacatatttatacccatgggttgatacaagtccttgtcggacaagaaagaaaccttcctaaagataaaaggaaaagataaagtccttataggacactaaacacactttcctaagttaaaaggaaactaacaaactattcctaattaatagataacttgccataccgtattctctttgaactcagtctcttctgcataagcctccttaagtagatcaatttccttaaccgaatatagtaagaatccgataactgacgacttgacaactctcatcggctaatctcaggacttcgaagccgatgctgactctaagccgatgactactccgggcttaccaaatttcactattaacagtcaccctttttattcagctatctagtatgtgttttgcgtcgtttgtgacagatcgagatgaagagtccagtacactgctgcacaaacccttttagtcccagtttgcaaccccctatagtcccagatagcaaatcggggatacgaatccgggactaaatatcgctatctttagtcccggttcaaatattcgggactaaagatcaatctttagtatctttagtcctaccaaccgggagtaaaagattttttttctttttatttccattgtttttatgctgtttgcacctcgactatcaccgtcacacccaaatccccacaaatcatacataatcatccacaaaaccatcaacaaatcatacacaatcatccacaacacatgcccatccacaatccacaaatcaatcacaaatcaataaaaaataactacaaatcattcattacaaatgggtaccgagctcgagtaactaccat

SEQ ID NO: 14697 - DNA, 15686 bp, Oryza sativa
  unsure (1)..(15686): unsure at all n locations
aatcaattcacaaaaaatctacgaatcaactccacagccaccgcctggctgcctcccctcccgaatcccgcggaggggaggccgccgccgccctcgcgcccctcgggccgccccggcgccaccgccgccaccgcacggccgcctcccctcccggatccggcggaggggaggccactgctgccctcgcgcccctcatgtcgtccccacgacaccgccgccgccgcccgccagaagggagccggaggggaagaggggagcggagtggaggaggggaggggatgggaggaggccggaggagaagagaggaggagaggggaggaggagatgagggtgagtgaatgacgggaggtgtcacgcccagaaatttagcccaaatttccagactattttgtgtattaaatccctgtccaggaatcagccagggtacacaaaagacaagtaataaacagttccaaacgtaaataaagagtaaatacttacagaagaggctcttagtcctcacaccgaaaagaaagcagcagcagcggaaaaaggcgatcctagcggggcttcagctccactcctcaggcaaaacacaactggggtttgagccttggtcttctaacttcgtcttcagctcagaagcactacacttctgaaaaggggaaaataatagcaaaactgagtacaaccaccgtactcagcaagccacaccaatgatgcagacgtgcaagggaatacaaggacagtttgttgctatttgcataaaggcggttgtaaaacattttattgagaaaaagggtaaaactgttgactaattagagtaacattaaatctccactgatcaacactacaccacgttgaacaggcccaaccatcccacctgaactacagtgcattgggtcgatttattaagtgtgagactaatcacggtgaatctggtcaatcgcccataaccgcgggcacggctatttcaatagttttactctggccagaggtgcactactgtacccacatgacacaatccatcggcatgtcaccgtgccaggccagacacgtcaccatgtcgagtaattgtgacaagacccttcatataaccccctctgaccaagcacaccacacctcaggtttcacccctgcccccagcaggcaacaggcagtcccctctcgtgcctaggcgaatcagaaagccgcataggccgtcgcagggcccatccgaactccatcacgctcacccttgcctggatgcatcagccagcggaaagctatacttcaagtcaggtagttacccattcccggttgtggcaagcgctgtatgtcttccagtgcatcccgcgaaccggtccttaattgccatgggtgcgaccagcaaaaccatgcacccacagcccaccattcagtcgcattttagttggatagttacgaccaatgaaacatggtcatatgtctcgagcacgcagctcgtaatgatactaaaaggtctaattctgcaattatcccatcaactgagctagtgataattaagcatggtaagcatatagttctagctagatcaacataagtgacacaagctagtcgaattatcacccacagttgacaaaggacagatatcaaataatatggtacaagcaagcagataggtaaaccctattcccatgtaattagcaaaacggtgcatatttatttgcaaacaataaaacatttataaattgggatcaacatgctcaaggggaatgtgtgacttgccttgcttcttcaaacaatcttccaaactcttatcctcgtgaccacgaacttccgaaacagtgaaatctacacgctggcacgcaaaacgaggaaaaactctaataaagaccaagcaaacagtacaataaaagtaaacaaacatgtagagcccaattttagatgaattttgcaagttgaatggctcaatttggagttcgaatgaatttgatatggattttagaagttctgaaccgtttaaatgaatttctagaattattaacgaatttattgcgcattaaattgattaatttctcaaaggacaagggacgcgttgagtcatcaaggggaggccgacgccgacacgcgagccccgcacgtcagcggcacaaaggggcggcgcacggtggaccaagtccacacgtgtcctcgggtgcgcgtccaccacatggacgacccagatcggcccaagccgatcgggcggccgaggggagcgccggccaggggcacgggtgcggcacaaagccggcccggccaagccaaggcgcggcgtcggcacccgtccactgtcggtagcaccgggcgacgcggaacggcagcgggcggccagaggacagcggtgcgcacggaggatggcggcgcaccccaagaggcggcggccggcaagaaagggggacaggaaaaaaagggggagggaggagaggtcctcactggaagcggcggccggcgcggaggatgatgatggcgacgacgattgcccgatggcggcttgcgaggatggagggcggacggggttgcccttgacctgcggaaggagaagagggagttagggaggggaggaccgatgcggggtgactggaaatgaaggacgatgacgacgacaagaggtggagctcaccggcgaacttagtggatgggtttgagcggcggaagacgacgaccgagcagcggacgaggtgcaggcgagcactgcgaacgcgccagcggcagcagcacggctgggcaaggtccccctcactggcgaggagcgactggagctctatggaagtggaggtagctcggctccgcggtggggaggtggttccggtggtgaatgggagggatgaggcggcgacgaaaccggcggtggatgcggcgcagtacggcagcggcgggagcggcggtagcgcgcggctggaggcggcggatggcgatggcggctcgggttcgcagtgggaggatggctgcagtgatggaatggggaaacagagcggaggccggggtgcggcacggcgaggcgaagccgaaggaaccaacggtgcggcgcggcggtggctacggcgacggcggcgtgcagccggagctcgccggcgggcggcatcgcgcggagcagcgtggggagagcgaggaggagtgcagtgggttcgggcgaaatgggggaaacgagagaggatgctccggggatcgtttatatacactcgtggagggggaatcgtggccgagtggggcggcaacggccagtgaagtggcgaggcatcgtgggatcgtgggggccaaatcggcgccggtttttggggaaaaacgagggaggaggtggaggagaggggtggcttccggtcccacgcgagagagggctcgaggaggccaggaatggcggcgacgtgggcggtttttagcggccatggtggcaacggcagttgccgacctaaggttggggatgataggtggggtccatgggtcccatctgtcggccaaagaggagagggaggccggctggggaggcaaactagacttctgggaggagagggccgagcatggagctgggttgagggaaagagagagagcccgagagagggaggggcgcgctggccgcggggaaggattcttgggccgaaaatagcccaaggaggaaggggagtttttattttgtttttcttttcatttaaattgattaaatgaactttatgcttttaaaattaattcctgagctccgaaaattcacggaaaaatccggagagtatattagggcacaaagaatattacaaaatattcttggtcaatgatttttaagggaaatttttaattttcccattatttcacttgattaaattgctttaacttttctaaaatatctagaagatgcattattaattgatttttaatcccgaccgtaaatcggggcgttataggaggagaggaggagaaaggagataaggtggaagtatcaaggaaggacgcgatcggacgagtagagtgtggctcggggccgatttgtagtcccggttgtttaacaatcgggattaaaaatagatctttagtcccggttggtgttaccaaccagaactaaaaatagtgaaggggtctaacaccgcctgccatgttttgagctggaactaaaaatgatctttagtcccgcttggtaacaccaacctagactaaagatcaaaaagtacccctgaccttttgaaccgggacgaaagatattctttagtcctgattcctacacaaaccgaggttattgtggattttagctgacccgtcaaagatggtttctctacactattacaatacccatttttccatgcggtggatcagcccgcctgcaacgccgcgtttgggaaaatcgatattttcgcgtgcgggagggctgaccgcacgggataatatattataaattagccaaaaattgaccgagctcaattataaacatcaaattacgtagaatgtatagtgtttgtaatattacaagtttcccccgcgacaaataaaccttttagaccatagcatgttccctctcccacacccttaggttcttgaatttggggtccgtagcaagttcactatgaggatcgtggaactctcctagatggttacagatgtcgcaacgaatgaactggcacaagtccatgcataagttgatcagcgttttctgatcgaaccggattgcgttataagggatgctcgggagctatggaaagtaaaagacaaatgatttgtgttaaaatcaacttaaatgaaatatttgcaatatctaaggagcatgaggacttacatctgtaaattcagttctgtatctcccacagaccctgagcatctcgcacacttaatatccgcataggttcgacaagctcggttgcttgtaacactgcattagaatagtggacacgtcagtagtaagaattgacaatcgtgatatacataacgaataaatgttgtcataccggccagcgtccccttatgtagagtttgtctctatttggattctttccaaacccaccaagtttcctataacggccgtgtgctctacaaagataaattaattaattatgctgactccacttattacaaatgatatttacagaatattgggggtttgtttcgaacttacaagttcagcaagcataggaactccatgtacgcttgcttgtcatagtctgccggatcaagaactacgacggtttggtccgttggatagacgaggaatagtatatagtgattgctgcgaacacggattattaaattatgtaagacatatttgaatgtgcggttattaatatgtgaacggaacgaacaggtagttgcttacccaaagtgataggggaccatgatgactcgtttgtcagagtgagagagcattgagtgggccaagtaatttgccacctcggccatctttctcttatgcaaacattcgacgtaatcttttttctcctcgtctatcttattctttagtaccgtactattctccgatatccgcacagtgtgggtcgtctcgcaaaccatcattgggtttacgtatgcaattgaggcccccattctttgggcgtctacccattgtgacatgaggaaatttggaagttagaaagactatgatgccccttattaaatgatgtataggtaagagtggaagggcagtagagggtaaaatagcgagaaatttgaatgaaaagtgattaatgggaccattagtactctattgtgacaattgttttgggataaattcaaatcctagaaatataattattttgggacagatgtagtaagaaagaacatccgaataggcaaactggaaacctaaggagaattcatgaggaaaaaagtttgaagagctagcaaaatcattagtgaagtatcttccttgtcagtctatttcagcgacatcttttaggccgatgttgggcgtatcagctgcgcctggcttgaatgaggagaggaaggacccgacctctagctctttacttttactgcccttgtaagggcgttgagaccatagcgtgttacacaaaagcgccaggaaagacgaatatgtgtgctcagcagcattctagtagcaaaaaaacattttttttcaaacctttgcacgcctccgttaccttttgggaggcctacgccgaaatagtgtgagttactcgctcgttatttttgtgcaggattgactaaacagctttcgtagtgcccattttcgttgattggcgagttaatacaggaaaagaaaaggctgtaccaatcatgagtagtaaagcggtaccagtgaattttttgctttttcagtgaagtactcttgcttaacttttgtccataaatcccgtgtaagcagtaaatctcgtaattctcaataggccccctttctgttaagtgaagtgaggcggggtcgccgaacgaacgacgttagtttacttgcacgcaattaattatcatctttgaccacgagccattctagacagtgccgtcggcaaagcattttttaatggttttggtagttcaatttcacgtcatgaaagattagatagcaaccggtataggctctagttttcctagagggggttaaacccaccccaggtagagacactcagtctaaatgcccccccccccccccggtcnnnnnnnnnnnnnnnnnnnnnnnnnntcctcgttagaaaatacattctaggagtaggagactcatccttctatacgttacctgcctggaaacatgtaagttcatgtcccgcaagttagcgaggttggtcgggcggagactctcgaacgaggaaaaggatctcttcgaaagaattgaacgaggagccgtatgaggtggaaatctcatgtatagttctgtagagggacaggaagggagacttatctgtcgacttttccactataaccccaaaaaaacccaactatgccttacggaaaattgccagagtacaattaaccgtaggatttgaaatcgctgcttatatacctggtattggccataatttacaagaacattatgtagtattagtaagaggaggaagggttaaggatttactcggtgtgggatatcgcattattcgaggagccctagatgccgtcgtagtatagaatcgtcaacaagggcgttccactgcgttgtagattcttatccaagactttatcatttgatgatgccggccaagaagctgccagctgactgcgccccttcaacccgacctttattcactatgcgtccaagctcttggaaccaaaggtatgtatgagcattctgggaaggtcgcaagaagccggttttagaaggtttggagcaatcgcaatttatcatcatattattacccgtttcaattgatgactggctaatatataagtgttccatcacaaattatttttggttcctcaattacagcttattctttttttcgaggagaagggaatatattactcaactaaagagtcctcacaaacaaaatgtgagatgaaattacatttatcatccggtcaaaactcagtaagagattcacaccgggctctgttagctagagtatggctaacattattctgattttgctgaatcttcgcgatgatcacttccatgtttcctgataacagttcttctatgtccctgacaatgaatgcaagttcagagcgccctttcatcgcagattagatgaggttcttctccaccaaacaatcagtctccactataattggaaggagtgtccactgaagaaccaagttaataccttccctataggcaaggagttctgcctccaacggactgctgcaccggtcaagaaaaccacaagcaaaaaaaaaaaaattaccatccccatactgttctttgactactgaatcgagatccatatattatttgtttcatgctggacatgtggactcgagaatattatctccgggatcagatcagataataattttgtgcattttgccttatcgtgacttatatcttggacgtgcgtgctgtaaattgttaaactactacgagtcatggtgtttttttaagggtttgctgccagcttccacagatgatacggatcggatgctattaatatgttggaaactactaccgccgggcgcccgattgggggtgggaaaaaaactattttttctcttaaattatttatccaaatcatgatccgattgcaccattaaatttgttgcaattaaatatttaaaacaagactacacatggatatattccgatgaaaaaattagcttattattgaaatatttttaaatattgcacgttgttccaccaagtagatcagaattgtttcactgagtagatcgaaaatgtttcaatcgtttaaatcgagcgttgtttcaccttatataaaaataatatttcagcaaatagcgaaagaatgttttaagtccctgcaatatttgatccatacatagtgaaacattataagtacactaggtgaaacattttttgtggaacaaaaaataaaacgaattcccttaatagagggtttccataatatgtgggtgatttgttgcaaaagaatgttttaattcactgcagtattagatctatatatatatagtgaaaaattatgattacactaggtgaaactttttggtggaaaaaaaatgaaacgaattcccttaatagagggtttttaaaatatgtgggtgatttattaccctcctcccatccatcccaaccgagcgaccgattgttgatggtccttatcgatcagtttcgaccgtcaatattactaaaataggagagaactggtgatgcttgcaatgcataaatatgttagagtaataatattccactagtattaggtttactaaccttttgcagagaatgatcatgtagtagaggagaatcgacatcaactcagacgataaatcaatcggacgatgtcgagaaccagacttgtgtatgaataggccaagaactcagaattgaaacgatgaattgggccaaaattcataagtctgcggagtagagcaatagaggaggccaccagccgaaactgggctggatagggcagccccaggttcggccgaaccaatcctggcaccgttggatccagtttttggcatggacattcaggattgcatcccaatgacggttggagggcacttaggacaattccccttccacaaccatcataaccacctgggcacttaggacaattccccttccacaaccgtcataaccacctctatataaggagctcactctcttcacttcaacacacacctcaagcaatagctctctcattcctctcaagtttagtttagtagtatctagctggtagaatagaaatagaatgggagtcaggagtccggaaaccttcggaagagttcgggtatggccctagcagctttcctttcctcttttgtaagctttgtacttttattagaatactcttctatatacatttatggtattgaaatactttccgagtatatgagtacctactttacattacgttcatgttatactgaatatacggctagcttatctgggagatgctttggtgcgggtatagtgtttgcttatgcaattactctatgtcatgacgatgatattagagtagtacctagtagtttagacgtggtgtctagattacgatatatcattatttggggttatatattgcggatgagaggtgggccgctgatggtgacagctcaatacgggtattcctccgcgcctatatataatcctaagttaatttcctagggagggttttcctccgtatttagccccggttggatggtcatgatgggctgtcgtaaggaactcggcagtcaggggtggcttttcgaagtaccaggagggcatcgaatagagggtgttagctagtatatcagttaactagaatggatgtatactatgtatattagaagtataggaatagatttcttttctcttttctttccacctagcttagattatttattatgaggatgagcagaaatgcttgtgtgtcactctacccttggattatcttaacccctgcttagaatatgattatcacaagtaatatataaattattagttgagttctctctacatgattttcccacggaataaaataaatacgacacccttagaatactctcgggtgaaatgctacaatggtataaccataatatactagaagtgtttctgcaccattgctgggaattatatttctaataatatcgttaagaaatactaacaccgattcggaggattcccgtaatatgttggctggcgagtttgattcattaacttcatcctaaccacgttttctaaattgttaaatgttaaatgatttatttttgtgaaaaatgttatatataaaaaagtttttaaatataataaaacaaatctattttttaagtgttaaagaaataatcattcattagttgttagtgatttatcttgtttctcatgaagcaaattaggcaagtgggacagctcaaacgcattctagccatacgagggtggcgcctcctgctgacggcacaactgctggcggacggccggtgtggtcggcgcagggaatccacacggcggtgccagcacggggaatgctgcttctgcgctcttagtggttggaatataaatgtaacggtgatgataaagtaggataaaattgtatataggatggtatctccgataactgacttatattgagtaattaattatgtgcttctcgatagcaaaaacatatatcttctaaaaaatagtgaggttttcttacatttatatatgtatagaaagtattaatctgaagcaggcaatcagtgaaaaccggcccgtttggctcgttggaggcagtcaagtaataccactgtccactgccaccaccacttctggagttctagtggctcatccaaatagcggattgatgtttgttgttagtgaatttattcgctcaagcaataacatgagctttgaagaagccattgatgtcgccgcagtcgctctgtcattatagatataggcattggtgatgcagaggttgagagtcggcatgaggaagtcctcggcgaagtgcatctttgagttagtgaagtagcgaatgtcagtgatgcctatgatcagcaacctaaaacaccggtcaaggaaaatgaaacactggtaaaataggatcactggagtggaaatttccttcgacctccctttagcgcttggttaggatcggaagggtttagggcttgtgaggaacaggaaccatgtcgagagagtagtcattttctcgtacgaggcttatttctcttattcctcttaattccattggagtttagtgcgagtgatccaatcaacgcgcatgttgtgcgcacgagtccatagactcataccttttctgttgtagagatcgtcgaactcacgtgggccatgccgcatgcctccatcttgctcggatagccagagatcatgacctagcatttgcatctcatagaaagaataagaccgaatcaatgatccgacgtgaccggcacctgtcttaaaaccggcacttatgtgtgggacctatttggatatcgaggtgccggttttaaaaaattttgcgcgtgggtgcaagggtgggaaaggcattatacgtgtcggttttacatactccggcacctatagtgccgatacctatttacctttctgtagttatgggtgcaaacagcgtggattgacaagaaaaaagtcaaacggaattggtggaaaatatgtgacagtcttttcaccaagtatttcaaatttatattcatcatatagattgaagattcaaggataactgaaaaataaaaattgcataacccactcaggagtgagaatggaacccacgccatagagttatcaacttgcggcgctagccatctgactaattacgagttttgaaataaaactaggaaggtagcccacgcattgcgcgggcatgtattttatattgcgtttgaaaagcttatataaacgaaatatcaactggatgaaactaccatgtttcaaaagtactatttctccataatttttctcatgcatttcttagataatttatccaaactttttgttaccttttaaaacatataatatttaattcattcatataaacaattatctatggtccgtataaaaacctgccatgtttcaaaagtatctatttaatttgtttggaaaacaatctacaaattaaacgtaaattaaaagcttgtttaattgaatgtttagtggtatttttcaaaaaatcctaaagaactattgttgttagtaaataaaactatttgtaccatcaagttagttctctttttagttggttcagattcacgcaagttgttacatacatataaattaacaaacacatatcatatagatcctcacttccttgtaatatttatgatctatagtatctcttctataagaaaatatagtcaacatgagtccaaaaaatttaaatgtaatagtaacaaatatgtaagcattaatatgtataggatagatgcaaggccattaatatgtaagcatttaaaaattattataaaaatggaacatgtaatggttggtccaattttagtgcaaagtacaaacttatttgatttttctccaaatagttcaatttagtgactattgatatgttatttttttagttttattttatatcagctcaaaacataggggttatggatctttaaattgttggtttagttatgaatagagcaatagttagattagaaatcatatgtgcaacttaaaaaatatgcatgttttaataacattattgattttctcgctataaaaaaaggagggtagaggagagagtggagaacttgaggtgagaggggagaggacgggtagtgctatgttgtgcacatgtgaggggagggtgaagtgcacgggaatatttttttctaaatgatttaattgaaaaatgaagatccttattttatcaaaatttctaatttccttttttttcaaaattttaggatgtaacacatgatggcttaagattcgggtagtattgtgttgtgcacatgtgaggggagggtgaagtgcatgggaaattttttttttctaaatgatttaattgaaaactgaagatccttattttgtcaaaatttctaatttccttttttttctaaattttagaatgtaacacatgatgccttaagattctaaaattatatctattggtttaaaataatggatccacctattaagtgaaacttatgagtagatatattttcttacaatttctaaggttttgtttttaattaagacgtacatgtgatgtacgtacatgtgatgtacgtcttaagtgcgctgcagagaataaacaatgatttgaggtgacatattacttattgtaattttttataatgctttgtttcttctatttggttatgatgcataaaggataggtgtgcaagctcaggtggtgtttatttttatacagtgaaatatgagtaatatggatcttaacttatttatttataaatacattaacaattcaaataaacttttaaaaatcagatataacataagaatcataattatttagcttttgtaattattgatcatttttatattatgctattaattagttaaaaattataagacggaagagttgagtgggagaagagaagaagagaaagtacgcacacatataattatgttttatacattttatagtgtttatttatatgttatagttagctacaaatttagtcataaataaattgaaagatataagcggattaaaaattagtggtataggtcgtgtttagttctttggccaaaatttttttgagtgtatggacacacatttaaagtattaaacgtagactaataaaaaacacattactgattctgcctgtaaactgcaagacgaatttattaagcctaattaattcgtcgttagcaaatgtttactgtagcatcacattcttaaatcatggcgcaattaggcttgaaagattcatctcgcaatttacatgcaaattgtacaattggttttttttgtccacatttaatgatccatgcacatgtgtccaaacatttgatgtaacatttttgtaacacccgtatttctgttgcttttatttaaaaagttgtcatttacaaatttggagttaaatttggttcttaattgatttttgtgccaaaatggatctcaaatcctctcctagaaattcccttcaatttctgtgaaaccctagtccaaattcaaattcaaatcctttcaaaatctcctcaaaattcaactctacaaatctctggaaaaaggtgaaagttcactgttcaactgggccgccctcccctttcttttttctcggcccaactcccctccatcctctcctctgttcttctccccttagcaggccggcccagcccagcccgcaactcctcaccttcttcctccttgagccagcctcatccacgcacacaaggtgttcgacagaatgccgacccaagacgccgcaccgttttcgtgtcgtggcagcgccgcgtcgcactcccgtgcaccgcgtgtcgtgccaagaccacctccgcaccaagccgaggccgcgccacaccaaaatcgcgtcgcgccaagccgtcctcgccccggtttctgttgacggtcattatcgatcagtttcgaccgtcaatattactaaaacaggagagaactagtgatgcttgcaatgcataaatatgttagaatagtaatattctactagtattaggtcttctaaccttttgcagagaatgacaataaagtggaggagaatcgacatcaacaccaacgataaaacaatcggacgatgtcgagaaccagacttatatatgaatgggccaagaagtcagaattgacacgatgaattgggctaaaattcacaagtctgcggagtggagcaatagaggacgtcgccagccgaagatgggctggtttgggccagcccatggttcggccgaaccagggggttcgggcaaacccccatctccaccgttgaggccagggtttggcatggacgtccaagattgcaccccaatgacggttggagggtacttcagacaattcctcttccacaaccgtcatacctgcctctatataaggagctcaccttctcacttcactcacacacctcaagcaagagctatctcattcctctcaagtttagtttagtagtatctagctagtggaatagaattagagtaggaatcaggagttcggaagccttcggaagagttcgggtatggctctagtagcaattactctatggcaagggtagagtgacacacaagcattactactcatcctcataatatattatctgagctaaatggaaagaaaagagaaagaaaatctattcctatacttctagtatatatacattctagttatctgatatattagctaataccctctatccgatgacctcctggtacttcgagaagccacccctgattgccgaattccttacgacagcccatcatgaccatacaactggggctaaatacggaggaataccctccccagggaattaacttagcattatatacacacgcagaggaatacccgtattgagctgtcaccaaagcatctcccagataagctaacagcatattcagtataacatgaacataatgtaaggttggcattcatatacttggaaaatattccaatgccataaatgtatatagaagaatattctaataatattacagagcttacaaaagagaaaaggaaagctactatagccatacccgaactcttccgaaggctctcagggtaccagctcgattcaaaaagtgaattcatcacact

SEQ ID NO: 14698 - DNA, 4822 bp, Oryza sativa
  unsure (1)..(4822): unsure at all n locations
gcgcgcnntttagaatcctcatcttgcatgcctgcacgtcgactttatatgaacccctttatttaaccctccaatgacggttgtaacggttggaatagtcggaaataccctccaaccgtcattgggagctaatccacaccgtccagaagaagccctgcatccaacggcgacgagggccctggttcggccgaacctggggcttgcccaactagcccatggtttggctgggggcctccttttgtgttcttctctacagacttgtgaattttggcccagtttgtcatgtcaataattctaagttattggctcattcatacataagtctgattctcgacattttctgattgatttatcgtctatgttgatgtcaattctcctccactttatgatcattctcaacaaaaggttagtaaacctaatactagtggaatattattattctaacataaatatgcattgcaagcataactagttctcctctattttggtaatattgacggtcgaaactattcgataatgaccgtcaacactcccgtcgcctcgctctgaaccctaccacccaaattccggctgtagccaccgtcggctgcgcgtcacccacgtctcgccaccaatcccgctctacgtgcgtcacttcgtgtcgcgtcgccgtcgaatcgccaccagtgcatgacgccaagtcttcacgtcgccgtcccctcctcccaggaatcccatgtcttctcttccgaccgccgaggagtatctccagtagcaagccgagtatgaagacttctaaatgtttcgtgcctagcccaaacctcgcctgtggaataagttagttgcctaggttagttgcctagtgcttagttgtttagtcgcttagtctttccgcgctgttcgcttctgcgccgtcgtttttatggttatttctgtaatgattgtgttgtttatctatgggcctgtccatgatgacaacttatgtaagaactactacccggtgatgtaataaagtagtttactttgattcatttattctgtgtgtaccagctagtgtatcctgggactggtactatattaaaggtaatgcataacactccggtgtaagttagctgtgtttatggctaacgaatgtcaggcgttataattttttgtcaaaatttttgggatctaaacacacccataatttagatgttatagctgctgaattgtttaacagaaaaaattcttttctaactaataaagtatgataataggagaaaaaaatatgtgcaaaaatatgaagacattgagagaagaagaggtgaaagtaacgtgagtatgtactatccttaaaacaaacatacatacatatagtaatacgtacggctcaaggtgaaaaaaaaaacgttcgtacatacatatagtaatatacgtacacgcccaaggtggacctcgtatggggttaggcagtttgttttcttttgataaatctaatggtggtaaataatggatccaccaaatttaatgaaaagcaatagctagagaatttttagaaaattctctaatttattataatactacgtggcggtttggaaacgtttgtagtgtatcctgggactggtactatatcacaggtaatgcataacacccctatgtaaattagttgtgtttatggctaacgaatgtcggggcgttacaatttttggccaaaatttttggtatctaaacacacccataatttagatgttattgctgctgaattgtttaacagaaaaaattcttttctaactaacaaagtatgataataggagaagaaatatgtgcaaaaatatgaagacattaagagaagaagaggtggaagtaacgtgcgtacgtactatccttaaagcaaacgtacatacatatatagtaatatacgtacaggccggctcaaggtggaaaaaaaccgttcgtacatactatataatatacttacacgcccaaggtggacctggtctggggtcaggcagtttttcttttgataaatctaatagtggtaaataatggatccacctaatttaatgaaaattaatggctagagaatttttagaaaattctctaatttattatagtgccacgtggcggtgtaggaacatttgtaggatgacacgtggcgacttaggagcgtttgtaggaaatataatggacttttagtatataatagataatagatagatagatagatagatagatagatagatagatagatagatgatagatagagaaacatgttaattacatgagcattgctctagtccttcttttttaccacaaggtactagtaccgtgaggtactgaaatcccgtccgttgatgatggcagatcgaacggtcgcgattacatggtacctcggggtactagcttggtcatggggtggcaatcgcgagtgagccatggtgaaagggtataatcatattttctcgtttggaaggatgtttggatcggtggtttgtttggggaagtgccgcagagtagcaaaaccctaggcttcctcctgatggtggcgcgtggcggacaatacgacggcgacggctatggcggcggcatcagttggtctcgacgctggcgtcttccacttgtcccgtcattttccccttcgtggcggtgcctcatccattcctctcgacaccgctactcctgcgaccatgcggcggatagggtcctggagatccactgcagccacagcccttgcaacggcgtcgagacgactcctgcgactgcgacgatgactcctgcggctgcggctgcgactactcctgcgaccgcagcgataactcctgcagcgctggtgaggacacctgtgggggccacgcttccagaacgattgaggatctgcatctgcctgcggccgtgcggccgtgcggcggatagggtcgaccttcacctcgacttttttctcccgtgcagtgcagcggcgctagatgcaggagaagggaaagcgagagatatcgaggcgcgcacgctatttggaccacacgcgatagctccccatcgtacccctcagcaatcaacggccggatggagactggtgcctcatggtaccagtaccgcgtgctacaaaagtgaggacgggagaaaaactctaattacgtatattgtaattatagtgtgtaatataattatatctcaaatataaaatatattgtaattatagtgtgtaatataattatatcttaaatattttatatttggaagttttatgacgtgttttgagctgatagcccacgcaccgggactgttatctgccaacccacgaggtcacagctcatctgtagtcttgtttttacctgttcagacagtcacgtgatccattcatccaaggtagtaggaagataaattctccatccctcccatcaaatatcaatataatcttaacacattcaaattcatagtattacaatgtatcatatctaatattgttgagtttttataagatggaaagagtacaagtgagatagacgagataatatagactagcctattgaaaacttttactttgccgtacatgtagtattagttttttattgaaaataattgaagctaagcattgaccaaatttctctcgagatgttacgtataaggatcccatataatctaggagttcttgctaattaactactccctcattaatagaatataaaaagttttaggattggacacggttattaagaaaatagatagaagtgagtggtagagggttataattagatgagtagtgaagataggtggaaaaagtgaacggtggagggttgtgattggttgggaagagaatgttgatcgagaagttattatattttgggacagatcctgagggctattttgggacggaggaagtatagtattcctctgcaacagtatattgatgaacagtgtttggcaatttggaccactgcgttttgatgcacggggattaatactactactgctaaagttaatttcagttatactggcggttgcaggtgatctccattttcgtcatgtcacacgcatgcaggcaccacaccaacatgatcaaatccaatttcccaatctccattcttgattgggagtaagcagtccactccaacagacacaattttatacattcacacacagtgcttcgttgttttatatacatatagttgcaaatatcccagtttcttccacactattgcttgtcaaccccagtagtgctaccaatggcgtcggctttgttcctttggctttcatggcttgtgctctccctcctctccatctacctcctcgatctcctggcacactcccgccgccgcctcccgccgggaccccgccctctcccgctcatcggcagcctccacctgctcggcgaccagccacaccgctcgctcgccggcctcgccaagacgtacggcccgctcatgtcgctccgcctgggcgcggtcaccacggtggtcgtctcctcgccggacgtcgcccgcgagttcctgcagaagcacgacgccgtcttcgccacccggtccgcccccgacgccgccggtgaccacacaaggaactccgtcccgtggcttcccccggggccgcggtggcgcgagctccgcaagatcatggcgacggagctgttagcgacgcaccggctcgatgcgctccacgagctccggcaggaaaaggtgtcgaagctggtggaccacgtcgcgaggctggcgcgcgacggcccggcggtgaacgtcgcccgcgtggcgttcaccaccagcttgaacctcctctcgcgcaccatcttctcgcgcgacctgaccagcctcgacgaccgtggggcgtccaaggagttccagcaggtggtcacggacatcatgggggcggccggaag

SEQ ID NO: 14699 - DNA, 3552 bp, Oryza sativa
  unsure (1)..(3552): unsure at all n locations
tgcgaacgaccgcccttcacttgaatccagtaagggccgctgccccacgcaccgatctgcgnncgacggtcgtccacagcccggatcacaagacggtgtcggcctcagcggcatgcgcgcgacggcgacgaagagcggcgggttcagcggcgcgtgcgcgcaacgtcgncggtggtgacggccggacaggctcggacggtgggaaggcaccggatccggctaccgcgacggcgacggcgacgatgacgatgacggagaccgcgatggcgacgacgacggcgaccgtgaggagggttttctttttttggatattttttttggttttttatttttgcgtgcgggcgacataaccaccccgcacgcgaaaatcgcgtgcgggtgcgccacccacacgtaaaaatagtgattttaaagacacttggttccagacagttggaagatccgcacgcgaaaatcacttttgaccgcacagaagaatcatttctctactagtgtgtttagggctgtataggtccaggacctaaagttgtgactccggttggtcctatggtagatcaggcccaatgtgacctggatggcccacggttggtgggccaggctacgcactctaataagtggtatcatagctcaggtttggaatccgcaatgatttctatgggtcacatgggttgatgtgacggaaaagattgttgacaaaagtatgatatttacacaaatatcagatggctacctcctcgtgtgcaaagtagagttttcacaaagtttggaatccgcaatgatttctatgggtcacatgggttgattgacggaagagattattgacaaaagtatgatatttacacaaatatcggacggctacctcctcatgtgcaaagtagagctttcacacgattattacgcgggtaatgctgcaggtggcttatctattctattttcctttctcttctctctcttttaaccactttttaaaaaaaaattagacaatttttccttctaaattaattatacgattcatgattcaatttcatcattacgttcgtcataactaaatctttataaattgattctgcttgattatatttatgagaaaatatataatatgattacagatctaatttaaacatttttatattatacacgaaacaatgagatgtaaatgttggaatattagaaaatactcaatgaaacattcaaagtacaatacgtgcaatatttctgaataaataagtaaaacattagaaaataatgaaacatccgatgacactacatgcaccattaacaaataaactattgaaacatcacaaaataattattgaaacattaaaaaacacacccggtgtgacatttaaaatagatccattataacacaaaacttaaaagatgcagcatagtcaaattctaattgtaacatttatttctcacacgtcaaacttttgttggagaaaagaacggtacaggtacaactgcactgaacccgtcccccaatttcttcttgtaaatacatatagttgcaaatatcccagtttcttccccagtactgcaatggcggctttgtttctttggctttcatggcttgtgctctctccctcctctccgtctacctcctcgacctcctcgcacaatcccgccgccgcctcccgccgggaccccaccctctcccgctcatcggcagcctccacttgctcggcgaccagccacaccgctcgctcgccggcctcgccaagacgtatggcccgctcatgtcgctccgcctgggcgcggtcaccacggtggtcgtctcctcgccggacgtcgcacgcgagttcctgcagaagcacgacgccgtcttcgccacccggtccgcccccgacgcctccggtgaccacgccaggaactccgtcgccttgctgcccaactcgccgcggtggcgcgagctccgcaagatcatggcgacggagctgttctcaacgcaccggctcgatgcgctccatgagctccggcagaagaaggtgtcggagctggtggaccacgtcgcgaggctggcgcgcgacggcgcggcggtgaacgtcgnccgcgtggcgttcaccaccagcatgaacctcctctcgcgcaccatcttctcgcgcgacctgaccagcctcgacgaccgtggcgcgtccaaggagttccagcaggtggtcacggacatcatgggggcggccggaagccccaacctgtcggacttcttcccggcgctcgccgccgccgacctgcagggctggcgccggcggctggccgggctgttcgagcggctgcaccgggtgttcgacgcagagatcgagcatcgcaggcgtgtcgccggagaggagcatgggaaggtgaaggacgactttctgagggtgctcctgaggctcgccgcccgcgacgacgacacggcggggctcgacgacgacacgctccggtcagttttcacggtaaggacatgctccctctgaccaaaatataaaaacctcgattttctagtgaatctgaataatctatccaaaataatggtaaatgtcttgtagaattttaggttcttatattttaccacgaagagagggttcagctttttcacatgctgaaacgtctagcgagttccattgtagctactgtaggtaaacagaaacagcaatagttaaattaggtttgctgtcaatgtcgcatacttccgttttttaacccatattgttgttaacttatcgttgttgaatttagttccacgtcggtaattgataatgggatagcacaacttaaaaagtgagggcagtaattatccaagactagtctcactagtactagagaaacaattttcctgaatgagctatttagtttacagacgaacccttaagaagcctgtaggtgaaaatcgcatgccaaaataaaccgattttcttatttttgcatgcgggcattgttggcctcttaaaaatatacttacaagtcaatccttcatcctcttttccctcctctacacttcaaaattcaaaatttcatcctctttttcctcctcaacacttcaaaattcaaaatttcaccttgcgggcctcttgaaaacatgcctacaagtctatccttcctccacttatccctcctcgacacctcaaaattttatctcatccacccatccacgtcattatcctttctatcctctctctcactctctatcctcttccactctctcacctctctctcccgcggccggcgtgggcgcggccagcggcaccgcgcggcttggcggcgtccttagcggcagcgaccgagagcggtgagctcggcagcgtgtgcgcgccgctgcggacgaccgcccctcacctgaatccagtagaggccgctgccccacgccccgatctggcggcgacggtcgtcccccgcccggatccgaaggcggtggcggcctcagcggcatgcgcgcggcggcgaccgagagcggcgggttcagcggcgcgtgcgcccancggcggcggtggtggccggcgggcaagcttcgacggtgggaggcaccggatccggctccgcgacgggacggcgacgatgacgatgacggagaccgcg

SEQ ID NO: 14700 - DNA, 673 bp, Oryza sativa
  unsure (1)..(673): unsure at all n locations
ataaggtgnacactgatgacacaagcagcatcgacttcctcaagttcttgagccaaataacgcgctagataattatgtgcaggcaaaggactaccaggagggccagagagagatgttccatgtcttcgacaaggactagaaaacaacttcatctttgccaccgagcctcgccacgttatgtccaatgcatcaagaaaggctcactgataaaaagggcgtccgaatgatccgcgaggctgatggtgacaggcggatcactacaaggagtttgtacttaaattcagaaaaaaataaaagaagcaatttgattaaaacacatacaaaaattataaaatcattaaaactataaaaagaaccaagattccatgtagaatataaaatatcaagagtccatataaaagtataagttataaatatatggaatttggaataataaaagaagtattaaaagaagaggggcggcggggagatctccgcctccgcggcggcagcgggaggcatcgccggagctagggtttgcttaggtttttgctgttctgattcgcaaattcgcaaagggtagaaaactgaattccaatctttcagtatccaagcgcctgttaaatttgatgctaaaaaaaacctggtaaggatttcttatatagttaacaaaatttggcagcaaattaaatgt

SEQ ID NO: 14701 - DNA, 1371 bp, Oryza sativa
cgcgccttgaaattccactctgtacccccctgcccagagcaactctaccgcaccagcgccaaccatgttactgctgcagaagctcaaggtgctccagatgtgattttgggtacgttccttgttaactcagttcctgcaacagtgcttttcgattctggtgctacacattcatttttatctatgagttttgcgggaaatcataggatggaagtagaagatcttagacgtcctttgatggttagtaccccaagtaatcaagcactctctttgcaacgtagcccctctatcagaatagaaattcaagaagtaccatttctggccaatcttaccctgttagaatccaaagatcttgatgtcatcctagggatggactggttagccagatataaaggtgtgatagactgtgccaacagaaaagtaactctcaccagcaatgatggtcgagttgtaactgttcatgcattgtcttctgagtctttaaggtcaagtctgaaccaaatgactttggaagagattcctatagtccgggagtatcccgatgtgttcccagacgatttacctggtatgccgcctaaaagggatatagagttcagaatagatttggtaccaggaacaactccgatccataagagaccttatagaatggcggccaatgaattagcagaagtcaagagacaagtagatgatttgcttcagaaaggatacatcagaccaagttcatctccatggggagctccagttatttttgtggaaaagaaagatcatacccagaggatgtgtgtggactatcgtgcactaaataatgtgactatcaagaataagtacctgctgcccagaattgatgatttgtttgatcagcttaaaggtgccactgttttctccaagatagatcttcgatcagggtatcaccagttgagaatcaaagaggaagatatacctaagacagcttttaccactaggtatgggttgtttaaatgtactgttatgtcttttggacttaccaatgcccccgctttcttcatgaacttgatgaataaggtgtttacggaataccaagacaagttcgtggtggtctttattaatgacattcgtatctactcccgaaccaaagaagagcatgaagaacatcttcgccttgcactagagaagctacgagaacatcaactgtatgccaagtttagcaagtgtgaattttggttgtctgaagtgaagttccttggtcacgtcatctcagccggaggagttgccgttgatcctagtaatgtggaatccgtaaccaactggaaacaaccaaagacagtttcagagattcgcagtttcctaggcctcgcaggatattatcggaggtttatagagaatttttccaagatt

SEQ ID NO: 14702 - DNA, 1800 bp, Oryza sativa
  unsure (1)..(1800): unsure at all n locations
acactatttttgttcaacttntgttttggatctgaaaagaaagaaaagtaagttgttttggcgacatcaaaagaatgatgttatatctanttgattcttagttctgaaggtacaagtgcctgtaaggactttttcctttactaatgtagtagttgtctgtagaatgtactgggccaaaaagattctagaatggactagtggaccagaagaagcactttcaactgcaatttatttaaatgacaaggtaagacctatacacatgtttgggaaatacagttgtgttattttgaatttgtcctttttatagttttgctagttgtagttaaaatagctatatttcaacacatggaacatgataaagaaacatggaacatgataaagaaactgctcacatgaaaaattgtaattgaatagcaacttggaagagtctgcccatgcttaaattagttcctgcgccgataaccgaaaagttggagtcacatttatcaaattaagaaatatataatttgacattcttttcatgtaaggcagaaaattgtatggttggtgctcttttcattatcttatcttcccttaagttaaaaacatcatccttctagggacaaccagacaataaatcagcttcacggtcgcctcggataagctggactatcctttttcttggttacctgtcagaagaaagatacaaaacagtaactggggaaataaattttcaggaatgtgaaattgctcgaagatattttcatagttgaacctacaattctttccccagctggattgttctcgttctttaataggagtagttgtttgcattgaagtacttctacgcattttatttatgctttacaaaaagtctaacagcacagatcttgtgtcagtatgagatagatggcagggaccccagtggttacgtgggatgtatgtggtccatatgtggcctccatgatcaggtcattgtgttatcacttctcacttcacagggaaaaacaattttgcttttcacaagcattagattgttggtgacattctagaagcgagtattccttacaccactgctgttttctcagggttggaaggagcgtccagtatttggaaagatacgttacatgaattacgctggctgcaagagaaaattcgatgttgacgcttacatttcttatgtcaagagattagctggtcaatccaagaagaggaacgctgaggagtctccaaatcctgtagtcaagctttccaagtctcagcactaaatccgactaggaaaatatgaacatttctttgtgtggtataccacgagctcggaaaattgaagaacagtgctaacttgaggtagatcatgtagggtatacactgtagatctgtttgtctgatatccttgtaggcttctaatcattcaaaatttgctagcattgttaagactttaagacatacagtgtcacaccagttgaattcaagtgtacacattgatctaacactgaactaaagtactgcttactgcctaacaaacagtacttggcaaacgatgcctactgtgtaatgagaaagataaaagaaaatgtcttgcaggtagtgacgtttttttttaagtaaatttcacaaaactatatgtattttgtacaatttatcataaaactaaagatttaagagctttcacaaaactacagatttagtgtctccgtttattataaaattataggtactttgtacaatctatctcaaaactatagatttaagaatttatttcacaaaactatagatttcgtgtatttgtttatcacaaaactacacattcagtgtcttcat

SEQ ID NO: 14703 - DNA, 4498 bp, Oryza sativa
  unsure (1)..(4498): unsure at all n locations
agtcgcagtcccccggtctttgtctccttttaacagggactttgtggttcaaaatgcgggtggcaggagccagcccaaaaaacaagtagtcaattaggaagagaccgcgtaccaatcgttttatctggcgcgaagcgtttcggtttcaattcagggttaatgggtttttttcgattttttttcaataaaaaagtgggcgggtcgcttttttttttgtgtggtcccccggggccccccccacagtttggtaaccttagccggtttgttaccccattgcacagaggtgtattaggccaaacgcagggggttcccaagggctatgagcggatggcagcctagaaatccctaggggggggggacatagtggatcctgcccgctaacaggataagatagcatttgatctactcaccaatgtggtagtagcacagcatatagggcttagaccatcatgggtgttggccaggttctctggtttgtgtccctcngggttggttgtgaggggagcgttttagttattacgcaccttgggtgcggtttagcgctgccatatatatatatatatatatatatatatatatatatatatgtatgtatatacaaatatgtgtgcacttaagtaattagaggtcatatgcatatatatattaacaaaatatgagtttgcaagtaagtaaatatacacatatattaccataccaagtacacaaaagtaaatgcatgtgtgcatatatgaatatatagatatatattccaattcgttcggacgttgtaatctttgtttctgctactacgacttggtggcatcggaagaagaaggaccggctttatgaatagtcgatccatcgtaatagaattctcctgtgggatcaagaatatgcttgttgatgaatcccattatcttttcttgaacagcccttatgaaatcatcgtgggtggtgttatctatcaggtaaatcatctgttatttggaaaaaaaggggattatatatatgaaaccagtaagcaataattgacgaaagaataaatttacgtacttcaaggtcctggccagtcctgatttggtgtgctaagcagtgcatgtaatggcatacgtaatagccgcacaagttagtccccttttcctactttgcacactgaaagagaaacaacgagagatttagtatgcatatctgatttagaacaaagaagtgattcaatacaaaattggagctagcatgtactaaccggaaaattgaacctccgggtgagtttttcattccagatcccgcggaccaatgtacggaaccgaatccatgctctatttagagttgttaggaaggattaatttattatccgagacctagtagttatacaatgattcataatgacagtgcaatatctgacaatacctatctatcacttcgaaaatctttgcgaaagttttctctggtttatccattgaatcgtagacatgaactttggatttctcaagatcgaaaagaagaaggacccaatgaaatctgcaatttgcattacatgatacatagtatgattgtaggaactttgtaggaacaaaattgaagaaacaaaattgaagttaattatgattgtaggaactcacgatgtgttgtagggaagtagtatgaacctcttataatgctgttgcaccaggaaatggacgatattgtcctcggtttgtttctcatattgttgtatcatcagcgtgttcactttgcgtgggtccatgaatccagtattgaatttgttgtgttgacggcacaactgaatctccattctacaacggggaaaaggaatgtgtgtgagcaacactcaaaggaggaacaaaattgaactataaatagtacttacaaaatccacgcgttgagaatagagacgtcgagggccttcaggtggtataagtcgaagacttccttgtgccggatccaaataacatcttctccttggtaataatttgagtttcgcaccctagctctgaacatctctctacccatcgctgatttgtccatgtaccattgatggaaccggtacatctgtgtaggtagctctctgatcttatcaggcgtgactagcggttcaccgagtttaaacgtgtacatgaccggagccgtttcaataggtccgtcctctagcaactgctccatactcagtcccgtatctttcaagaagttgcatatctctagttgtgccggttctacgactaacggttcaacctcttgtcgtggctgttgccccaactgagggacttcctttccgcacttcactgctgaaggcttggctttaagagccttcctcaatgttcgatcatagtcagaaacttcgaccggtttgcccggttcggccatcttaataaagtgatcctgaacatccggggctatagggatcttcttttccggactacatggcttcaactgctccctaacttctgctctaacggcttcatcgagctcctccggagtcaagtcgtacgcccttttcttgagagcggggagccgtggctcgtcagatctagctttcttcttcggccttgatggtgcgggttcatatgggcgggaccttgacggtgtagacttggcagcaggtgcacgcggaggagtagttgcccgcgggcccgacggtgcagacttggcagctggtgcacgcgtaggaggtggtggtgcaggggaaggagccggaggagtctgatgaggcggtgatgtcgaaggagactgtgcttgcggcggggaacgaagagcgggcggccgttcttgcccggaaaacacgatgtacttcttacgccagagtatgatggcgtgggctgtgtctccaagtttcttctccccgtctcctccggggatgtcaagctcgagatcctcgtaggttcattccaccagctctatctcgaccttcgcatatccatgtggaatgggccagaaatggtatgtactcgaagggtccgtgggtatggccatgcccgacacgaccttcacaagaaatatagttcattaattactaatcaacatatatatgtaacaaatttcgcatttcgcataccttgatagacaagttcctgaagggagtatgcatatcgcagggtgttcgctgcgtgatatcatcaacggggaagtgggttgcttcgtgagctgccactgcctcaatgccctctgatccaacttggcccgttgatgcatagctgctgcggttgcccgaggggctcaccatgacgggtgcttgtatttccattccgcgctactcggccaggcattggtccacctgtcttgtcacctcctcttgcatccttgcctcgtaggtggacaccctatactcaagatcgatgaccttagcctctgtatccctcttgctcctcatctgactcctatacgtgtggatgtcctctttgaatccatatttccaaggaaggacgccttttcctcgcgttcgtcctggatgctcaagattctgtagtgcgagggtgagctcgtccttctctctgtcgggccggaaagtcccctgcgtagaggcttcaattgcatccgcaagtcagcgtgctgcatctcgaatctcatcgccgaatatgagggagccatcacctggattgagcgatccaccgtgtgcatagaaccagttcctcgatcgcgcaggccaattagccgtggccggcttgataccccttgctatcaagtcagcttccaaacttgtcccacttggggattgcctttccatatccgcctgacccaagccggtgatggtatttcttcttagctgcattggctttgttcttttctatctgtgcttgcccttgcgctccaatcttgtatgccacaaacgcatcccagtgatccctaagcttgttatgcacgttgaaatcagttgtcaagcccttgaggatttatctcttgtacatatctgatttgtacctctggaatagttctgccattttcttcagggtccattctttgcatctgggacgatctacctcagggatcgtgaatgtctccagcatggtggtccacaacatgtccttctctgtgtcagggagaaagctatcttcatccccgcgtgacctagttcgacgccagtacactatgctgatagggacgttgtctctcacgacccaaccacaatgatccacaaactttcgtcctatacccgccggggctactggttcgccgtctggggcaatctcagtaacgatgtgccttccctcaagcttcttcgcgggacctcttttcctgcgtggcctcttctgtccggccgacggttgactatcagtcccctcctcggtcccctcctggttagcctcctggttaccctcatcgttgccctccttgttcaggtattggttgggatcctcgttcccctcatcatccacccagtactgactactgccctctgcgatcgtgtctaataggatttgttcgtcatcgcggtctgccatctgtgcgtgcaaagaaaaaaagacagtgaggtcatggacatcaacatgtacagggtaccgagctagaatgtacaacaacctcg

SEQ ID NO: 14704 - DNA, 1987 bp, Oryza sativa
  unsure (1)..(1987): unsure at all n locations
ccatgtgcactgaatgcccncngttganaancaccttcgttacncattacacacatgcatatatgtgtgcactatatgtatatctatacatatatataatgcaattatacatatagtgcacacatatatgcatgtgtgtaatatatatatatatatatatatatatatatagacctagggtgcgtaatagctaaaatgctcctctcactttcccctctctctctccgctttttacggatctagcggcgcagcggaggcaaggaggagagcgatggctgcggcggtcgatggagcagttcaacagcggcggcgtgccccgcctactgccaagggtggcggcgtccaggcgacgggcggccgacttaatcaccaccctctcccgccgttgctcgaggtgtgttgcccggggttgtcgtcgggtcgtggccggatcggcatgtggttctttttggttagatatgtagtgcacccgttaccggtgtccgcatccattgtctgctggaggtccttgtatatgctcatcatcgttggatccattcgcttcttgggtttcttcgtgccggttcttgttttcttggtattgctttgctcatggaggttcatgttttgttgatgcattgtcatggtggtggatgctgcatctcagccttttgcatgattaatttcagattgtgctttcctttcttgtgcagtgctgctactagcatcttacaaggtcattaaactgtatgatggggggattggttcaattaagtatctcgttgattctcagagttattttctatatggaaaaaaatatgtttgctttcttttatggcaaagcaattcacaacagcaatattatggctatgaaatactaggtttaagtgaaatcatatttattttgctgatttgtgatacttagaagtaaccttcattttttttatccagatggctatgagaatgcctctccagacggccgtggtgacagatatctgtcgacagggaggacttgagaatatgcagcacttcgtcggctccatgtcgatttgttttattggcgttgtcttgcttgttggattcgtgcatgcatagatggatcattgaccttgatctacattgtcgtattagtcttggcatcaatcttcatcaccgtatccttcagtggtgttgctgttgtgatttttttactggagctgttgtgatctttaattagttctgtttattctaccaatgtaccacattgcatgtgtgatcacatcgttgatgtaataccgaaattaatttactcgatcaaaatttttttaatctaacttgtgagtaattaatttactgatagaaagcgggctataagttatgtctacgcatagagtaattcatctaatgacataagaccactagaaccggaacggaattcttgctagattcaatatgttctggcaatagtaatttctttacataaaagccaaaaccaaggaggggaatggatcaatatatttcgtcgacagtaatttctttacttagaagccaaaaccaaggagaggaataaaataaaccgggagtaatttttttacttaaagccaacacaaaggaggggagcaaaataaaccgggagtaatttattttaccgaagaaaatttcgtggcagccaacaaaataaaaataaaccaccggaaataatttatttaccgaagaaaaaatcatggcaatatttatttgttgattatacgtaatttatttactaaaagaaaattcgtggcaagattaatatgttgattagtaatttatttactaaaagggaagagaagcagtgggaatcaaaaaaagggtgggaatggaaggggtgggtggcggttggcggacgagagggaagtgggggtgggagcggaccaaagggaggtgggttgnaatccctccctgcngtttggtgggggttgggggttgtgttgggttgggtgtgtgtttggtgggtggggttgtggtttnggnttttntgggtttttgggtg

SEQ ID NO: 14705 - DNA, 681 bp, Oryza sativa
cgcctgatggtattggtcctgtcagattattgtaggacaaatctaaaatgcttaaatatgttaaatttgataagctgggaggaatctctcctgaaagattgttgtttgagaggtctattgattccaaagcatgcatactcccaatcttgtgagggatattcccattcaattgattccaagataagttcagatttaccagcccttcaagacttgaaatgtccattgggatctcaccagataaattgttaggtgagaagtcaatggtcgttatatccaaaacactaaaaccttagtatttaagctgtagtctcttggttattacagacagttcaccaagcctaagtcgataaaaacgaattgaggcaggaggatatggatttgctgcactatattcatataccatagcacttagattcgataggcatggaggtatcataccagataaccgatttttcgcaagattcaaatggcgaagatctcttagtccagtgatagagcctggaatatgcccatggaacatgttgttgttcagtcgtagaaaccgcagcgatgtgcaattccctatccacattggcaacgttccagagaattcattccatgctagatccaaaaaggacagaaaaaagcatctttgcaaaaatgatgggaacttgccagagaagctgttgttacttaacataa

SEQ ID NO: 14706 - DNA, 1359 bp, Oryza sativa
tttgccaaaccgcgcacagcggcaaacttttcaataagctaaattaggtaaccgtataaatatacttttctgagtgtaggaccctcaaagttgcacagggtggtcagatttgttgttttcatggtcatttcatttgatgataatactagaacctggagtgaaaccatgtctccgagcacatttggaaataggccatgcaagccaatagcatcaaggttgagtttcttgaggctcgttaggttccaaaatcaacaagactcgattgagtccaagtagttgtaggagaggtcaagctcctcaagattcgtaaggttaaggtgtgggagggattggttggcactagtgagtgagcaaccacctagaccaaggaccctcaaaatggaatcatgttcaccacttgaggccaattgaccactgtactgagatcgatttcccccaggttaaggtgctctagcaaaggtagacgtgtcaaccaagagagatccgtggaatacggtttgattgcatctaagcttaatgaagattcactgaaatgtgacatgccagagatgtcgagataccgtagtttcgaaagattaccaaactgaggaggcaccttgtccgaaaacggtattccagagaggttaaggtatcttaggctcctcacagagcctaggaactattggaaatatggtcatatatcggcatattttaatccaattatttaagacaataatcataatcatggcatgaacaatgtggggtgatctaatgacaacatgtagcataaccagtaacatgcttaaggtatcatgagcatcatgcacatacccataccaaggacgcaattgacttgcgactagcatgactaacagcggtatgaacaaatgaattaacaacaggagaaggacataccccgagaatggccctccgctgaattgtgaggcagaattgcctctgttggtgttgacgttcgcaacggctccggctcctggcgcgccatctccagaggcagcagcggcgccggcggcagctccggctccaggcgcagacatggtggatgaactgagcagtcgtgcgggaagcactccccaaaaacctgatcacccgcctacccggtgcatatctcaggcgaaggtgtggttctagaggcctgctccttccgatctctcgtgcgcgcaagtgatcagaagcgaggaagcgagacagcacaggcgcgcgcggaggaggaagaacaccagggagaaaagcaagcgaatcgttctgatcggactagcggcctccttagatagcaggagagattccgctagttgcaacacacgcgtcgtgggatcgtgggccgttacggaggcagtcgtgggaatgtggttgcaaaagaat

SEQ ID NO: 14707 - DNA, 1903 bp, Oryza sativa
cactcacccctatgaacacacgcacgcaaaccctacccctataaacatcttcgaagactgagccagcaaatcctggagagattgacgaagtcaccataggcgcctcgctgtcgacggatacgtcgcctaccactgaaagcacaacgccgaaaaatcctggaaaattcgctcccatggggagtcgaacctaggacctcaggtgctactgaggctcttgtatgactgatattttttttctcgtgatataaattgtttcaatttgcaaagtttggaggattataaaaaaatagtaataaactttaaatctactttaacaatatgatatatgcaaaactggttggaaggctaaaacaatctgttatgagtataaacatgatgggactactaacagacaatcttctcttgtttgtaacaatttctcaattgacaatgcctgtagctagctcaaggatcctgtcagggttatggataccacatacctaatagtagttgattaaatctcggcaggacccaccacataccatgtcctatacggaaacaacctacggatataggagaagttccgcataaggaaggataaccagagttctacatggaaacgacaaggactactcggattgtatccatattggtttccctagttctacttggacaaggggacacctatgggtataaatacaaggccccctaggaggagaggggatacggacaatcgacacccaccacaatcaacatagacgccacaaagccaatacaagccaacatacgccaagacaagacgccggatatcgacttcagggataagcacggctagtcccctacggtgtctccggatactgtcaggagagacgaaagcgttatctctgatctcgccgggcatggattcaaggaggaagactaccctgtcgtcgactacgagtcagaccttcagaccgccatgacgacaacagttagataggctaccccaagtattatactggtgtgattatggtgaataagagcaataccggcttcggccaataggatgtagggttattatctgacaattcaggggccctaacctgtataaaaaaccctgtctctgtctcttttaccgcagtctcgcgtataccctagtaccaacgatccccataccatgcaaataccggaatcgcgacatcaaacgtcgatagatccatttgataagctcttggcctgaaggaacataaaatttaatagctcgtcggacaacaaactaagattgaaacctacaaaaattaagaacacattggagcttctcatttcatatgttttttttctactgcacctccagtttactatattgacaacatactccttctgtctctcttgtgtagcaatgtgtctactgggctagactgtaccgagtcaaactggattgctcattccctgccaatggcaatataataaagtttcggttgtcaagaaaaagatgctaaactggaatatgaaaaaaataactactgtatatatatacaacgttacttctttgctggcattatggaacagacagatggattttggctgcagcaacggcattagttggtttgcagaaccaaatggaagttacccattagctaacctgccctaggtatgaacaataaacactacaaaaactctttaggattcttttaatttaacggcagagtgcaggaccccactcagaggccaaccacaaactcttacaaaagtccgaagtaaaggataattaagtctatgaatagtttccaattctctgttcactgtatgctcaatattgtttttattgcctgatcaattcttctgaagcggagttccacaaacattgatatttccgtcaaacatcgatgttttgtgtgcgtttcagttatgctagccttcaatcagtaaaccaaaaaaaaaaaag

SEQ ID NO: 14708 - DNA, 1091 bp, Oryza sativa
  unsure (1)..(1091): unsure at all n locations
accacttttaagaagaaaggcaagggaaaggcaaagggcgactgctttgtgtgtggcaagtctgggcattgggccaaggactgtcctgagcgcaaagacaggaagtgtgccaacatggtcattagcgagggcggaggaacatcggggtacggtaaaatattacctatagttctctttgtttttcactcacctgattggtgggtggatactggtgctaatattcatgtgtgtgctgacatttctctgttttcttcttatcaggtcaggagaggttcctccttgttgatgggaaacgggtcgcttacggctgtttatggtgttggtacggtcgatctgaagtttacttcgggaaagaccgtgcagctgaagaacgtgcaacatgtcccttcaataaagaagaatcttgttagcggctctctattgtgtagagaaggttttagacttgtgtttgaatccaataaatgtgtcgtatctaaatatggaacttttgttggaaaaggttatgacagcggatgcttgttccgcttttctttgaatgacatgtgtaataattataatgttgtgaaccatattagcgagaatgatgagtctaatgtatggcattcgcgattgtcatgtgaatttcggttgtatgacgcgcttagctaacatgagtttaattccaaaattcactttggtcaaaggttctaagtgccatacttgtgtttaatcgaaacaacctcgcaagcctcacaaggcatctgaggcgaggaatttggcacctctagaacttgttcattccgatttgtgcgaaataaacggcgtgttgactaaagggggaaagaaatatttcatgacactaatagatgattgcactatattttgttatgtgtatctattgaaaacaaaggacgaagcattgcatttctttaagacctataaagctgaggtagaaaaccaacttgaaaggaaaatcaaacggttgacgtctgatagaggtggggagtatttttctaatgagtttgcatccttttgcgaagagtttggaattggggatcttctagagtcgtcagacgggcacctcgggcagctgtacagatntacatnaacgc

SEQ ID NO: 14709 - DNA, 677 bp, Oryza sativa
tttcctttagaccaaaaatccaataatcttagaaattcaatatcttcccaaccgtaaatccgtttgactccgttcaacttccaaaattcctcaaatctcgagatctatctaatggcacgcttagaggtcattaatagggctttattttcgccgtttgttgagttgtcccgtttcacgtgtagtttcggagcccgaagacccgcagtgcgaggatttcgaggatcaagctccagatctcgagcaaggcaagccacctttgaacatcttgagcctatatttgaaatttaattatgttgcttgaaaaatattatgcattgataggatcgcacttaatctgttgtcccgtctgcaaggcagattggcggacttacctaatttgttgcatttgatccttcctttgttaattgttatatcatgtccccttgtaaccatctagttgcgtctcggtattcgtgcaccctgtgcgagtatcgacggacgccttcaaacttaaaatctgaataacaacttaggtaaaacttaggttttacaaaagacttggaaaacccgacacctgggtcggggcttgcgaactaaatgaatttccaaaaccgcggaccggggaacgtacccggtgtacggtttcccgctctcgcacttaaggaccgattccttggaattcatccaacataagtcaa

SEQ ID NO: 14710 - DNA, 789 bp, Oryza sativa
  unsure (1)..(789): unsure at all n locations
tcaaccctttccctatctttgaaaactttagcaagagctcgcaatcttgattgaacaaaatcttccttttcgtcggccatgagattataatattcatcggctgtcaattcattatgtaaatttgtcctcctggagccgattctaacttcccatggtaaaactacttcctgcccataaacaagcttataaggaggaacttgaatcgatccatgacaagccatccgataagaccacaatgcttcggctaacctagtatgccattgccgaggataatcagaaatctttctcttaaccaacttgatcaaattcttgttagatgcctcggcttatccgttggcttgtacatagtatggggaagaatttaataacttgatgcccatgctatcggcaaactgaacaaactcatcggacacaaagatcgagccttgatcggttgtaatggtctggagaataccaaagcggtagataatatgctcctgaacaaattgtatagcatctcctgaatcaaccttcttcaaaggaatagcttctacccacttggtgaaataatcagtcgcaaccaatatgaatttatgcctcttgctggaagatggattaatttggccgatcatatccatgccccatcctctaaatggccatggcttgataataggattcatagccgatgctggtgctctctgaattgctccgaacttctgacaatcttgacatcccttgtagtatctggggtaccgagctcgaattcgccctatagtaatcggaaacagcacntcaaannnngatccatca

SEQ ID NO: 14711 - DNA, 4617 bp, Oryza sativa
  unsure (1)..(4617): unsure at all n locations
gaatgattgatagttaatgatacatcgttcatcgttataggttgatagaggattggtgattgatcgtatatatagatactcattagattgagtatggttctcttcgtcatactctctctaacattatgaatcgatgttggtcaatgacgaatagtatgattgatatacgtcattatctaggcggtatttgtataatgacatgtgcgtcgatcgtcatcatcgtcgatgtgatgttgtaatagtagttatgatatcgagctcgtagtatgtattcgtgagcgtgttttatgataatgtattatttatatgtggtagtattatattattttgacacgtgttttctcgttttttattttcaagcattccaatacgacgtaagtgatgttgcccggttccaactgccaggtcagcgaaacccgctcgcaaanctgccatgggagtcgggttgcccaggatttcaaagtttaggggtcaagatatctggttttgcggtttagggtcatgaattagattccgatcacttttgagggtcatgaagtgaacttattcaaactggtcatcccccgcccaggcaggccgcgtccgtgacgtaccactcttggcgcctgcgctcacgcaggccgacgcggcagtcgttctccatgtatggagtacgggaccctcatcccgctaggccggcggatgcggccgcctcctcgtcacccgcgcggccgtgctcggcgcaacgtacgcgcacacgcagtggccactgctcggccaatgcccaggcccaagtgctcaactcctgccgcttcacacgccgacgatggcgacgagccgacgacgaggatgatcgaagagcaagggcgccaccgcgccagcgacagtggtagtatcaacatgtgctatgacggtgagtgaagccagatccattgccattccagatgacaaacaagttagaagtcggccctcgaaatcccgacgcgtactgtgcatatgatctagccgcgctggacggcaggggtggctccagcagaattttggcccaggagcgccccccccccccccgacggcccacacaaaaaaaagagcccaccaaatgtgttagggttagctcagctggcagaggagaggcgcacgtaggcggcagacgctcggctctccaatcctccccaaatcgtgccgcctctcggtctcccgtcgccgtctcccgctcctctcgctctcccgtcagtcggccagcgctgctgcgccggaggccatcgcctggccacctgctgcccctcccaccctcgcctgacgcctgcagccgccgcccgtcgaccgccacagcccgggcctggcgcagcactcggcagcactccggccggcggcggccagctgatgaccccgccacaccgcacggcggcggcgggtttgcggcgcgacggctgatccctcctgctggccgagactgacgagccggcgagccgccctgcccccggccggccggcccctgcctgccgactgcctactgcctgtctgcctagtgcattggcaatttggcatatgtgagtcactcatttagtcattcgtagtcttttgtatttcttttgaatagaccggtcattgtgatggtgaatgaaaaatatgaatgaaaaaatgtgaataaaaactgaactttagattttttttaagcaacaacttagttagtagtcaatacgacttagtttctcattaatttgtggtgtaaattgcagtggcacgtgaaaaggaatagagacattgtaagatatttgaattatttatgttgtaataacttccgtaacttcgaacttaaatgttggttttaattaatttgtaatgttctgagctatattgcaatatttgaattatattaccactgtatttgataattttgacttgattttataacattatgacaatttggcacgccaagtaggaccacccaacgaattgatcctggagccgccgctgctgacgcggtaccgtacgccgccggccgcgtacgttgcacccgtaacacgtcaagacaagcagacagcggcggcgtccgaccgacggcatattaccgggccccccttgcagacgacggatggagagatcgttcacgtggcgcacgcgagcagtgcctcctcccacgggcggctgtgctgtcgatcgagcgggctgggcaggggcaaccctgtggtgtccgactgtccgagccacgtgcaacggcgccctccgcccccgtcgtccccgtgaccctccggccgggcacccagcgcgccacgcatggacatgccgatgcgtccatggccgcctcctctcctcgccacgcgtggccagagcggcacggcggcgggtgggcgggcgggggaagttcgctgtctcaggtgccgaggagacaacgaggcgacaacgtgcatgacgtacgcgttcctctctctgcacagaaggcactactgttccaccctacggccggaggacaataatgttgagagtggattttaaactataggtcattccttcgttatttgtatatttgagttatgagaaaatttaaaatatgtattaatatatgatatatcactccacaaatatgaaagttaaaattcaatttccacaattcacaacgaaaaaaacaaattagactacaactatttaatgtgtattcaaaaataaatttcttttttcgttgcaatacttaaaagttaagtttaattttgcatgcttgcggagtgatttattacatgttaatatattttttagaattttttacataacaatttaagtaacacgtaaacaacgagtgacacgttcactcgagagttaatagtttcccaataatgtccttccgcgctagcatcatatggaaacaagcgcagagctgtttgtccgtctacgctgctgatctactccaaagatcatcttttctaccggtgttcttgcacctattgaatgcagtttcagacgctgggaagaaatgatatgtttcaccagcaattctgcagaattcctgtagcttccatgttctcaacagagcctagctaagcacctaatcattttttttaagatcaacggatctgaaagacttattataacacgtggaggattcactctgacaactcgacagaaaaagacgctgcatttgcgagttgcgacacgagcagttaggctgagcgcatctaccccgtgtaccaaaacaacgagaattcatcgttacatcgtcgtgttgtcgtgacaagacgtatagccaccaaagcaatacgttcccaacacatacacaccatgacactactgtaaatttgactgctaagatgttaatcaagagtacattaaaggatgttgataatgaaaatacgactggaagggcggccaggacaaggttcacatgcctgctacaacaaatttcgcttcggtgaagcagcatcgtcgtttttcttttctttgagaggccagcatcatcgttgagcctgcacgtatccactttatcttttgaacctaataatgcacagataaacaggttacgacctgcccagaaaagtatatacgtacaaacgaaggcgatgcgactaatattaggagtgcgacatttcagtaatcaacctaaacaaggttgttgcgttagaaaccaggtgtctgacatttctagtatatatcacacatattaggcatgtaccaacctttaaagacatcatcatgtaaagacttatataaaacaaaatcattgaaatttatactgtcgtaaaaggataagctaatgtgatggtgatatgcccccactccttcactaaaggtagataagcttgtgttgtgttctttgtaatgtgcatatgtagatggctaattgaccgcatgtgatcaagtatacaatttttagatatgggaataacttttcttttgcattttcatttggatcttatagcatgtttatttgtcatccatcgtgcgtcttcacacaggaaaaacaaaactgtactagctaattcaggctatgggaacctgctcctgcctttaccttcaacacagttgcagtcatgtgaactacggtttcctatatttttacctaggaaactggtaggcatcaaaaaaatcatattatctttcttattctttcacgaggtagtacactgttgaagatactatgggtctgggcaaatctcaaaatttcaataacataccaagctaaacaagccaatccaaaaggaaggagaggtctacaaaaattatccacacaagcagcaacctagtcctgaactccatactgtttccttctatttgccttctcccaccttctttctccttctctactcccatgcatctactattgttcttttagtcctctttccatcaggcatcagcattgaagatggacattgaatcagtgaggtgtgcgtgctgtggcctggaagaggattgcacccaggaatacatagagaatgtcaaggcaaacttcggagggaaatggctttgtggcttatgctcagaggcggtaggggatgagctcagtaaagacagaagagaacaggatggcatcgaagatgctatcaaagctcatatggcattctgcaggatggcactatcaagccctgcagtcaaggtggcggatggcatgaaggagatgctcagaaagaggtcaaaggataaggtaaa

SEQ ID NO: 14712 - DNA, 1865 bp, Oryza sativa
  unsure (1)..(1865): unsure at all n locations
ttttttagtctctttccatcaggcatcagcattgaaaatggacattgaatcagttaggtgtgcgtgctgtggcntgnaagaggattgcaccaaggaatacatagagaatgtcaaggcaaacttcgaagggaaatggctttgtggcttatgctcagaggcggtaggggatgagctcagtaaagacagaagagaacaggatggcatcgaagatgctatcaaagctcatatggcattctgcaggatggcactatcaagccctgcagtcaaggtggcggatggcatgaaggagatgctcagaaagaggtcaaaggataaggtaaagcctgaaataccatcaaaagcacacccattcttacttggtgacaattgacaaggttccaaagcgaagaacatcagaattatgcttttagataagggtgtgactgatgtaagatttctctcaacctactcaacagttaatttactagtattaccttttatattccctggcaacatgtcaagtgtaaatacaatttggtcatatgaataagtttcaagatcacaacatttcagcatgaagatctacaaacttcgttgacaagagatactatgcttttgtgtgaacatgcaggttatcctgtgttcttcttcgccactcgagaatatttactcagaggtttgtttctcacctaattgattttgatgatctatgatgaaaattaataatgacaagtgatcacttttattccaccaactagagactagttatggttcagtgtcttacattcttaaaatcattgaacaaattggcctaagattgtcactgtgcaactattcatgtacaaataccccagggagaatctatcagcaacatgtacaaatagagtgaagaaatataaatagaattaggtactctaccattccaggtttgtaatatttgattcgcaagatccgtgaatctatgacatttcttataatttgtaatcacccttatgtaacaagctgaagttgtaacaacatatttcattaagatgaagacgcgatacaagtaaaataccacgctatgagaaacttatgaagaaatgagcctggtaaaggcatcaaaatatcactttctactgaaagatagcacgaggcaccaatcaatgacagataagtattggcagggaaatgcttgattgaaagctgaaggtgttctacagataattcacaatatgcacatttcaagttcaaattaataaaaaacacatgacccacagctaacagggtgcatggacacttcttagaagtcaaaatcctaatactgttaaaacaatcaacaaaagagttgaaacatgcctgtactcctggcctgcttgtgctgagatctttcaaactagaacaatccttctcctgcatacaaaggttgtcatgattaaatggtaaatactaaaatctaaaacactggacatctgcatgcagataattgtggagaccaatcatagttgcataatcacaacaaatacaagtaatgcaagattctcataaatcagaatattaaggttttcagtgaacttacttagctcatctaatgaaatgctagcagcactctcgccagatttaatcagccgaatcttacctgtacatataaatatttttccaaggataagcttttacaacaacaaagacaatcaaaataaataagtacaaaagaatagctatcaacattactcaaatgcagtataattaaacaaagcagcaggcttctgtgtccagtttggtaacagagttatggagttaccccgagaaaattgntcacacttcacacgttatttattcttgctataaaatattactaccacacagtttctagtggaatggcagatcaacataccattngcgtcgaa

SEQ ID NO: 14713 - DNA, 981 bp, Oryza sativa
  unsure (1)..(981): unsure at all n locations
ccatcagggacacacttttgtagcctctatgaccaanccatcatctgtatgacggcaatgatggtctttgtgggccacctctccaaaaaagttgttataagtatatgcctcaaagcaaggttccagatcagaagcaaacaaggttttcacatagggtcattttccattggagttacagtgggatttatggcaggcctatgggtggttttctatattcttttgttcaagaaatcctggaggattgcttacttttgcttcttggacaatatgtatgatgaggtttatgtgaaggtgattgttgtctgggcaaagttgacaggaagaacagatgaaagattgcgaatgtcgcaggtcgcatggtcatccatcgactctgacgaatactatgaatagacgaagacaaagaagctggagcaggtctacaacactcttagttgggttgtatattttgtcatagatggaacttattagaacaagtatcctaaatgcatatgatgcattgatccacattgatgtatatattattgtatctgtttgtactagaagagttgtgtagtgtctcagaaatgacccttcatactgaactcagtttagctctgttctgaattttgtcaaacagctacagtaacctgacgagggatgaaaacaaaataggtatattcatcagcttttctgcgctaaagctacaggttttgcggtgcaaacttcatcagcttttttgggcttatattctcccttaattaatgtgcaaaataagcaaactaagtacatgcaagaagtaactagtatgttggtttatcgcaacttcgtcaggcctatgagttttagcaactaagtacatgcgaacatgctactaaatcggagcgaaataaatttagtacatacaagatcaccaccccagttgtcatagtgcagccgttcactttccccagtagtactgacaaactttgacctcaataagaacaatagaatacctacatt

SEQ ID NO: 14714 - DNA, 818 bp, Oryza sativa
atcggctgcttctcgttttagggattctgccagtatcggctaaatcgcgttgctagattagatttgcttagacatctaccaccctaaaaactcagtcaacggcttgattgtctagatattatatttcttttcatacttagtgctgcatccattgagtttgatctactaagtcgtgcttagaaccataatctctagcctgcttcttgattgccaataagggtttcatcggggtttcaaccggtgagttatctggacgttgcatcggctcataaggattgcatatacatataagttggatttagccgatggcaacaaaggtttcactatttaatttaatcttgtggatttcatgatatcggacctccagccaatgtgtgctttaaccttcggattaatgcttgtttatcatatcattatttgctgattggtttatactggattatattgttatgtcgttacatcatcttcagccgattgcctttatatcattatttacattggacatatagccgatagctctaaaccctatcgctatcggctggcatcggctattggctggtatcagcatcggctggaatctctacattggattatgagccgatcggctattttatctcctatttacataacttgtcagttgcaggatcaaacttactggcacgcctgcatctcatcaagatttggacctgcacaggagctaagcagatctcccacgccggtgtgttcgattttttcgtcaacacaaattggcacgcccggtgggaccatgaattttatatccacatgtctgaagaagaagccaatgccaagatcatggt

SEQ ID NO: 14715 - DNA, 674 bp, Oryza sativa
  unsure (1)..(674): unsure at all n locations
aacgaagcacaaacaatcacaaagcaaccattgagagtaatgaataaaatatttgttgttcataggaacaccacaaataaagtatcttaaccaatgtttttttcacttaaaaatagagacgccaaataaatcaagaatatacctctggctggtcagtttcttgcaccagcgcctttagtgcccaattgggctgtctttcaaaaagcttgaatataatattttccagttccctgcgatccctacgtattctttttgcatcagatggtttggttggtgtttgcttcttcttctcctgaagagcacaaaattaaatgtgttatgagaaactttaactgatgatgagtagttcaagatgaagaggccgaccacatgattggcatttggcaacatggtaaagataaaaaaaaaagtagaggaaatcaagtactgaactcattttataagccataatcagagagaaatcagaaaacatgtatgcagatccttactacctagatagcactctattaacttgaaataacatcctccacagaaattaaacacctagagttattaagaatgtgtgatctatatcattaatgataccagaagaccaaaagggaatctcaatcttcatttccggaaatgaaagcaccttagacccaaaaggtatgagnaccaccatgccaagcaac

SEQ ID NO: 14716 - DNA, 1308 bp, Oryza sativa
  unsure (1)..(1308): unsure at all n locations
aaaaaggttttcgctagatcatccgggattagggcttgaatctctgccaatcntgtccggaatgaaccgcagtcaacccaccnagttgtctaatgatgtctctagccgatgaaaaatgtctccaagagttcttttcacatcatcggtcagaggggctaaagcttatggggtgtttcttcctctgcttcttcgtcaaagtatcccttatatcgaaagagacaagatcggctaagacttgcaagagagaaaattgaagacagttaaatatcgaaccaaattatatagccaatctaagatttatgccaatgaaatgcttactggaatgacaggagctgctggttgttcttcttcttcgatgttatggctgcctgcggccgatggagtacaatcacttggtgttggttgcacaggaggtgaaagatgaggaggaggctaaaaaagataagtgttaattaacaccggttacgatcagatttaaaggattttgcagagggaactttaccggtggagctggcttagatggtgtcggtgccgatttcttcttcacgatagttttctttttctgcaaatacaaggctaataagtaatcggctatgcaagttgtttcgagaaatgatcaagatgagttgtttacccttgaaaaatgagctggggcagcaggagttggaggagtctgtttgggcgaagccgatggtgttttttctcctaagtcactaagttcggctgccgcttggtcgtcatcttcctcaatttcctcttcatcgaaggcttgttcgatggatggatctaaggcaggcaagtcgtcggttggcttggatttcttcttttcggccttcttcttcagagccagaaccgatggatcaacagccgatgccttagtcttcctcttcctgccagcatcggctagttctcctatttgcccttggagcagacttgaggtcctgggggcatgatagccgatgactgggggagctagaccacctccgtttggtaaaaggcctggagcatattttatgtctttgcgaggaggagaggattctgttgtctgcaaaatagaagaagagattagtcaagatacaagtcagctaacagttgttttagcagaattgacaaagtaaaatttacctgagggatgacatccaggaatagatctgtcatatacatggaagccgatcgatggaacaagtgtagcttccattcaccccaccacctatcaaaggccctgctcctgaaccttgccagctctatgttctcaatactgcccaagggaggtcttgggatgttgagcagccgatccatcatcaaggt

SEQ ID NO: 14717 - DNA, 1786 bp, Oryza sativa
  unsure (1)..(1786): unsure at all n locations
atcgaaccttgggtctatatgattaagtgttttactttatgtcgtccttctaacatttcctgngggtcttaattgtgnnctaannnnnnnncnnnnggcgganatgattgtgatcgactcgtaccccctctttttcctctctctcactcttcctctctctttctcgccagacgacggcaggcggtggacgcgaagctgcggtggggttgggggacgaggaggcagcggcagccgggggcactatgagcagccaccccttggcgcatggatggatggaggtgggtgcgggcggcggcgcggcatgcggagacggagaagcgcaccggcggcgtgctccgcctccccgtcattgacggggttctagcgcctgcgccagcccttctacgccggcgaccttctttccgtgccgccgccgatcagaccattttctgcaacaccgttgccgccctgctcaccatgcaagaggtccgcagcggcagctccacttttccctcccgccgatgaccccgctgccggacttcgactagctcattccagtccgtccagccgcggccaccggcgtcgacgttaatccccacgtagtcatcttactgtgtcacggcaaatgccaatattgcgacgagctgcaaccgttgtcaaaaaatttattggcaaacgcaaggtggagctatgcctctgctcgccattgatgctgtcgacgcggtcgtgcgcaaccgatggcgccgacaggcagcaaagtgcgcccaagatgctgtgcggtccacctgcagcaaaatcaattcattcactagtggcaagaaaactttctgttctgcaactcatgctctctgtgaatgtgcgaattaagtagtagagttgctagtgtcttacgcttgaacccgtcgttgctggcctcgaggtggttcgacacagcgtcgccggtgacgctggccttgaggaagtactcctccaaccaagccgtgacctccgcaaggctacggcgcctcaccaccatcctcagctcctcaccaccgctgccgccgccttcttctcacgtgactgacggcacctagggatgcaagcggggtaggctagcgggctttttttttcccgcttatcccacttctacttcattttttcttctaaattttatactatcatacgagaaataaactagcaagcaggtttttatacgggtagcgggacaacccacttgcatccctaacgacacccccgccccgccaccaacaagatgatgatcatcaacagtagcgccatcctcctcctcctgcgtgcgccgacgccgctgatgctcgatggagagcaggtcggtggcgtagaagggctggcgcaggacaccggcgatgatggggaggcggagcatgccgccggtgtgcttgtccgtcttcgcgttccgcaccaccggccgcacccggcttcatccatccccgcgccgagggacggctacttgtcgtggtcgcggccgccagcgccttctcgtcccccgccgacgcagctccgtgtcccccgcctgccgctgaccggcaagaaagagagaggaagagtgagagagagataggagagaggaaaagagagagagaaagagtgagagaggagtatgacaggtgggtcccacatttctttataaataaaatgcttactgaaccgctgcccatacgccatgtangacaaaaccgctctggattgggtcgatggggataattcgtccggtattgatgtaaacgatgtctgggtttcgaagttaagggggtaattcggccgacacaatagttcggggcggtattcg

SEQ ID NO: 14718 - DNA, 735 bp, Oryza sativa
cgggccgttattgattgcgatcggctcgtacccgttatgaattatttccatggaaccctgtatcaccatcttcatggtgagggtccaaggtcgctatcatggagcaataggttgaggatcgcagccgaaattgcaaaggctctttcctatcttcactcatcagttacaatcccaataatccatagagatataaagtccagtaacatacttcttgatgataatctgacatcaaaggtatcggactttggagcttcaaggtatatcccaatcgagaaaacagcactaacaacagcagttcaaggtactgtaggatatttggatcctatgtacttttacacgggtcgtctcaatgataaaagtgatgtctatagctttggtgttatgctagtggaattgctcacctagagaaaactatttccatatttgtcctctgaaggtgatggccttgttgcagattttgtcaacttacacagtgtaggtaatttggtccaaatgctagattctcaagttatagaagaagggggcactgaaatccaagaggtttcccaactagccatatcatgtatagaattaagaggtgaggatcgacctaccatgagacaagtgaactgttcactcgaaggcatcctctcacaaatcaaccaaaaatgaattatgtcatctgagaaggatgcggaggatagttcactggttggtggagaaatttgatcttcgagaaataaggttgatggttat

SEQ ID NO: 14719 - DNA, 818 bp, Oryza sativa
ccttgcccaccccaagagccaacggccaaggggagcgcgccaatgcggaaatcctcagaggccttaaaaccaagacctccaacatcctcaagaagcacgccgatttgtggatcgagaagttgccagcggtgctctgggcgaaccgaaccacgccaagccgagcaaccggggaaacgcctttcttcctcgtctacggcgcggaagcggttctcccatccgagctcaccctgaggtcccctcgggccaccatgtactgcgaggctgatcaagatcagcttcgcagagatgacctcgactacttggaagagcgaaggcggcgcgtggccctccgagccgcgcgctaccagcagagcctgcggcgctaccatcagcgccacgtccgggcccgatcactctgcgtcgacgacctcgtcctacgccgcgtccaaacgcgtgctggattgagcaagctctcaccaatgtgggagggtccatatcgagtgatcggcgtcccccggccgggctccgttcggctggccacgggcgacggcacagagctgcttaacccgtggaacatcgaacaccttcgtcgcttctacccctaagggggatcgggtgtcaggtttcgggctcgggccaaccccgcacccccttcaggcgtgcagggttggccgggggctaccacatttgcatatcttttcttctatctgtatttcaataaaagcattttcgatttcctaaaggctgtatctgtactgttgtttccttttgaagaatcttaacttgaaataggtcactcgtgctcaatcctgccctcgggggctcgggtcggctaaaat

SEQ ID NO: 14720 - DNA, 1675 bp, Oryza sativa
  unsure (1)..(1675): unsure at all n locations
ccgttnccaggngtgcangnacnaggcnngngangnnntggannnggattgatgcttgaatgatgtttatatccagtttcaatagttgctaggcccctaacgagctttaatcccggttgatgataccaaccggggaataaatatctctattcccgtgtcatctccatctctcgcgcgctctctctttccttatctcctcgtatcgcgcgcgctcagcctcctctcttatcttctttctattccacccctcccctccacactctccttcgtcgatccctatatcatttggaattccacctgttaactggttgagtgacaaggcaacgataaccatataagaaatttcagctgcaccatactttagttcttgatgcttcattacttgagaaaaaatttccatgggtacatattttcctatgacatcttggtaccaactaacctccgttaatatcatgtgacgttttggtgtcattgatgttaattttatcaaatgttgaggatgaccctgatatgttgttgcctgctaaattcaagaatcgaatgctgtcaagatttgtaatactgtttggaatatccccatagaacatgttataacttaactgcagatattgcaagttcaccaagtctccaatccatactggtaatgctccatagaacttgttccttgaaagatctaggaaagttagtaatgatatactttggaggcataacgggaattctcctgaaattctgttgttacttaagagtaggagaaataagtttggcattctaaaacagagggggaagttctccgtcaattaaattatttgactagtccaatatatacaagttttacaacttgcaaacagtaatatgattgcaggacagtattagatctttaatacatggagaaccaaatttttatggcaaattccctgacaagaagttcatggagacatccaatttccggagtcttctcggcagctctggtatctgcccagttagtttgtttgaattgagaaataatgaatccaaccaagtcagattctgtatacctactgctataggtccactaatgctgttgtttttaagattgagaaagcttatgctctttaagtgagatatctcatttggcaacattccagtcatgttgttgccttgcaaactcaagtatttcaatgggcttaaataacatcgtggcaacttctcaacaagctccgttatgttcccagatgatagccccccatcaagtaacagtgttgtcaattcacaaagattttgcaagtctactgtcattgtggctctgttaccgttatcgaaaaaatatagctcttggagggacctcattcctcctagtgcctcaggaaagggaccatcaagataggtttgagagaggtcaaggatcttaaggcttgttactttctgttggcggatggcatgaggcccttcgactaaatctgccgaaacccgtggcgaaggctatggagcaagaacggcgtgaggcgaagagtcgtacgagtgccttgccaggccagaggcgtctcaagcgaagggtgcaaggcgaagactatctgccgaaggaagacgacttcgccatagcaagttcgcccccacgagggccgaggaagcctttccggcccatcaagcctaaggcctacagggccggcgatcaccagatggcccatcaggggcccat

SEQ ID NO: 14721 - DNA, 737 bp, Oryza sativa
  unsure (1)..(737): unsure at all n locations
gctgtgcattganagtcgagctcggcacccatataagattactttatttgtaattagacttagtatgtaattattgactacggaattggtgcgacaagtagcaattgactattgtagtcttaattagacttagcatatacgcacgaaacacttagcatatacatgactattttagtcttagcatgcatgtaatattatttgagttttaatataagattattttatttgtaattagacttagtatataattatttactagctagggttgtataatatacgtcacctagacttagcttatatcatgatttgtaattagacttagcacgtaaggttgtgtagggttctaatgtacgacatttacacttagcatacatgacttagattgttaaaacataaatgtctcgtaacttagcagatgtttcttgtatcaacagatggctgaccgcgatgaggaacagatattgtacgatacaatcgcggagggaagcagccagtactggaatgaagaagaggggaacgaggatccaaaccagtacttgaacgaggaagggaacgtggagagggatgcggaggggaaccagcaggggcacgtggaaagggatgtggaggggaaccaggaggaggaggctagtggtagtcaaccctccgttggacagaacagggcacgcgggcaacgaggtgcagcgaagaagcttgagggtcagcacatcataacggaagtggaagaagatggacct

SEQ ID NO: 14722 - DNA, 1376 bp, Oryza sativa
  unsure (1)..(1376): unsure at all n locations
ctgaataagctccctttagtagatcaatttccttacccaaatatagcaagaatccgaacactgatgacttgacaactctcatcgactaatctcaagacttcgaagttgatactgactctaagccgatgactactctgtgcttaacaaatttcactattaacacatgccccccagatttggagtattaaaattcatgcttcaaaatttcttgtccagataactacaaaaccgatctttctttgcttactgcagtcggctttcatgatccatgacagagcgtggggctcctcaccgggagaccgcgcacacccccctttgccggttccgccggggacgctaagtgaagttataagctctcaatctgtgaaatgttcgcgaaagtggaaacgcgcaagacacgggcgatgtatacaggttcgggccgcttagaagcataataccctactcctgtgttctgatggatctgtgtatgaaggagctacaaagagctggagagcaagagagttcaaactctagagaccctcttcctccttctctcctctaccagctccggttatccccccccacccttaagtgggcaaggtcctccttttatatctcaaggggatcccacatgcaccacttctaccttcttttctatagggtggggacccatcctatctttactaaaacttggctcgccttctcttggaagctaaaacactgcttgtttttgagtgcggccacgcgtcctcattcgtctgacctcggggatcaccctgtcatctctttttaattgggcggagacttgcaatggctgctgtccgagtgatccttctgatgggacggcccatacctacctccactccgccggaagcaggtgcaacgtggggacacggtcgtctgccgacgacataaccagtgtcagaccggtcgcaaaccagtcattcttgtccaccacgcgtcagattagcaatctgcatgttcgcccttcttcatacaatgtcttgcttgtaatggttgcgatgaagcctggcatgtatctagccgggactgacgtgccaacttcgggagttagcacgccggctccggctagtgacgagcgcctggaggctctcatcattccgacgggacggggcaaggcgtgtgacaggccgcctgttaccacctaaccagcaatctgaccgatcggtgaccggtcacacactgctaccggttacggaccggataagcgagcgtgctgcgctgcattaaatgcggcgtggcgcgctcgtccacccggcataaatgcggttaggtgagcgccgctgtgcttaccntacccatatactgggggccaaaaaaccaaggggtgtcgggcccccanccttngnaccaaaaaaggggcgtgccttcct

SEQ ID NO: 14723 - DNA, 732 bp, Oryza sativa
aaatgtggcctggaattcttccattaagctgattccatgataaattcaaatttttaatgccatcgagaagagttagctcctccggaatttcaccagttaagtagttcaaagacaaatcaatggtcacgatatctaatactatgggtagtttgtagtaaagtttttggcccttggtgtccacagacatatttgcaatgccaacattgcgaccataacgaccagaaattgagtaacgatcgaagaccattacgatatcacaatgaccacttttcttcatacatattaaattggacaaatgcaaaggtaaaacacccgaaatagaattatttgatagatctagttgaacaagccttgtaaggttggtaatgcttgttggaatatttccagagaaattgttattgcttagtcgtactattgctagattcgacagctctccaatccagatgggcaatcctccatagaagtcatttgatgccaaatccagcatctctagattatgtctactacgcaaaaatggcgggaactttccggacaaaatattgttgctgacaaatagcttactcaaaaacactggctggaaacatcgaggaaattccccctccaaaagattgtccgctaaatctaagtaaacaaggtgatgcaaatcacacatagagtttggaatatggccagtgatacgattggagaagagatgcagataagataagacaaggtcatttccaaagttcgatg

SEQ ID NO: 14724 - DNA, 2275 bp, Oryza sativa
  unsure (1)..(2275): unsure at all n locations
aggcttttcaaggtttatnagctnccatcaagaagaaattttcatctcaggagtttgagagcttatcacatcttgcacagaaggtgactttacatgagcaaagatttgccgaagccaagaagaatttcaagaaaatcaatcatgtctatcctcacatgtatgattttgatgaagaaaatgattccgaagtagcagcagccgagtgggttagaagcaagaaggttgtgccatgccaatgggtgaggagttctggaaaagaagaaagaattgactttgatatcaccaaggctgacaagattttcgatctgttgcttcgggagaaacagattcaacttcctgatggtcatataatcccatcaaccgaagagctaggcgaaaggaggtattgcaaatggcataactctggttctcattctacaaatgactgcaaagttttcagacagcaaatccaggtagctattgaagggggaaagatcaaatttgatgactcaaagaagccgatgaaggttgatggtaatcctttctctgttaacatggtacatacatctggaaggacagccgatggggggaagaattgaaactttcagataaattcggctagaattatcaccaagtaccaaagaaagtatatcaagtagcaggaaaggtattatgaagaagatgatggtggttttgatcctcattgggactgtgagtttttcagattctgctggaatgaaggtatgaggctgccatcgatcgagaattgtcctggatgcagtgacactgcagggagttcaagccgatcctgtaatagaggtaatcggctgattcaaaagaggatacctgttcatcagagattgggacatgtaaatcaagattatcaccatgatgaagatgaagataggaaaacccaatggtgtctacaggcattttcaccaagaatcaaaaaagaatggttcaaagaataaggaacatggagcgctttcaagaagtagaacaagaaatcaatcatcggctgaggaaaacaaagaccaagcaggtgtggcgtgttaagagctcggtcacaacagccgatgaagttgaagctgataaagccaaaagggttgctcaagggcaaggctactgcgtctgcatcggtgaatatggtttttatgctagcagcagagtttaaagctaggctagccgatgttgatgatgttgatgaagcctctgcttgattggttttgtcaccggagcaggcgatttttgagaagccagaggggacaaaaaatcggcatctcaagccgttgtatatcaatagatttgttaatgggaagccgatgtcaaagatgatgtttgatggaggagctgctgtgaatttgatgccatatgctacattcagaaagctgggcagaagcgcagatgatctcatcaagatgaacatggttctcaagaattttggtggcaatccatcggagactaagggagttttgaacgtggaactgacagtcggcaacaaaattgtgcccacaacattttttgtcatcgatgggaagggttcctatagcctgttgctcggaagagattggattcatgccaattgttgtattccttcaaccatgcatcaatgcttgattaaatggcaaggtgacaagattgagattgtgctagccgataggtcagttaatgttgctagtgccgatttagctctttggaagatggatggtattgattgcctatttggaaaagtttgggatgaagattttctaaaagtgtccaattgtgatatacagccaattgaagatggagagtccagattattattttgagggcgtcgtggagggttcaaacgtctacaccaaggatacagtagatgatctcgatgacaagcaaggaaagggtttcatgtcggctgatgatttggaggaaattgacataggtttaggagatagaccaaggccaacattcatcagtaagaacttatccccagaattcagaaccaagttgatagagcttctaaaagaatacagagattgctttgcttaggagtattatgagatgctaggactcagccgatcgattgttgaacatcggcttcctattaaactaggggttaggccatactagcagccaccaaggagatgtaaagccgatatgcttaatgttgtcaaggctgaggttgcatgtttatatggggatcctctagagtcgncgtgcnggctgacanggagagtgattctacccttnnnnnnnnnnggggggggtgggaggaggggcagaagggaaagcnaagaagtgttaccaacgcgatcat

SEQ ID NO: 14725 - DNA, 739 bp, Oryza sativa
cgggttggaattcattgcaattccagctcgtacccacaaatattccgtatggtgacacttttgtttggttgtactcttgtttaatatgtgttaataattcgcttatgaacatttattacttatgttgaactaattatttatatgttggggatcaatctatttgatgcaggtgtggcgtacgacacaccggcgctgttcaaccgtgggattgacaggaaccaccgctcgttcctgtcaacagtcgagggtgcacagctcggcaccttccgtccacgcacgtcgcgcgagtggttgcgtgtcgacccccgtcacgttccttggtacgcgtatgttcacatttcaactcaactttgctttgtgttgtacttatgtttgaagtttgctctatacaggttacgtgcggcaggccttctaccactttgtaggcttgttgaggcggcggcggacgaccgtgacccagcgaagtggtggaatgcagaccggtcactccttgccgctctggtagaccgctggagacctgagacgcacacgttccaccttccctgtggggagatggctccgacactacaggacgtgtcgtacctgctcgggctaccgctggcgggagcaccagttggtcccgtggacggtgtttttgggtggaaggtggatatcactgcgcgcttcgagcaggtgatgcgcccttccacacctaggaccggccaacaccctttcttcgtactttacagtcgggcctaga

SEQ ID NO: 14726 - DNA, 3672 bp, Oryza sativa
ccgatgattgtacattgcagattcgagctcggtacctacttcatgagtcgaggagacccattatatcttcggtgatgcctgccttgaacgtcagcagcgcgtcccgctcccgcggtgagcagccggccgccgtcgccacgttgccgtgggcgggcgccggacggcgtgtggcgccgcgtggcagcgcggccaccgccgcctccacttcatggttggtcgtggccaaggcggcgacggcgaggacgctgaggatcaagagagcggcggtggtagtgggacgcatggtggattggtggactagtaagaaccgggggggtctgtatctgagtgtgcgagtgtatcgtatacgtatcgttgttgtttttactgtagtcgacgggtgcgtgtgtgccgtgccgtgccgtggccgccgggacgcgcgtgggcgtggccatgtatacgctgcaaacaacagtagcgacgggccgtacagggacagctttcgttggcccattgtagtgagggcagaacgttactgcctggatcgtgcggcccattagtatggcctaccagaatctggatctccaccaattaaaaccagccacggaagtcgcgcattcgcggaaatttttttatttttaaattttttttattaaaagttttacaaaaataatttttcatttttgaaaattgacagaagtggtcgcctaccgccctctgggagggtgatttttaaaaatcgccatcccaaagggcggcgaaagtgacgtggcagatggccgttcgctctcaggcgacgcccgtcaacgaaatttgcaggcgacccccttgccgccctccgctagggcgattttgtactgtgcggggggccgcctgcaaatgggcggcggggggcctggaattttgcaggcggcccccttgccgccctgggggagggcgattttatactgtgctttatatttttttataaatatcaatagttatcaaatctttttatattgaaaactatacaagattaaaatctccaagactggtaaaatataattttattattttttagggcctatttggaatgttaccgtacaaatttttgttagtgccaaaatataagcaagttttggcactaccaaatatttggtaaggtaaaattgcatttgatcatatttggtttgctgccaaaatgtaaaattgtagtgaagaatgttctacataatctcaaatctagattacgtattaccaatgaataggcttcaatcgaaatcaaacacaagtactattcaaattaccaaaatattggtagggcatgtttttggtagcaatccaaataggcccttagtcttacgcatacaaaaaatcaccaccataattaaacattgtaatgataagatagataagaagtgccatcgatacacggtacaaatttgtcgatcccgacgaatcaagcatgcggtaacctatcggccccttctaggtcggtcagaatgcattgcattctcgtggtccttcaatcgttgatactctacttgtgtttctgactctgttatcttctgtccatgatatgatggagtgacattgtcgatccatcgagtaaatccacacatccttggattgccctgtaaaaatagtaatgttattaagtttgggtagtaattttgtgcaaatcatagcggattttgtaaatggttagacatacaacgaaatcgttgtctacattggggcagacaaaatatctccttccaaatgtttgttcagcaaaggatgtagccacctgccagcgatctctgcacccacactttggacgctcggaccatttaggtaaccctaatggattgttcctccagtctaagcttgcaatttccacccgacgttcgtactccatccaagcatgaatgaactgtatggtcggttcaggttgcgttatcggcccgccacttgaagtaactctgactgtgtcaatccattgtacgaattgacatttccttacatcctcctatgtacatccattttgggatagttaagttaatgatagtactaaggagtgatgaaaagaatagttggtattaccacgaaatcatcgtcgacaatgtttggacacacgaaacacctttgtcctcgaggtcggtgccttacggaccttatgaactgacaccggcaacacaacgacccttccgacgctcacgccacgtggggagtcctaggggatttacgtgccattctaaagcctcagcagcaattcgacgttcatgctcatccttccgccttaggtagtccgatcttgtttcactacgtgggtaagcacgtgttccgtcgttttgtgggttctccatgtctacccactcgatgaagttgcacattggacgatatgtctgcgtaagatgttacaattgtgtacgaagaagttagtttttttatccatttgaacttcgaatagatgaagcatacctgatcaaagttcgcgcattggaagaatccccttccccgagtttgtatcatgagggaagacttgagtatgcatccatccccacaatcgcacaaaggacggtcacaccatggtggaaaccaaccagcaaaaggatcgcttcgccagttgagacgctcaaggaatggcgcttccattttcgtgtgttgtgtgctagtgggaaagaagatatgaagaggttgccttcagattgtcaattatatagcgtcgttttcactgcaatatatgtgaactcaatgagatacattattcattagatgtgacaagacgatcacgcgtgggcgtgattcactttatgtcaacaggcagcgccgaaagttgatagtgacaactcgagctgccgcttttcatgtgtgctgttgtggactgtgcgcgctactggatctgacactaccgtgaagcgccgaaagtgtgttgtcgtgagcataagttgttctagcaccatatgaatgaaaagaactatgtagacgagacaaacacaagtagtactgcagtagtaatagcaaaagtagtactgctttacaagtttgtaagccaaaagaaacggtcacataaggactgaagaggtagaacactactgacgaggcctcttacccctgtccctcctaccctgcgccttaatgtgcccctgggagtacgtgagtcggtccgggggtacggcacggccaacccgtcctgcctgtacaggtgtgacctctggctgctcctgagtgtgcgcctctggagctcctccaagctgagaggagcctagtacgtcgtggtggtgtgcaccgtgcaagtcgtcgtcgtagaactggctagtaggaccagtcctaccggcgtgagacgaagaggccccagtaccgaagatcccggctgcaaatcctgctggacaaggaccatcagtttcatacaggtatttaatagtattaataaaaagtaaagtaccgtgtgggcgagggatcgacgctccgtgagaggaagagctggcgaacgcgcccgaagaggtggcgaacgccactgcggagctcgcggaagcgccggtcgtgcctgcgaacgcgctcgaaggcagacgaggtcctgcgatgaggaaacgtgcagttaaaacatggtgacatattcgtgcaaaagctgaaacaaaaatgaactaatctctgggctgaactgtaccgtgcgaaaccggtgctgtaggtcgcactgctccgaagctaggggcgctcgaaggcaaacgaggt

SEQ ID NO: 14727 - DNA, 1628 bp, Oryza sativa
ccgtaggtcgaggtcctgctccgacggtaggcgcgcgaggccgtggttgtaccggaccagctggaggtacgacgtccacggcgctgtgacaggagaagacgcgcatgaccgcatgcatcttctcctgcatccggtcgaaggtcaccctctgctcaacgtcagtcaagtgcaaacctctgttcaacctcacttggactgcggtgatatcggcactgatatcccgtgcggcatcagcctatgcaagatggaaataaaaaattcagtaattgtcctatattatgcaagataaatgaaataattgtaagaactaatacaaattcgacgtacccccacgaagtagtctcggtcacggtgcgtgggatacgcgtccgtgacagcggcaacgtgcggctctggggcgtctggagtgaaggtcacacgcgcacgagtgcgaggaaggtaccagcgaaggtagtcacggtagttctcctccgtgtgtgggaagagctcgttgatcacctcctctgtagctaacacccagtcgtcaacgtactgctgtacacgtggagcccaaagtgcgcctgctagctgtccccgtcgagtcaacctgtgaagagaggtaaattatatggctcgatgaagtaattatcataaaaatttagaaatgaacaatccgaactcaccagtggtcggcagggaggacggtcggctgcacgttgcccggaaacacctgcctaagtccgaactgtcttatcacacgctgcgggcagtgaggctcaacgaaaatgtcgaacaccatcggcaggatggtgagccagtaagcctggtcgcgtgtgcacaaagacgaaagtcctagcggtgctctcgcagcgacggcctcttctgtgtacggctcccagatgacgtcgctcggctggagacggtcaaactcgaacacgaagtccgggtaacctcgtctcacctggacgtgagcgtaacgacgctgcaataaacatgatcggaattagacatgttatgtgaagaaaaaaaagaagacgactgataaacttgtaacgcagcgaagttgcactaaccccacgtcgacaccagtaagtccccatcgtgggaccgtcctctggccactgcgcgctgcgaccaaccccgtagggtgcgctgtccaccactggtcgacctatggcaaacctctcggctgcccaaagctgaagcaacatagggcagccagcgatgatcgctcccgcgtcagtcttcgtgcacgcctcacagagggcacggtacgtggctgctagcacggcagaaccccagctccactgcggcacgtcctgtggctgagcatccgcgatggaccgtgcgtagtggaccagcccgaagtccacagcgtgcccgtgggtgctagtgaacatcacccacccgaacaaccacaacaggtacgcctcaagggagcgtcggaccgagtaatcatcagcgtcagggtgcagaaggtccgcctacaattaagaatgaaatgttagtacaaaacactctgttgatcgcaaataagcatgtatgataataacaacttatttacttacagtgaactggagcaaccaagccttgctaggcccgactgtagagtacgaaggaagggtgttggccggtcctaggtgtggaag

SEQ ID NO: 14728 - DNA, 754 bp, Oryza sativa
  unsure (1)..(754): unsure at all n locations
ggggtaattgattatccnattgatactcaacttgcatgcctgcaggtctacttgttagatcccccgaacaaaaaggatcaagacaagacataatttctctaccttggtgncagnttctctttatatttcatgaagcctgtcggctttcgtggggctttcttctggttcatgcaactcggaattgcttacaaaaatagaacttttaaagcaatcacccctatcgacagaatgagcacaatctgcatgacaatgtccatgcatgttctctgcgcaatcatgaccatccatatctacatgctgactcatgtcgaaaggaggctcaaatgcctgcagtaatataccttttaaggatagcatcatgtacattaaagttttcacctaacgtacaatcttcccaccccgacaacccaaaccacatatacacaataacacaaacatacctcaagcatgtccatgatgaatgatgcattcatggatatacacctgtgaagtaataaacaatcacaaaacaataataaattccttcacagtaagcaaaaagagcggccataactagtttaaacaacatgcattgatttttcagaaaaattcggccgtgaatttaagaattatacattttttcctgaacttaaaaattgtcacctaaattaataacctccagtcgccttcgttataaccaaaacccttctataagaatcccaatccttaccaattacattctactgtgtaaacctggtctttctaaatatctaaa

SEQ ID NO: 14729 - DNA, 1316 bp, Oryza sativa
  unsure (1)..(1316): unsure at all n locations
tttcgatcaaaggagagntattgagttcgacttgtattatatataataactcttcgtaattgatgcgtcgtnatgtaacgtaggtggtagtatatttttaaacttactatannccccncccnccccccagtgcggccctttgangtggcgtgccgtactcactataggcgaattcgagctcggtaccgtcagatctataattcacctggcggattcaaatccccaaataggagtagggtattacctctcattgagagggccacctgtctaaatcctttgtctctgcatccatccacttttaggtctcgtgcgctaccccttttattattgcggaattcatgtttcgacaggcaccttcccttttaatggcattccggagaagttaagatataccaggttcctgagatagctgacgaaccctgggaatcggccggctggacccacgagattgttgttgctgaggtcaaggtgctctagctgttcgagagcgagcagagaagtacttatgtgccccaccaaagctgttgcttcgttgtaccacgagaagttattttgaaggtgaaggccgaagacatgaccgatgaggttgtcgctgcacctaacgcctctccaccggcagcagtcatggttacctcgcttccacgaggcgaggcgacctgcgggatcgccggtgatgcctcgcttgaaggccagcagggcctccctctcccgcggcacgcagctgccggcggctggagccggcgcatggtttgccgtggacgtcgtggcggttgccccgaccaggaggaggaagagcagcggtaacttggctgccggatgcatgatgcgatcgaatgcgtgaatggctggaagcaattgagtgcagtatttaatgtgagaccgggcccttccattttctgagtaagattcatatttttatctttattttcgttagaatactttacaaactattaaacgatgtctcccgtaaagaaatttatatataagtttctttaaaatattaaatacaattatcaagtttataataattaaaacttaattaattaatgtgctaatgatttttctcgttatcggtttaattatcaaatagtcccaacgcatagtatatgtaccgtgactgatacgacgacaactcagggattgcaatttcggaaatttcggacccccactactacagcaaatattttcatggacgctggaccgtttagttttcaagcgggtcgtaagtgaaatcgcaaggaaaaatagggggaccggagccgggccatcgcccgtataggaaaacagggtacgagtcgaatgcaatcaatnacagg

SEQ ID NO: 14730 - DNA, 743 bp, Oryza sativa
  unsure (1)..(743): unsure at all n locations
cgaggattaataacccatnctagcattcctgcaggtcgactctagataattgcactactgcccctgacatggggccgcgggtatcatgactagaggcttgggtagccaccaacacttatttggcctgaccccctcgggggggggcgggcccgaagatgatgtagccacccctccctctgtctccccgaggggganaannntntnnncccttgctcgaatgaaaaaactttcacaaaaatgtaaaaataaacaatccaaactcacaattggtcgcaaggaagaacggccggttgaacataccccggaaacacctgcctaaagtccgacctgtttaataaaaccctgcgggcaggaaggctaaacgaaaatgtcgaacaccatcgctaggatggagagccagaaagcctggtccctgcccacaaagacaaaagtcctatcgggaactctcgcaacgaacggcgtcttttgtgtaccggttccagattaaccccccccgaaaagagacgggcaaaaatcaacacgaaagcccggttaaccccgtcctcacctggacgggagcgtaacgaccctgcaataaacatgatcggaattaaacatgttatgtgaagaaaaaaaaaaagacgactgataaacttgtaaccaaccaaagttgccctaacccaaattcgacaccagtaaagtcccatctggggaaccttccttggcaatggaccctttgaacaaaccctaaggggccctttccc

SEQ ID NO: 14731 - DNA, 679 bp, Oryza sativa
gcggacgaaagatgctgaacaagagggcgcacagcggcgggcggccggcgggcaaaagcaatttacccgcccgtcctagaagctgcaaaaacacaccatcgcggatctgcaggggcgctatactctcgtcccccggaggaggtagagcccctcctctttgacagaagagataggccccgacatttttgggaacgctgtctcctgtatatatcgccccgcccgacaggcgggcctctggggcgggcggactgtgaagtacgccggcaatcaggggggcctcgcccagcgcctttcggagatgcccgggacctctccaacggctccccgaggagctcaaggggacgattaagtcatcctcaagggacttcgcccgagaacgcgtggagctcgtactggcgagctaccaggccagggaccccgacttctctccctggacggtgctggatgagttccctcccgggacaaagaacgggggccgccccaaggtcgggaatgccccggaccatatgtccccaagtttgaggggttcggcccttaagctggggttcgccttcaactccgacgaggaggcgattgacgccggtgtgggcgacagtgcccaccaggctgtcgacccgggtgcatcggagtgagcccccaggcccccgccaatcttcagttttttcttcttttctttctt

SEQ ID NO: 14732 - DNA, 1098 bp, Oryza sativa
gcggcttgatattgactatcactatatgcctgcacgtcgactctagaggatccccatgcaaatgggttttcaagaaaaagcttagccctgatggtacaatcgaaaagtacaaggcaagacttgtggccaagggttatacccaaaaggaaagcaaggattttgtcgacacatactcaccagttgctcacttgacaatgattcgagtactacttgctctggcagcctctcatggtgttctcgtccatcagatgaacgttaagacagctttcctaaacggagagctggaggaggagatctatatggatcaaccagacgggtatgtactagaaggtcaggagggaatagtgtgtaaactgttgaaatccttgtatggccttaagcaagcacctaagcaatgacatgagaagtttgacaccacgcttacatctgcaggctttgttgtgaacggagctgacaaatgtgtgtactatcgctatggtgggggagaaggagtgatcttgtgcttatatgtcgatgacatattgatctttgggaccaacctcaatgtgattgagggggtcaaggactatctgtccaagagttttgaaatgaaggatttgggagaggctgatgttattcttaacattaaactacaaagaggagatgagggtgagattacacttgtgcaatcccactatgtggacaagattttgagtcactttggatatagtggctgcaagccagcttctactccttatgatcccagcgtgctattaaggaaaaaccgaagaatagcaagggatcaactgagatactcccaaataattggttcattgatgtacttggctagtgcaacgaggcctgacatctcatttgctgtaagcaagctgagccggtttgtcttaaatccgggagatgatcattggcaggctctggaaagagtaatgcgctatctaaagggcattatgagttatggaattcactataccaggtatccaaaagtactagaagggtatagtgactcaaactggatatctgatgctgataagataaaagccacaagtggatatgtgttcgcacttgaaggtggcactgtttcctggaagccttgcaagcaga

SEQ ID NO: 14733 - DNA, 6221 bp, Oryza sativa
tgacaaacagttttctttaatgtcaattttagcaaagtacttttttatactaatatgtaaaggtgtggatgtagagaaccaaccttccatagtaaggaatcttggcctttgtagcattctgttttaactgatcaaaggcaccagctctgaatgtatcagcacaaaccaatgaaggtttaaagcccttcagctgatgatagtgagcatatttggtacaggtagtggttttcccagaacctacagcaacataacattatgaagtgagcagcgaacattaaatttatattgcaacccaagaaagaggcagacaatagattattctaaggagcaggtgcaatagaaggcaaaacaaaactagcaggaacttaaaggaggaaatggcactaatccttaagacaatgggtctagcatctacaaccagcagggtaccacaaatttccctgagatgtgacctctatctgacaatgtaatactagaatctgaagtttgttgacttcaagaattaattaattcacaagaaggggaaaaaagattgagaatcgtccgttgtcgtctggctatggatacttttccaacatggagaaaagtaatcatcatcagaaagaaaaaataactttacatagttttactcaccaaaggcctaataaattcagcagaattcaattagaggagttacaaacaaacctatcagcagatagctactagtttataacactaaaacctagcaggtgctaggtaaaattaaaacgggaggccctgttctaatcttcaactccaaacaacaaacaactttctcgttttccgttagcatatttcctaaactgctaaatggtgttttttgaaaaaaaaaatatacgtagaagtttctttaaaaataaatcatttttccaagtttagctaatacttaatcaatcatatggtaatgagttttattatttcacgtgcgccgaaaatcccaacagacgaacgggcctaccttgcaagccgacgaacatgaccacactgggcttccccttggtgggggtgaaggacggcttccccggatcaagcatgttgcagagctccgcgaagacggcctacatacaagacgatatatatcagcaaaattcgttcaattgccagctgattttgacgagggagcctagcttatagctagctcatcgatggatcgatggatggatctctgcatatctgactgacctgctgtatgatgcggcgcttgttggtgccggcggggagggcgtcaaggttgacggccctccggatgttggcgcgcatgtcggagaccatcctgatctgcacgtcggactgcaggagcgcgcgcgcgatctcgtggaggcagtcggcgaacgccttgtcgtcgatcaccgtcgcgttgctcatctgcgccagcgcgcgggagatgctcccgcccagctgcgcgagcaccatctccaccgatcgatcggcgctccggcgtgcggcgatcttcggcggcgggatggataacgtgtcgtgtcgtgctcgtgctcgtggcgcggcggctgcccagatttgtggagtgtttatctccgtgatcgttattagtatagcttatatatatatggacagggtttggtgtaaatcggaatccggatatgaatcgaagaggtgttacaaaaactgggctgaaaattgaaacttaggcggaatccatctatcgatctatccgtctgtctctttctgggggcgatttttcgtcttcgtccgacttccgcgctcgcgtagatcgctcacgtttccaagtttccgtcgtggcgtttgtcccgtccggttcgatcctttgccacacgcccacgcacacccacacgtgccaaggcttgacaggtaaggggcccgtgttgatgtcttctgtacacttgtgtgcgtccctcggaccttttggtcctgtttggggagcttgtcccagctgcagctttttctaaaagctgtttctgctagaagctgccccaaacagtccacagcttctgagaatctgtagttacagattctaaaaaaatgaactaagaagccagaagctggagaagctgggtttcagagcttttccagattctcagaagctggttaccaaacagttacttctcagaatctaaagctcccccaactaggccctttgtttggtccttgtccatcctactaaatgggccttcatcgtatatatatggtccaggctagggaaataagtttagtttagttccctcatcttgacaccaagtttaaaattcgtcaccgcatcgcaatatcaggtatagcccgtcttcaaactcataaaaccgtgtcaactttcgtccaactcctaaagcagtatgtctctcggtttcatctaacatagagctttgactcccgtcagctgtgttgagtcggtgtgggacccatgcggaccccacatgttagcaacaactctttcttcatccactctcccctatctcccctctcttctcatcatcagcaggtcaggaggtaggccgcaaacagtgtggatagaggtagcgatcgagaaggtgaagggtggcccgacacgacgagagagctctgtgtgggtctcacctagtcagtgttagccatgagatccaccaacttcgtgtggccaatggggagaggggcaggcgtcggcgagtagaacggcggcctgacacgacaagagagctttgtgtcggcctcgcccaattgacgtcagtcgcaagctcctccaactctgtgcaattaatggggagaagggcagccgctggtgggcctcctcgcctcccaacggcgatagccggccaaccaccaaatctaagcgttaggcggcaacgccaatgtgaagaagtcgaccaaaggtgacccgactgctcgcgaggctatgatggcacgtcgtgaccttcggcggtgacagcctcggcgggatccccatcccccctcctcctcctcctccactgatgctggcgccctccatccgcgcctgcacgatcatcccgttcaactacacctcccacccactctgtctcatccctagccactgagacaaggggcaaagaaagggtaaagagaaagagagagagagagagagagagagaatgagaggatgtgtcactaatatgtgggatccaccaatttttattttatattttgtactgaattgttctgacatatggattctatgcagattaagctgccacgtcagccgaaactgggcactataatgtcctatgatcttaggtacatcgagtttacaagtccggaacatgctatactatgtttttttacgctgatacggagtactttgtaagtttgtattgttgtttagggatgaatttcaatctccgagtcaagatgagagacctaaagcggacttattgcccagcgttgggtgctcatcgagacgcctgtgcaaactggtcaggaataagttcacttcatgaccctcaaaagtgatcggattctaattcatgaccccaaaccgcaaaaccagatatcttgacccctaaactttgaaatcccgggcaacccgactcccatggcagttttgcgagcggttttcactgacgtggcagttggaccctgtcaacatcgctgacgtgtcgtttgaagatgggtcaacaaagtcgagtcaccgtatgcgttacacttccatgtgggcccggttttcgctgagttggatctggtaggtatatccccgcccagtgtaaatcccgggtgtattgacgagcgaaaccctagagcgcgctgtgagtcgtgaggagaaggcgaagaagggcgacgcggggggtggcgcaacggtggagggcgacgcagcgggcagagcggcggtggtggccagctcggtcgtcgtttctggcgggcaaagctggatctgtgctcgagctgaggttagttaatcctcattgaaccgtcgtcttcccgggtggattagggttagttgtgtcgatttgggtgctgatttgaaaatgcggtgcatgtatactattgttgttggatttggaggaggcttagcatattttaataagggaatcagtagatcaggtggatttgggcatactatattgggtggttgctttagatcaggtggatttgggcatattatattgggtggttgctttggatctgcggaatggtgatttgaatagcatggttgacactatttttatgttgcaaattgcatgtagggtttgtgaggagtatttggcatcatggacccattagacactcttccagtgagatttcattacaatggggagtttgttttgcataggagggataagtcctattgcggtggtagtgaagcaatgtcctacttagagagagacaaggtgtcacttccagaaattattgggcatttgcgggatcataccaaggttatggaaaggacaatgctgcattggttgttcccaggcaaagatctcaattctggcttgagagttcttgtggatgacagagtgtgcagctatatgtcagattgcatagttgaaggtggggtggctgaagtgtatgtggtggaaccaattgtagttgatttgtcagaagatgaagaggatagtgactatgaggttgagatggatgagggtgctgaaacagattctgaaggagaggatgatagtggggatgatgttgaagttttcaaggataaatatgtgcaggagcaagctgggaagggcaaaataaaggaagggggtgatgcatcttgttaggacagtgctgggaggtgctgatgcagctgagagggcagtggtggaaggtggtgatgcagctgaaagggtagtggttgaaggtggtgaacaagctgataagagaatggtgttgtacaccagagacacttagccaatttgttatatgcaggaggaggaataccacactgaaactgatagtgactacatgccaggagatgaatcaccatcagatgatgaggaagaggctgcaaacatacataaggagtacaagaaggtgaagaagaagatcaagactggtttcattttagggattgatggtgctggtttagaggggtcacagagcaacccaaatgtacatgctgatcaaggaaaaagtggcaatgaaacaccatatgaagagagtgactcaaaaaggtcaatagatgagcttgaaagtgatggggaggtgactactagaagtagcaagtttccaaggtacaagaagaagcaaggtgtgcctgtgtttgaacttggaatgaaatttagctctaagaagttgttcaggaaggcagtgactgcttatgccctaagtgagaggaaggtaatcaacttcatcaagagtgatcctagaagggttagggctaaatgtgactggccaagctgcccatgggtgtgtcttttgtccaagaccacaaggtctgatagctggtagattgctaccttagacaatttgcatgcatgtccccctagaagagataataagctggtgacctcaagaagaatagctgagaagtatgagaagttcatactgtccaacccttcctggaacttggcccatatgaaagcaacagttcaggaggaaatgtttgctgatgcttcattttccaagttgaagagagccaagaaacttgtgatgctgaaggctatggatgccagaaaagggcaatatcaaaaattgtacaactatcagcaagagttgcttagaagcaatcctgggagtactgttgtgataacaacttggtcctttcaaacactccacagagttttgtgcagagcaaaaaaaaggaagaggttagctggtgctaccactagtgctgtcagcctaacaaacaccacaagtgctactaagcagaaggttagctcattttcattacaacttaatttcatttgcatatccatttcctaacttaagcatttccactttattttgctgtgttgtttcaggggcaacaatccaatattgtcagcatgaatgctaaggcaaagttggcaacacaggcaggtggttcggccacagtcaacctccaagcaattgtgccatactccaagggttctgcatcagcttcaattcaggttacatctgggaaggcttgtgtgtcagtctcagctcaagaaccagcaaagaagacaaaaattggtggtcctcctccacccaagaaggccaagacacctggatctattctcattcaaccaccatgggaatctgacaagctttgaagcaagctttgtgtactgctatgcactgccatgccttggctaattattcagatgtaatgccagactcataggcttactatt

SEQ ID NO: 14734 - DNA, 11825 bp, Oryza sativa
aaggcggtaccccctggtactagacccagtggtttgcaacatcaagctccgaagatccctgatcgatggtggcactgcactcaatatccttttcgccaagactctggacgacatgcaaatccctcgcacggaattgaagccaagtaatgcgcccttccacggagtcatccccgggctgtcttctactccactcggctagattactctgtcggttactttcggcactcgagagaactttcgcacagagaatatttgcttcgaagttgctgattttgagacagcgtaccatgccatactcggacgcccggcgttagccaagttcatggctgtcccgcactacacctacatgatgatgaaaatgccaggtccccgaggagtcatatccctgcggagtgacatcaagcaagctgtcacttgcgacaaggaaagctgcgagatagcccagacccgcgagattgcgctcgctcgagaagaaatccgactggctgcgtccactgcaaccgaaggagaagtgtctgcaaccaagatgtcaaaaggcggagaaggcgacgccaagaccgagaagattcctctagatccctctgaccctactaagactgctgtaataggcgctaagttagattataaataggaaagcgtgctcatcacctttcttcaaaataataaagatatctttgcgtggaaaccatctgatatgcctggtattcctagagaggtgattgagcactctttacatgttaaggaagatgctaaacctatcgagcaacgactccgccatttcgcacaggataggaaggatgcgatcaaggaggaattgaccaagctgttagcagcaggcttcatcaaggaagtcctacatcctgactggctggccaatccagtcctggttcggaagaagacggggcaatggcgcatgtgtgttgattacaccgacctcaataaatcttgtcccaaagatccctttgggttacctcgcattgaccaggtagttgattcaacggctggctgcgagttactcagttttttggattgctactcaggatatcatcagatccgactaaaggagtccgactgcttgaagacttcgttcatcacgcccttcggggcctactgctacatcgccatgccttttggattaaagaatgcaggagcaacttatcaacgcatgatacagagatgcttttcaactcagattggtcgcaacgttgaagcttatgttgatgatgtagttgtcaagaccaagcagaaggatgatttgattacggatctagaagagacctttgcgagcatccgcgctttcaggatgaaattaaaccctgaaaagtgcatcttcggagtacagttagggaagctacttggctttatggtgtcccatagaggcatacgagccaacccggagaaaatcaacgccatcatcaacatgaaaccatcgagttcccagaaagatgttcaaacgttaactggatgtatggcggcgttcactcgatttgtctcacgactcggcgagcgggggatgccctttttcaagttgttaaagaaaaccgacaacttccagtggggacctgaagcacaaaaagcctttgaaaacttcaagaaacttctcactactccaccagtcttagcttcaccacatccgcaagagccgttgttgttatacgtgtcggcgacttccaaggttgtgagcacggtcctggttgtcgagtgtgaggaagaaggccatcttcaaaaagtccaacgaccaatctatttcgtcaacgaggttttggccgactccaagacaagatatcctcaggttcaaaagttgttatatggtgttttgattaccgttaggaaattatctcactattttcaagatcactcgttacggtggttacatcgtttccactcggggatatacttcaaaaccacgaagcatatgggcggatcacaaagtgggccttagagttgatgtctttggatctatccttcaagccgtgaacttcgatcaagtcccaagctttagcagacttcgttgccgagtggaccaagtgccaagaagacacgcctgcagagaagatcgagtattggactatgcatttttatgggtcaaagaggctttcaggcaccagagcgggggttgttctaatctccccgactggagagaggttgagctacatattgtggatacatttttctgcgtcccataacgtggcggaatatgaggcgctacttcacggattaaggattgcgatctccttgggaattcggcgtctgatagtttgtggagattctcagttggttgttaatcaagtcatgaaagagtggtcctgccttgatgataatatgaccgcctatcggcaggaggtacgcaagttagaagataaatttgatggccttgagctgacccatgttcttcgacataataatgaggcagccgacagactggctaattttggttcaaaacgagaagcagctccttccgacgtgttgttgaacatttttatgaaccaactgtaccgaggaaagaaatagtcgaggccacggacactcaagaagtaagcatgattgaagccgactggagagagcccctcattaaatttttaaccaagcaagaactccctccagataaaaacgaagccgagcgaatctccaggcgcagcaaactttatggcatacacaaggccgaattgtacaagaaaagtccatcggggattctgcaacgctatgtgtctttggaggaaggaaggcaattgctaagagatatacattcaggcatctatggcaatcacgctgccacacgaaccattgttagcaaggcctatcggcagggttttttctggcccaccgctgtatctgatgctgacataattgtgcgaacatgtgagggttatcaatttttcacccgacagactcatctaccggctcaggagttgcaaaccatcccgttatcttggtcgttcgcggtttgggggctcgacatggttggcccattcaaaaaagctatcggtggttatactcatctctttgtagctgttgataaattctccaagtggatcgaagccaaaccagtcgtcacaatcacggcagacaaggctatagatttttttcatcaacattgtgcactggtttggggtacctaatcggatcatcactaataacggcactcaattcaccggcggagtatttaaagattcctttgaagacttcggcatcaaaatttgttatgcctccgtagcgcatcccatgagcaatggacaagtcgaacgcgccaatggtatggtactttaaggaataaaagtacgagttttcgaccaatggtatggacaagtctttgcgatttcgtaacttcaaggaggagcgctacggagaagaccgagtggatgatctcaaccgactggaagaagcccgtgaagcagccttaatccagtcggctcggtatttacaagggatacgacgttatcacaatcgcaacgttctttcacgagctttcttagtcggagacctggttttgaggaaaattcaaactacacgagatcggcataagctatctcccttatgggaaggaccattcataatttctgaagttactcggccagattcttatcgactcatgtgtgaagacggtactcatgttgacaactcttggaatattgagcatcttcgtcgtttttatgcttaggcattacttttgtatcttcctctttgactactaacatcaagttgttccttgagttaccagtcgggggctactataataataatggagtgtgatttttatcaattcaatttgcttacttgatttatcattgtcttgtttgattttttagcttagccaatgaggactgaaagtttttaacaacttttgcgggttctaggctcaataaggtttgataaaaacttttaagaaatctagagctgagtttaaatcatcaagcacagcataaattcatcagtattgtacaaattgtgcctccatcatcatcatcattatcatcagaatacacaatcaatcagattcagttttttaatcattagagttatcagacccagtcggcttaagatcgttgtcctgtaacctctcaactacatcagcggctatcttgtcggcagctttttgcgcatcactgatgaggtcaagggcggcttcctcacttgtcccgtctgcgaagccgtcaacaacatcaatatcaatcttcgggtacaaggacttggtcatcgccaactctagacttgcccccatacttccagcttctttgatgttcttaaaatatgtatccggagcagttctaagcttgtcgaagatttcgacagcatcaattgaactcggaccattgttattgaaaaacatggcctggacgagtggcgtagcggcattggcgacttcatctctagctccttcaagcttcttgattttgttaaccaagatgtcgaattgagcctgggatttgattttgcgatctgtacaaataaattcacatcaatgactgggcatgaagatgagagtggtttttgaagtttcagctacaagtaccttcgacatctttcagagccgagtccctctgttttgccagttcgaccttgtctttctccagagcctggattcgcctttctagcttggatatcttggcagctttcactatattgctttccactggttaatcgcacatgaatagcagcatgaaacaaatcagataaggatgagagttaccttttgatgaaccacttagctcaaagttggagtcttggagctcggcgatccggtctctaaggtcatgctcagtcttcctagcaagctccttggcttcacgcagttgatctctggttgcttccagggttccaaggtggggaaccaatttctcgaggattgcagtttttgcctcatttctaagatggattctctgcattacaagtgcgtctttattcagtaaagtggccgacaggatgattgaagctgtatgtaaagagacttacatttacaagacgggtagcttgtccaagtgtctttttcagcagacacacttcctcgtcttccttctgtttatttatcacgattccctgtggatgcatttcatcgtctcaccacttgactaatatgggtgggcgagaatcttcagccgatcgtatccggaggacctcttctttgtcaccaatcattgggccttatatattcatgaataatggtgagacaattgaagaaagtttgttggatcaaaacggatttggaggacttgtttacctgttatgatttccggtcggggatgagcaggtccttttatcctaacaggagagttggatcccgggtcaacaccagcgtccttcctgggagggctgttagcttgagtttctacttctgggatgtccttattttgttctgtacccgactggtctctagtcgggggctcctgttcaacattggcttcagcttcggccaactggtttccagtcgggggctcgttgctggcctctacattatcggttgctggttgattatcactcgggcgaccttcggcggtcggcctggtttctgttgaaggactagtctccgcgccattcggctcagggtcttttccggaaggatctatatcagatggcttcctgcaagtttgagatatgctatcagtactacttcaatagtgagtgactggcgatacaaaggaaattgctaaacgacttgtacctagatgatttcctgatttttggtatgggacgactggatgtcttcttctttggattggcttgccttggctgtttttcggtcacccctttgttgccggcatcatcaccttcatcatcgctcaagaccaatttcctcttacgggagtctgactggttagtcgatttcgaggtgtttggttgagtatcggaccgaattttttgtactccactcgcctgactagtctgccgacggggcgagcgatgttgagcaattggaggatccgacttcatcaaggcaaattcctgggcatgatattccaagctttcaattaactttgcagaagataaaagcatgcttttgagaagggctgagatgtttgatacatacccgcggaggagggttgaaggcgttgtatggcaccactggcaacaagtgcgaataactgaccacgatagcattcgagaagattttgtacattctctccttcatgactttaaactcaagagaatctagatcttcacggttagggtcatgcttgccgtcaaactcaaaggttgtgcgggatctctctttaattggcgctagtcggcttttaataaaatgccgggtgatctgctctccttgcagaccttgctctttgagcttcagcatgcgatcgatcagggcaagtgcttgggccacctcatctcccatgggaagcgagttccaggtgtcttgatatactggaggtagacaagaatactcgggaagcgctggctcgggattttgcacatagaaccaatttgcatgccaacccttattcgaagttttgaagggcatggaaaagtatttttggctcaaggttccccttagttggaaaccggctcccccgacaacacatggtttgctcttgtttggctgaggcttgaggaagaagatgcgacggaacagggaaaaatgcggtcttatacccaggaaagcctcgcaagcatggataaaattggcaatgtggactatggaattggggtttaggtgatgcaaactaatcccataaaattccaaaatcccccggaagaatcttgaggttggaagagaaaatcttccatagaagaaatgagaaaataccacgacctcatgtgtgtcaggggttggaaatgcttcgccgcacgccggacgccacccaatgatctcctttgccggaagaacgccgtgcgccaccatctccttcaagttttcctctgtcacatcagagggcacccactgactttcaaagctttctctctcctctgccatggatgcaaattggatgatgcgatttggtttgaaatatggccgggaatggataggagatcgatgcggtggttgcgcggaagatttttgtggaactttggaggatggattggaggggatttgtgaaccctagcttcaccgaagtgatttcgcactatagcagtgagtagggaaagtggcaagagtttcggcggggaagacaaaacgacgctatgccttcggtgttatctcattagggtatcgggagtactaatgggcctgggcctaaacagtacttcagcccagttttgctatcagcgtggttaagttgtgatccttaggggcttaggcatttgtttttgctttggcaacacttgctcacgacaatatagcccaatgctgttaaaatcctttttgacgcagttagataattctgtggaattactacaatgcaaataaaaaggtgcctgacagaaaagtgttatactgattttgtaggcctttttaggctgcaaaaactatttgggttttgttgaggtgactggtttttgaatagtcattctctcggcatgttatatgcttattttgattatgacgtgagtcatggcctaggttatttagactcatcgatttatatcacatttgatggatctttttgagagtttttactcggattcttgtcatatgtgttggattatggaccttatagtattttttactcgggtttctttatatttccatttttggtatatcaaagctaaagcagtcggctggatattttatcaaacgtctcatatgcttagttgtatgatactttggatgattcggttgtaaaaccactcggttggatgttatttacaccttgactatatgtttagtttttttaactaatcacttagtcgggggctacacctaattaggtgcatctagtcgatgcacctgattttttctattttcagccattcacagtctttgattttgatactcgggagaccaaggcagaagaagttggagtgctcggattatcgtttgggattacgagagaaaactattttgttgactgtaaaggtctcaggggctactgtggagattatggataccccatacctacacggcatgtataatccgactaggtatggggtgccatgtatagatagaatatctttaaagggacttgggttaaattccaaacttgtatgttaaggaaatactcgggatcttagtcggttacgattgaatcttatctgtaactacctattccgttagggatatggactgtattttgtaatacggaccccttcccctatataaggaggggtccgggtgcctcttggggcacgatctgctcccagatcatacgatcaataatacactcggtggatcaatccccggacaggagtagggtattacttcttgttaagaaggcctgaacctgtataaaattctttgtttctcaaccccatccacttttccagcttgatagccacccccttttagtattgccgaaatcttgtttcgacaaatttcaatcaaattttcaattttgatgtgaactaaacacacccatagtaggatgcatgagatcgtgagatgagtaaactcaaacttgcttaaggttgggaatcgctgattggtaactacattaattggccctcataattttatccatccaaattccccattggaccattacttacacttttgtagggtgattactggagggacgacacagggcacaattctctactgcttgtacatgcttcagagctgcaaaaaaaatgacaatttgaccctttcagaaaacttatttcgcaaataaaccgcgcacaaaacttatttcaaaaataaaccagaggttcagcgccaaatgcttcggcactgagcttagccacctcagtgccaggtcaaccggcactgaatgtcgtgccaccgtggatggcacgccgactcagtgtgccgacgtgtcaaagttcagcgccacccgactcggcgctgaggtggctaagctcagcgccattgtatttggcactgaaggggggaacttagtagctgtgccgagcattatggtatggctggctgctctgctagatctcagcgccaaataggttggcactgagtatggctggttccgtgccgggtggtttggcgctgagatatatttgacaggcttaaaactatgtttacttctgacacatttggagttaagtgaacacagcaaaaaatatgcagtcattcggttgataaccagtgcgcaaccaaagcaatgttgcgaagtgaaagtcacaactaagcaaaccatttaacatatatagaagcagtacttaactagagaacaagtcttagccatacataagaaggtccatagaaccccgcaaaaaaaaaaggtccatagaagtgcctaacagccataggtgcaaaagtgatgctaattctgacagccttacatgacgaggtccatacaaaagtcatattcagcataagttgtgcacatcaacttggaggataccaggacaatacttacaataactgaaccattaccatcgcttatatacaaacctgccgagatttgcggctcctggagatttttgagctggcgtggccacctgcgcgtgccgacgcgtcagcgaggcgctggatggcgggtggttttcgtgagctctcgcacgtccgtgtcgtcgttggtgattttgcaaaaacacccttcatttacttgataatttgttatagatccctggtccttagttctaacgttgtgcactcttacttagaggacctcttaagaaaacaatattctatatgaagaagcgaaaaaacggaaaattgaaccgcgctctgaaaactagaagtttaggggttgtttttgcaaccctcacccctttccccaaaccctagccgccaccattcctctgcctcctctcctctcgctccgctctctctcctgcccaagcgacggccgccgccgcgtgccgtcccctcatcctcttcttcccgcagttggcgacctcccccgcgcactccctactgcgagctgttgctgtcgccgcgccgtcgtcctgccatcgccatcctctcgctcccgcgccgcatccgccaacgaggaggccgggactgtcggatccggtgactccggcctcctcgccggcagatccggccgccctgaagtgaggggaagccaggagccgccttctactcttctacctctatgcccggcactgcccctctctccctctccctctccctctccatcttgttcatttccggatcagcggatgcctgcgattaggcggccacgaacgtgcgtgtgggacgtcgaggagacggggaatcactggatccaggaggtcggtgaaccgatttggagagggagctgcatgatctgtggcattggtgtaccgtttcggacagcggcggtctccagtacggcgggtgctgctggatctgccgcatggagggctcctcgtcagctccgtcctacctcttcttctgcctttttggaaggaggtgaggagaggaaagtttcctctggaatttcatactgcatgttatatctttgccaagttggtggtcttagtgtgatactgtgattaatttggaccgatgaagatatgtgtattgaatttttctttgcaagtttaaatcagtgtaacactatgaatgtgagcgtgtgaatgcagcttgtagtgaagctttgttgagcttacgcaaagcagagaagggcatcggcgcggggctcctagaggatgctgccacctccatccccttgcgtcacggccgtgctgccctactggtcctctggcacagcatctaaggtcatctgccaccacaaccaggttgcatctccaccgaatgtgaccccactttgatggcggcgagctttgctttggtagtgttgctgtcaatttggctgtgcatttctttaaggggttcatctacgatccattgtagcatgctgatgactttaaattacaaatgagttaatgcataagattctttgtttccaagtataagaaattgatatatcttttgttgaagtatgagtatgctgatttgttccagcaaaatatagcaatgtacaatattttttgtggataataatttgataatgctccatccaaatgtagtcatgcatcttcatcaaaatagactgtggctttgcatttttagtttgttcattactaattatgccccttgaaggtagtgacttctataaaattaatttataacgagcatgtttgtaacttgacattagatgaccttttacatgcagaatctgagactaaacatatacactaatcacactaatcactactactgctgctatatattactgttgtaccaaaaatatacaagtgcatttgataaaggttatacaggtctggatcagaactgtatattactgttgcaccaaaaataaattaatgaactgtaattttctctgtattatttttggatgtgattactaaagctcgctatgtgtctgctctttttgcactatagatgttatgtggggcattcagtatcagcgccggaaccgacgccaacagccagagcaggcgccgtgatgttggatcaagttgttaggattagtttcagtgattaagtttgttaggaagattaagttgttagttcctggttagtagctgtttggttttccattgtaagcctatataggccattcggtttaagtgattaatcaagaaagaagttaatcccagttcctgttagtttccaccacggctccgggaaggtaaggcgtgcgtcctcgccctcccgttcgagcacagctacgcgctatgccacttagggccggcgcctaacaatagaaaatcaatttatctcaatttgttgcacaatccatctatagcttcaattctattctaagctatctaatcttcccaacgccaatcagctgctgcattacaatggaatacatttttgcttt

SEQ ID NO: 14735 - DNA, 2052 bp, Oryza sativa
ccgatgtgggattcggaggggccaccgatgaccagcgacatcacctcggatgtcaccacgagcaccctggcaccggggttgctcttggcgatgtccttggccacacgcagcgccgtggtgcctccgaagcaaccagcctggtagagcatgacacgcttggtcgacagcgggaggccgaggagcttgatgagcacgacgtcggcgctgggcaagcagccggtgctggtggtggcgaagacgatgtgggtgatgctcgacgccggcttcccccagtcgtcaatggccttgcgcgccgcctccgcaccgagccgagggatgccctcctcggcgacctgctgccgtacgttgagcgaggtggacatgtacgccgtcaccgacgggttggccctcagccactcatcagagatgtacatgtgccgcttctccgtcgatgtcttctcgcctagatttgcaataatgcaataaccattgctatataattgcttgggcaccatgaaaatcgtctccatcgtttcgtttattgatggaataagcgaaacggtatatttgtaaacggaaaataatttgtaaataaaacttttatatgcatgttcttagcgatctaacggcaaaggctgaagaataaattatgatgaaaaatctcaaaattaactccaaatataagattggaaattcaaattttggcttataagaataagtataagccaaaagatgaggctgctagcttctacctatatatttatggttgttaattaagttcatcgatcgggaaaagatacaaaatggtagtaatttcgcatgcacttacagatgtttgcaaacttggcttttaggtcgaccaagtgattgctatcggtaatctcaaagtaataatcagggaatgacttctgctcataaacatgaaccggcacggccgtgccgattcccaggattgttgctctcccgccggcacaaggattgctgctcatttcatgtgtcaactctggtgcccctgacgatcccatcaggcagtacgtatttggagtatggacggcaactatactctaagaggaaatgaaatagccgctatagctttgagatctctgcagctaccaaagctcggcctgatatatataggcattgtcgatgatgacggccgggctactttttttttttgttacaactagatgttagcattaatcgagaagaggtggaagagggagtggccggcagttcaagtggaggggagaaattgaagaggaatggctggcggtggaagggaagagaatttgtcatgggaggtcttcaggagggtaatttggtcattttgacaaaattaacgacgtctaacagaataaaagtgatggcaaagacatttccaagataaaatagtttatacgattatatttcttagaagttgggtttgttgatggcctttattgaacgaaagtctatatgcttgtcaattgcatctagctaatccaatcatcggtgccatatgagaagagtgtgcactagcttgaagatcacaccaaaaaccatgagattagtagatgccatttccattttccaccattaattggcctcttgttccgctccttgcgtgtcgcatgtacactgtgatcacccttttttttgtcaattccatttgagtagtaattctgtaattgttgtctttttcatagtactttttttcaacttcatttgattgtagttcttcaaaacgtaaatgtaacaatctagcggattaaaagtagattagatgggatagttacataaacattttcttgaagttcgtgattacacatgcatgcaccctatatcaatacccgaagaaaataattatgtttcatatatacggatcatatttagatgtttagagtgagtcataatattataatgtttttatgtaaacaatacaggtggttagctacatagtgcagaggtaaaacatgaagctacatgaagtaagttcagcgtgaaatctaaaagtaattcaaataaattgtagaagtaactaaatacgataacaaaagtaactctttgttctagtattagaagaagtagctttat

SEQ ID NO: 14736 - DNA, 2136 bp, Oryza sativa
  unsure (1)..(2136): unsure at all n locations
aaaaaaattccacccagtcttatcgaatatttagcagnatatatcagtatttaaatatagaaaanaactaattacttgtaaattacgatatgaatcttttaaatctgattgctccatgatttgataatgtggtgttacagtaaacatttaccaatgacgaattaattaggcttaataaattcgtctcgcagtttccaagctgaatctgtaatttgttttattattagtctatgtttaatactcgtgtgtccgtatatctaacgtgacacgctaaaaaatttcgttttgcttatcaaaatacatatatgtgtttgagtccgtttttaagctcgttcgctctttaaaatataaaaggagtcgtataagaaattattttaaaggaactcacattctaacttggggcgcttttagaaacacaacagttatcgtataagaaatcattttaaaaaactcgcatgctaatatgagataagagtcggactcctaattacaactcatgattttctaaaaatagtatccaaacaaattctcacaatgattttcactttagctaaattgtataattaataataataataataataataataataataataataataataataataaaataatattcacccattacaacgaacgtgtatttttcatagggtagtatcaagatttcagccgatcttacctgatttagccttatattttatgtgcttaattgatatgctagatccgccttttatattgagatcttcttgctttcaggtatattaagcttctcgtttgatatatattacttgctttaatatctttacatagagtggtatcggagtattagccgatacatgctaaatctatctaatcggctatgctatgagcgcttataatttcattgttaatatatatttcgatctaagtgatttatactgtctcgacatggcgatcaatctatcccaatcacttgacttaaatatatatcgacttaaggattatgtaccgttaatatctacagccgattgaatagatttagttctttcttgttattcatgactgccaatcgatgcaaagatgacatcggctcaaggataaatgatatgtcatcggcgactggccgatcggctatcggttatgaatttaactgctattttcctgtctttggttattggtgattgcaggatcaaatcaattggcacgctcatgaacctcaaaggcaagatttttggacctgcactggagttaagcagatctcccaggcctcatgtttttcgcatcaacacgcttttggcaagcccagtgggaccaagttacgacaattttctctcatggctgaaaaaccaccacagtcaccatcatcagcaacaaagactgtggtccctcctcagaccaagattccaaagcctacgggaaccaatgaggctgaggttaatactgggaatattattccagtcactggtggcaagctatcaccagagcaaaaaaggaatttgaactaatgatgcagaacgcacaacaacaattcatgaattcattcacagagactcggcaagggagagttgttcaaaaatacaagttgaagctagttgctgatgtccctggaacaggtccttctaaagatggtgaggtgcaaaaaactcaagtcagcacagatgattcaggcagcaaaggtactacagatggattgggcgacaaaggtgatgggctccaagatggcttggttgaagatcttggtgaaaataagcacaaaagaccaattgcagttcaaccactttccaagattgaatagactacaccgtgccacatgctttgatcaaccaatcgggagtgctgtttaataccctaccaacatggtgaaagttttggtcgatggaacattaacttaccatcaagcacaggcccagttatcttcaaggaggtgtttcccaaattacagatatttgataactggtaacaaccagcctggctccaaacataaccaccagttcaaaccgaccggcaccaggttttgggttcctgaaccaagccggacccggtgtaaggcaccataggcaaacaacccaatccttgattggtggacccaaagaccaagccacaggatgtgtggacaaaaatattcattcgggttggcaccaagggagcagg

SEQ ID NO: 14737 - DNA, 3981 bp, Oryza sativa
ctgtccttgtggggtttgtttcttggtttttggtgttttcttggaaaaagctccttggtttcagtttgcttttttaaaaaaaataagctttggatttcagtgtgcctctttttttttaatctttggatgtgccatgtgtcatggtaggggtttgatttgggaggttttgaaatttttgtggatttgtgatgttttggtgggggtacgttttgatatttttgaaggggttttaaggatgtgttttgttgtgagaataagtaggatatacgattttagggtgataaacaatagagcgggtgcgaagaatagaaaatagaatttttccttgttttgagaattgtctttagaataaaatattttaattatattgctaaaaaggggaggctattcccctttccaggttagttgagatatattttaaggttttttgcatttttaggtggtgttttttttatatatatatatatatatatatatatatatatatatatatatatatatatatatatatatatatatatatatatatatatatataatttgtttctaaagagaggctattcaactattgctaggatatgtatagtctccctttataatattgttccatttgactaaagacgttcttatcccatatctcacccttttggcttgaggacatttcatatactactaattagcgtgttgaactttgtaccgtcaatttgcctttaatacatggcaggactaccaattcaaattggcacaatttgctacatcggtagtacttactgtgcgagatattttttgatgtatgacttgtcttcctttaccgtttataacatacaactttcctcaagttttatagtattttaaaattataaaacaagtctcacaactaaaaagaagaaactagctgaaaagtgcttgctcatcggacaagtgtttcttgtactgcagtaagaagaaagtagcgtgtgtgtcatcacgttacttcgtttttttagaagaaaaagggtatcataaagtatggcgcgttactccttttctttaaaagctttttaaccgagcatgaaacgtagcttataatgcacggcaatctcaaattcgccacctcataaaactctttgttttgatatctaaacgaagaaaaccgcactagttgaaagcttttttgcacttaacgcatagcccatcagagaagcgtttcaaaagaaaaaagatacggcaacaactcaactaaacagtggtgaacaccaccactaacgtctctacctacaattgagctataaaaaattacagtttgaactaaggatcccttaatttgtatggaaaacacagaaaatttagaagattacaaccttacaaagaaagatttctagaagggcctttttttagaattgaatcatttcctttcctataaaaatcttattaaaaatacatggtggtgtttgaatctcctaaagatgaagatgaagatgaagataaagattaagtatttcacacaaaacgaggtgataataacgtgtggctaatttggttttaattattacaaacttgaaaaatagattaatatgatattttagaccaacttttatatataaagttttcgcacgagacacaccgtttagcagtttgaaaagcgtgccacgagtatccaaaaattccattgcagtctatcactctcattttactcttagtcctactaagattttaggagaaacgtccaagggtcttccggctagcttcacaaagtagtgggctagacgacctgggttcaaatactcaccccttctaactatttgatattatgtcattccctaatatttgtgtttttttactgagattttagaggaaagttaacaaaagcttcaacctcttgaaaaattccattgcagtctatcactctcattttactcttagatgattgttctactaagattttagataaaagttaacaaaagcttcaacctcttgaaagttacattgcagtctatcactctcattttactcttaaatgattgttctcattttactcttagatgattgttcgtgtatttttcctgtattttacaattctttgttttgaatttgcattctttcctgtattttgcaatatttttgggcttgcattcatgttaaaatcctatatttttttggtatttctttgatttattttaatcattcctgtgaaattgaactctttgacttcagcctcaaatagtctatttcaatacaaatggaggaatccgcatcaatacttatttcgcgaacgcaaatgcgcatcaataccaatcgatgacctttgtcagtttaagagaaacattgtgcccaatacttcctccattcagcatgaaggaaaaaaaatactttaaatgccccttacgagggtacgctaactattgattgactgaattgacataaatttcagcaaaattaatattactacttcctccattcagcatgaagaaaaaaaatactttaaatgccgatatcccactgaaaaccaggccctcaatgttagccgagtgtttgcatcaagcccatcatatatatttgcaaatatcaattaacatcagcacatgctcccaaaacatttcgttcatgtctttaagcccatttgcttcatgacgctctgcaacggattaacaccaccgatctgattcaacaattgcttagggatgagattgttaatggtgttcagcgtgtccttgttgttcataacattcctgtccatattcttgggcaacttcttcttcaacttgctacacaccttggcgattctcttgtactcttccagcatgtcggtcacatctttcatggtcctgccagatcctcgagcgacccgtttaattcgtgattcactcatcagctttgggtttgtgctatcaagctctgaaaattaaggagctaaataagtttcaagaaagcaatctccattcaaagaagaacaaaaatgcctataatagctcacctgcatttgtcatagaatccataatagtcatgtaccgcttaatctttgcttggctttccttgtcatgtccttttggcatcagttcagacctaaatccaggtatcatagataaaacctgcaagaaagaattacacaatgcatgattaaattcgtaaaaaaagatttccttatgttgcattggctttcagtgttgatatctcgatgaaatactccaataaaaacaagattaaatactgaaaataaatctaacctgtccaataggacccatgttaagaagattctggaacagctcgtagaatactctgagagtaaaggttccttctatcagtctctgcataagctcaggttgttgatcagcaggcatagcatctttgatcttgttcactaagccagacaagtctcccattcctgacagttagagaagttatgtaagctcgatagaatagcaaaaggttacagattatacccaatatgtttttactaacctaacagacgactaacaaatggtttcacatcgaaaacctcaaaatcctgcatgtgttctccagttccaataaatacaacagggctctttgtagctgcaaccctggaaaagaaaaaaaaatgtcaaaacaggctccttataaaattttcactgatttactcaaggatatccgcctttttgctataattaagaaatcctaagagtaataatttaataattaataaacataaaatagcaggaggtggtttatgtaggaaatactaacgcgctaagtgcaccgcctcctttggcatgaccatccaatttcgtaacaatcacagcaccaacagaagcactctgtttaaatgcttgcgcctgatcaaacgctgcctgaccaatgctaccatccatcacgaatatcacaaggtcaggtttctgcacacagaaacacaagttaaattctcagtaacaacagtggaatgtgccttgatcaaaagatctttgccaatggttgtgccaatgtaaataccgttgcttctgcaacttgacgcatttcttcgaagag

SEQ ID NO: 14738 - DNA, 710 bp, Oryza sativa
tagaacttacagcactagatactgcgacagttgaggccgagtggcttcttgaactcctgatggatttgccggtggttggaaaaccagtgccagctatcctaatgaactgtgacaatcaaacaatgattattaaagtgaacagttcaaaggacaacatgaagtcatctaggcatatcaagagaagactgaaatctgtcagaaagcagaaaaactccggagtgatagcattggactatgtccaaacggctagaaatctggcagatcagtttaccaaggggctaccacgtaatgtgatagacagtgcatcgatggaaatgggcttgatacccacctaaggttgcacaatagtggaaacctgtccattgtgatcggagatcccgtgaatttggatggcgaaacaaactattgtgtgactgagagaagagacccttgaaaaaggctcattttcatgatgtacttctcttcttttctgcatggtaggatggctcaaaccttaatgtgatccgagtggcttttccaagcagagatgttgacctgcagaacatctcagaaggaacacacctatatgagttcgactgctagtcacaatctatgaggtttgggcgatctctagatacttatgaaaggcctggagtttgacttatatgctccaaacagaggggatgcgaacggcagcccaataccagttaagggtttgagtgaaacctgat

SEQ ID NO: 14739 - DNA, 995 bp, Oryza sativa
  unsure (1)..(995): unsure at all n locations
agcgcgttagacacnctgctcncnaccccaaaaggccatgaaagtggtatgatctgcagggcctgggccggctgatggatttgctttgcgtggaattgacacgctctgcatcgccggaccaggtcgaccgcatcattgggagccgtcggccaatagaaaccctggcgaaaggccttgccaaccaaggtgcgcgaggcggagtgggctccgcattcgccttcatggatatcggcgagaagttcgacgccttgttcccgaggaatgcacttcaggaggactccattagccgtgcgccgatagagggtcccttctatcagcacgtagcgtttggagatgcgctagacgcgttcactcccttcgcggtcctcgggtagagtcttatctgtgaggtatgcttggatctcagcgatccaagcaatcaatctaagggagctgggagcgctcccctcgggtcccgaggcctggactccgatgggcctcgggggccggtcaggcgcgtccgtcttccctaaagggtcgggtcgcgccgacggctgggtaagcctttcttcaaaggcgcccggtggggtctgggctcgcgaagaagcgagccgtgagagttcgtcggcaatcgtgttatcccgtctgggcacgtgccgaagctctatcccgtcaaaatggcgcttcatacgccgtaccttgcgcacgtaagtgtccatctgggggtcagagcaccggtactccttacagacctggttaacgaccagctgtgagtcgcctaataccaggaggcggcggatccccaatccagctgccaccctgagtcccgccaggagtccctcgtactctgccatattattggtcgcccgaaagtcaaggcgaaccaggtatctgaggacgtctccgcttcgcgaggtcaacgtgaccccagcaccggcgccctgaagaacagggagccgtcaaactgcatcacccantangcggtgtgaagcattttcgaggggtcgagcttcccc

SEQ ID NO: 14740 - DNA, 2746 bp, Oryza sativa
  unsure (1)..(2746): unsure at all n locations
ttttctgataacggctaaccttgacctttttcttcaggcgtgttaccttttgtagttttatatggggaacttctcttttcccattcctccttatgctaactggtgtacttgacaggcatttcgcaggctgtagaaggtgacttagtttatagcaaagagccccctcctggagaagcaacttcagttgatacttcagaaccttgcgatgaccaaataaattcatctgatattgatctatgttctgagacacttccagaagaaacaatccagtctgtgaaggtctgtaatttgcagcaaacaatgcggtgtacatgctcatgcacaaaaagttcctaatcatgcactgtcatttctcgtgtagatagttgattctgaagatttattgaagggtgtctacacatttgaagatgttgtccttcctttgcctgggtatttaccattccacatccataacttcaattttcatattgaatcacattgagaaatatatatggtgtgcttatttctgtaaacatgcagttcgcaagcattatttcctggaaacggaattgctgacatttatcatgaattggctaaaaaggtgctactatcctacaaaatttattttatagtttattcagaagtacttcctttgctttgccaggaacttgtgcattcttgaatttcctctataacccttctgttgctaaacgcaaaaaagaaaaacacatattgtaggttattggttgctagatatgtttactgtgaaatgtgtttagtttcccttttctttttgtggataaacgatacttctgtaatgtcacaggtttaattggctaatatattatgaatgaattacacaatattttttaaagtgaaagattaaatccaagaaataggaatcatattgttgatttgctttcatgtctcaggatggcattagcttgacagagaatgcacatggtgtcaagtaagtttctttattttactgtaaagatcaaaggcacctctaaaagtcaatacttagtatatgtgctatgacaagctttatatctttttgttctgatatcctactatattctcattctgttgtatatattaccttggcttgcatatttcaatttgctactttataccctaacttctatgctatatgatacaaactccatttttaagggagttttcaattacaagcatgaaaggaggttatcggcgggtgttccagcggcctattgattttgagtggtatgccttatcccattgacttttcacttcattagatgaccaaaatcatccccttttctttcgtataaattctagccctgttccactaaaaaatgctttggtgtgcctgtagggaactcatgacttacacagatgacacagcatctttagcagaaactgatttgattggctggaggtccgatatcatgaaatccacaagattaaattaaatagtgaaacctttgttgccatcggctaaatccaacttatatgtatatgcaatccttatgagccgatgcaacgtccagataactcaccggttgaaaccccgatgaaacccttattggcaatcaagaagcaggctagagattatggttctaagcacgacttagtagatcaaactcaatggatgcagcactaagtatgaaaagaaatataatatctagacaatcaagccgttgactgagtttttagggtggtagatgtctaagcaaatctaatctagcaacgcgatttagccgatactggcagaatccctaaaacgagaagcagccgatagagctaaattgatatgctaagacgatattaacagagacatatgataaataggtaggcaaatatatcatccaaaccagagcaatccaagagatcgaatgtactgatgcagacttgaacgacgccgacgtaaacgatactattgcctaggccgacggaacattggacttaccccttagccggagatcaaacatagccccacgtcaggtgccaagtcccgtcggacgataaaataaagtagaaaaggtaaaaggtggcgatgcgccgaattgtattaataccctgggtgtacatatttatacccatgggttgatacaagttcttgccggacaagaaagaaacttttctaaagataaaaggaaaagataaagtccttataggacactaaacacactttcctaaacataaaaggaacctaataaactattcttaattaatagataccttgccatgcggcattctctttaaactcggtctcttctggataagcttcctttagtagatcaatttccttaaccgaatatagcaagaatccgacaactgacgacttggcaactctcatcggctaatctcaagacttcgaagccaatgctgactctaagccgatgactactctgggcttaccaaatttcactgttaacacaaccccagcatatgtcgcacatatgcaaatggattacatgagaagcaaactcactaagcacatgaaccccaagcttttctatgtacatgaattgaatagaagcaacgaactaagctatatggaagtcttacagatttgtccactaacccattattaacatcttctcttgaataagtgtgtctgagnnnttnnnnnnnnnngnnggttnncagcnggntgtncatcaaaacgcgggggggggggagganggatattgttcataatcatcatgaacangagacgncaatcaatgatcaagcgatgagtagcnnatgcatcaaaattcaatatccttcatctgttggt

SEQ ID NO: 14741 - DNA, 3929 bp, Oryza sativa
  unsure (1)..(3929): unsure at all n locations
aaggattgaataccttgactacctgcttgcacgtcgactctagaggatccccaagtgagtgtctttattttactgtgaagatcaaaggcacctctaaaagtcaatacttagtatatgtgctatgacaagctntatatggtggtgttctgatatcctactatatgctcattctgttgtatatattaccttggcttgcatatttcaatttgctactttataccctaacttctatgctatatgatacaaactccattttaagggagttttcaattacaagcatgaaaggaggttatcggcgggtgttccagcggcctattgattttgagtggtatgccttatcccattgacttttcacttcattagatgaccaaaatcatcaccttttctttcgtataaattctagccctgttccactaaaaaatgctttggtgtgactgtagggaactcatgacttatacagatgacacagcatctttagcagaaactgatttggatgttctgtccagaaacaaacctacaaaagccaaggaagtaaatgagactatatctagcgcgatttcaaatgctcaatcacatgattccaaggtggcaggaccattggatagctctatgccaggtagtgaaactggcttagtagaggaaaagtctgtcggtagctcagatatgttagcaaggaaattggccataaaattagcatttactctaccagcatcctcctatgctacaatggctattagggagttgctgaagacttcaacctcggtatgtttctcaactaatattatattactattcttttactagaatttaaatgatgttaaatggactctgtttatggtgttatgcatagttaagaatgcatgcctacttgagaattcaaatacatttaattatggcagttgcccaacagtattgttaatattttaggacgtcaggagaaaatattgctgaatatttcaatatatatgctattgctctaacatgttaacaaataacaacattcatttcataattaccttctgctcgtctgcaggtcacgtatcagaaaacactcgattgttaattttgttattgacatcaattctttatggggaatcttccaagccgcatcttagaggagttgacatagttaagcaacatgagttggtatggtgtttgaattgtgtttgtgtaatttttatcgcgtggcactaagttattaacttataaatcctgatctgattattgcagtattgcatttaacagcccaaatgaatcggcattgagatataccatgctgctcggcctgctcccgttcggtgcatactgaattgctgatgcacgtttgtgctattgtgggggttaaaaacttgttttgccactagaatatgtggcatgccataatattgtatgaacttttgtaaccaaacagggatattaaagttgagaacccttgcgaggtttccttcttgtctgggttttgaatttttatatgctgtgtttgttgatcggagctcaattatcgtaatatcgggcaacaaaatcagtttgaatttgtgtcttgcacatgcggccggctggcaactggacggcagctgggctgcacatttgacgcagcctgacggtgatgagcagctgggcggctgacttgaggctgcaacacgacacgacgcctggtccagtgtggtaccccaattccactagccctatctggaatacgaaaacggcagcacctcctcgaacataagggttggtagaataagcctacaacaactggtgctcacagtgagccccagaggggtttataccttggaagtacaagaaaataattgatgtatggcaaccaaatacaaccacaacacacagatgtacaccctgtaggtgcataactcatttattattataaccggttaccaaagttcgcatctgctgctagctctctacaaagaaaagatgacggaaatttgggatacaactcagtatacaagaagagcctaagatcctgcacattttcaaccgaccagcaggacatgcatagcctaaatggattgatgatccaatggtgtctccaatctcagcctccaaaacaacactaaggtgacaaatggcatgccctaagtcaggttctggatcttgcgtttcagccacagggcccggacgtcaccgttaagcgagatgaatatttcccggttccccgcctggaggaacacatcgggggcaaccgatttctccacctgagatagctcggccatgccgttgaggatctggacgcatctcgatatgctgtagctgtcctctggcttggccaactgccagtcgtgattcgagttcttgtactcccctgagtcgtcgatcacccggtcgttgctctgcctcttggagcaatgccatgagcggggctgccactgcgatatcgcctgcgggaacatgtgtgtatctctgttcgtggctctgatatgcgggggagtttgctggaaggaggactcttttgagattggtgactgcaggcgaggtgaacgttccacgataaagtcttgttcatcctcactgtggtccaggtctgcgccagtgtataaaaagcgcttactttcttctgccattatgccttctgcgcaagggaaggggtattaatcagtatacaggtccagacattccgatccattaagataagggatgattagaaactcaagaattgtttgcaaaaatatatatgagaaatcagaagcatatctttagtaccatttttcccgaaaggattcctgcagtcctcacatcggcaaaacaaagagcaaccagtcccatcctgtacataagaatttagttgagaatatttttcaccaaatgtttagcagagagcttgaattaagaccaaacctggtagcaatcacagtatttctttaggcaacttgatttcttgcaattgcaacctcgcctaggcggagttgaagaagaagaatgatgagcatcttcctgtaaatgagaacacattgaaattactactacaaaccaaaggaaagatcaaatactgtagcaccagctttttcagttaagaaaacaaccacagcttccgcatttgcctcagatcttcgattaattttcagtgacatccgtttctgccgtgaaagaagcaccttgcgagtggtctgaactgtttctgcatataaggccttgttgaagcatggttggcatccacacttttcagaacaataacctccaccagcaaagcatgggcaatagctgcataagcaaacgcttcaatatcagtcttagttcatgaaagcacaagcaaccaaacagacatagagatccaaatcaatttaaacttatcatatattcgtactgatggcgttttgctatccataatatttgcagtaggaagaaaaacagcttcttgataacatagaagaactatggcttccatagtagcttttgtaggctgatcgcaaagttgtaagctttccgccattagttgcacatatcaaaggagtactagaggtaacatacaatgggaaatcatactaataatcaaaaggtataaacatataatattataacagagcatgggattccaattatttattcaatttaaacacattacacaccacatggagcactcaaattacacatactaagagaatagaaccgcaatccattcaaatagctgtactatagaacccaacaacaaaggggtttttgaactacgagcaatatatctagtcagaggggatcatacccgtaaaacgtcgcgcaaatccctatctctattatccactaaccaaaatggatgcacatagctgcgaaaatcgcatggtaccaaacatttccatttcctctcccctttttttcactaaaatgtctaaaccttcccagaatcgtatgaaacagagaactacaaaaatcaaaaaggatcagaggtttcttacagcttcaagcatctcgacttcttgcag

SEQ ID NO: 14742 - DNA, 1243 bp, Oryza sativa
gaagttctggtattatgctcacggtgaacgctcaacccagctgatggctcactggtctttttcgatcagatacgagaggctgcgcgacgactaacaaatgcagtggaagcctcctctcagggcacgttccgaccagacagagatagggacgagctgacactcgccctgcagactccagagcatccaggacgaacacgagggaaaggggtgattccttggaagattggtttcaaggaggacatccacacgtacaggagtcggatgaggagcaagagagataccgaggcgaaaattgcagacctagagttccgggtatcgagctacgaactcaacatgcaagaggaggtggcaaggaaggttgatgaacgcatggccgcacatcggtcccatgatccccagccgaccattcctcctgcaatggtgagcccgtcaggaaaccgtagcagctgcgcctcaacggggcaggtaggatcacagagcatggacgccatgcaaacacaggacgaatcgacctgtcccgttgatgacatcactcagcggacaccatgtgagctgcatattcctttcaagaacttatcaataaaggtaagatttagccattccgctagttgctgcttatatatgttgattactaataaataatctctcacaacatgaaggtggcgtcgggcatggccatcccaacggacccttcaggtacttaccactgcaggccgattccagcaggatactcgaaggtcgaagttgagttggtcgaaggcgcgtacgaggacctcgagctggattaccctggaggagacggtgagacgcatctacgagacacatgccatgccattattctatggcgcaggcggtacatcatcctccctgggcgacaagcggcgtctcgtgccccatctcctccggctccgccatctcctcctcaggatcctgcaccgtctcctcctcatgctccgccagcaccgtctccacctcaggctccagcatcgactcctcctcaggatcctgcaccgactcctcctcgtgctcctacacctactcccctgcaagctcctcttccggcaccttcaaagtcaagggcccccccagctccaccgcctgcccacacaagggcaacgaagaaggcgaaagttgacgccgccaagaacaaggacccggggtacgattgcacgcaagaggagcttgacgcttacctcctgctggccgagactgacgagccggcgagccgccctgcccccggccg

SEQ ID NO: 14743 - DNA, 2745 bp, Oryza sativa
gggaaaaaaaaaggttttttttgggaaaatttttttttttaaggccacatgtttaactatttatcttatcaaaaaacttttgtgaaatatataaacttatatgtatacataaaggtatatttaacaatgaatcggatgattagaaaagaattaataattatttaattttttttaataagacgaacggtcaaatatgttttaaagtcacggcgtcaaatgttagcgacggagcgagtaagaattttggtaaaagaatcgaagatcattcagttcactgatggaagctgccattgcccattgcgtgcaggggtggctcaactgagagcgagaaggggtgagagggtgaggtgcggctactcctccagggacggcaaggaggcgacgcccgccgccgccgtgaaaggcgcgacgtcgatgctcgcggcggcggtgacggcgtcgtcgtcgtcggcgccggcgacgatggcgctggtggacgagcggatgtcgacggaggggaccgggctgagcctggggctgagcaacaacctgctggggtggatcctcctcggcgtgttcggcctcatctggtcgctctacaccgtctacacctccacgctcgacgacgacgacgagtccggcggcctctccctctgaggccttgttcggttaatccgagaaagagattggagaggggattgagagaataattctacactataataggagtaaaataaatcctctctaaatcctccgctcgcgcgttactcgacacgaggcggcagttaattattttgcattcttagttggtgtagagaccaattgaagttaccacttcgatgagtccgtctactgatcctgcctctatctttttttttttttactgttctgcaaataggcggggcctgcctatgcttgagtgtgcatgtcgaatttggtgtaattaattggagacgtgcatggatattttgtaactaattaagttggtgtttaccttgagtagtagctggctaagtttttcatgaaagtttcaagccagttatgcgttccactatatatagaaaaggttgccacatgcatattcctcttcttttgcttggatactagatgatgaaaggaatggtacacctgcagttgcaaggatggttcccaggttaattgctttcaactctctgtaaagttaaatataaaccagcactaataatgttatgaaataaattaagcaacaacacgaaaaaaaaaagaactagcactatgttcaattgctgcagctaaattgctaatggtataaaactgtcgatgtgtttgtcatgcctagagatcactagaggtttggattggctcaacactgacaaaaaaaaattgacaatttgacccatttccgaaaacttatttcgcaaatgaaccgcgcctaaaattacttatttcaaaaatgaaccggaggttcaacgccaaatgctccggcgttgagcttagccacctcagtgccaggtcaaccagtgctaaatgtcgtgtcaccgtggatggcaggccgactcggtgtgccgacgtgtcaaagtttagcgccacctgactcggcgctgaggtgtctaagctcagcgtcattcaatctggcgctgagcttcgagacattaaggcccacctgccccggccgagagagcgagctctctcatttctctcccttccccgctccatgaaaactacgacggcgatggcggcgttcctctccgagccctaatccccctctaacccatgggaaatcaaggggatttggaggggatttcatgtggaggttgtggagtaaggtaaccttctcaaaatcctcctatattttcttcatttggtgatttgttttggagaagagcatgaaccctaggtttgtcgtttttgtgagacaaggaagatcgacttcatttatcggttaggtgagttctataggttaattttgaggggatttcattcatcggtactgaaccctagttggtaggatggatttggtaggttccaatgtagggtttgggaagaatttttattctcattggcgatgtagtatgtagtgaatcgaatgaatgtgatggtatgaagtttgtgccacattgtctagtttggtttacttgtgtaagttagtcttttagtacccttgtcgttgtttaattgaaatagatgtactaatagtattacttactttgaaaggtggtcggactttgtagatggagagagttgttcatgtgcactatggtggaagtgtcctagagtcgagtaatggtggtagtcagttcgatgggatgtcggtgaagatgattgtttttcaatctaagcctaccttcgaggagcttttgtgtcgtacgaaggatattctgggttggtcggacaaggtggtatccattcaagatagatatgatatggggggagagcctatttcacataagcaaatgctagagttgaatggagagaccgaatgggaggcatatgttgagatagtgaaggaatcacggttcactatgtgcacttagttgtcgtggaactacgaacctattttgttaaatgtgcttctgcttggaaactgggttgggatgcttctgcatgggtgtaggggatggtttaaaagttaaatgctaaattcttgatataccttcttcactctcttggcgagcttttgcctacttgccgatgatgcgtgatgtggagaacggcaacacctggtctgtgctctggagagcacctttcccttgcgctggggtggtgggggttcaagctgccccgttc

SEQ ID NO: 14744 - DNA, 678 bp, Oryza sativa
gctccacgacacgagccccaagttcggctggtcgccacgccacccatctccatcttcgcccacgcacccgcacggtcgcacgcacgcacgcgccaatgtcgtggctcgcgcgctccatcgcggcgacgctctcctcgccgcgcggcgagccggaccccgacgccgacgagcccgaccacgccggcgacagggcgtcctccccgcagggttcctccccgcgtgaccccgactccgacgaggccgagcagcccgacaccccgagccgccgcggcgtcaaggacgacatctccgagctcaccgagaccctcacccgccggctctggggcgtggcctctttcctcgcgcccccgcccccgcgggagtcctccaccccgcacggggaggaggagtagtagggtagggatggggaagaggagtcagcgcagtcgccgcggatcgcggggatccggagcgatctgacggagattggggggagggtgaggagcggcatctcgatgctgcagagcaacaaggcggtggcggagatatccaagatcgcgtcctccctcctgccatttgggcagggggatgcggacgagggggagcccgtggctggcgtcactgaggaggttgtggtgttcgtgcggcacatctcgaccaggcccgagacttggctcgatttcccactgttcatcagtg

SEQ ID NO: 14745 - DNA, 2293 bp, Oryza sativa
  unsure (1)..(2293): unsure at all n locations
cccctcaccgcgccatgtgctcggtggactcggtagatcgtgcaccgacccccaagtgccactgacagtgggccctacgaggaatattcttccagaatattcctttccattaaaaagaaactctttttcctttcgttctgaaattaacttgaacttcataaatagatatcttgcaaacggtaactccgtttgactccgttcaactctcaaaatctctataaaaatgagatctatctattggcaatattatcgcctactattttaggtactttagtggcttttgtgttgatttactcctttttgcgtgtagttgccaagcctgaggacgatccgtaagccattcttgatgaggaagaaccacgcaggaccaaggcaaaccacctttggccatattgcttcctatatgtacaaaattatgttgtttggaaatatgcatgcttagattacacgttaaactgtttggtctcggtttgcgaatgcaaccgacggactcacctattagtcgcacttgaatctagtaggatattgaagtaacatgtcctggacagctccacagataatgcgtcggtaacttaccatacaagtatgatcactgaggtagttttgcttagctatgctgcgattgcattgtcgtatggggaaacatgggtttccaaccaaatattcaaaacccgagattttattttggtgtgtttgataaatgaaactggattatgaacctggatgatatgtaggctgaacctgtgtgattggctatgtattgttgttaaggaccgattcatttgggaattccatccaagcatcttgtagtacttagtttgtttgtgcctaccttgtgtgtcagtggttggggacaacggggatgaggagacggagttttgtgttgtgagattttgaccattcatggcaatcgtctctattgtgctgcttacggtacaaataggtgtaggagcatccttgactccttgttgtaccccgagtagacgatggctagccagcctgatgcttgacgtgcgattcaactaactatgtggcatggggttttcatgaactagatttagaaaggccttgccacaaacttgtggtgtcgacgggtgaccggtggtagtttcgtgccatgtgggtaaagcgtacaacctatgtggagtgtaaactgttcgaacagctgtgcttacggtcaagggcgaatgtgaggtgattttcttagcgtagcactgattttgaaagctttttgaaattggtttgtgggatgggccggaatcgttccagagccggtctgtgtggcagacggagaacctgagtggtttcaaacaggtggggtgtcttgtggcaccatagtggagctggaatagttggttaagatgtgttgcgagatgagatggctccgcggttcctagctataagcagtactccctccgtcccattttaagtgcaacaatagttttccgtacctaattttgaccttccgtcttatttaaaaattttttgaaaaaagttaaaaacataagttatgagtaaagtactattcatattttattatcttataacaacaaaaatactaattataaaaattttttaaaaaagacggacgatcaaagttagacgcggaaacttatggttgcacttaaaatgggacggagagagtaagaacttggcagctgatcgagctacgcgtggtggcagagtgagccggactgacaaatccatatattaattgtttataaacacactagctagatgccagagtttgctgtggaaaaaataaactactagaaacaaaatgtatagatatctgaattgactcgcccgttcactgccagaaaattgcctaccgtgaaaggtgggcacagacacatgccctgtttaaatcccacctaaaatttttcactctgtcaaatcgaacgtttaaatagctgcatgaagtattaaatataggcttaaaaaattacacagattgtgactaattatttgcgagatgaaccttttaaaccaaaatgctccttgatttgataatgtggtgctacacaaaacatttgctaataacggattaattaggcttattttcacgtgcggtccacttaagaggcccgcacgtgaaaatcgatttttccgtacggtcctcttaaggagccgcagatgaaaatggagaatgatttccgcagaccgcaatctaaagagctccttgtacagaaaaaaatcgttttatagtagtgcaaccgcccacccaagcttcaactcaagactcacttctaanngcagcnacatagagatacaaaggagatggttgagaatt

SEQ ID NO: 14746 - DNA, 836 bp, Oryza sativa
  unsure (1)..(836): unsure at all n locations
ctatcagctcaagaggccaccacaatgacatgntgcagacggcagacctggtatttgttaccacctgttactatactatatatgttaataccagtataccagtcagtgagtaaaacggcacatgaccactacatgacaacccaaaatgtacaattgcaattatttacattttagtgtcttggagatgctgtcccacctcctaaatctccacccctatattcatctttactatacattgaaacaagaaactcaatctcctactccctccgtcccaaaaaaaggcaaactctgggtttccgtgtctaacgttgactgtccgtcttatatgaaatttttttataattcgtattttcattgttgttagatgataaaacatgattaatattttatgcgtgacttgtctttttaatttttttcataattttttcaaataagatggacggtcaaacgtttggcacggaaattaggatttgtctttttttgggacggagggagtatgtacatttcagacataccatggctcattgtcagtgacccctcgattccggtgcaggtacatcagtcatcgatggacgcagcctcgtcgctcctggtgactgccctcaacgaagggagggatgtgatcatggacggcaccatgtcgtgggagccgtttgtccagcagacgatcaccatggccagggctgtgcaccggcaacggtaccgcatgggtgttggctacaaggtcacggaggacgggtcaatcacttgaggagtacctgggacccagtttganggacttccccagtttccccaccgaaatattttgtgttaaaaagggggaaaaaaaaggaggg

SEQ ID NO: 14747 - DNA, 1506 bp, Oryza sativa
aacaaagaggtataagcacaaaatttgacacggttaatcacattgtcaggagagctgtgatcaccgggagagcagtgagggtgaagtcccagctgaagtcccacaagcggttcgccaccgcgttccacagctactgcaacctcgtcgacaatgcgaggctctactgcaccaactccacgggcgccgccaaggtgagcttaccaatgcattccgtgttcggttaccgatgttgttatcggggccggttttataacatcaggcacattgagaaatgagaattcaccatcgctcgctggctctctctacagctgataggatggaaggacggcgagagcaaccttctagtggaccctgaagaaatcggctgcttggagagggtgagccacctcaacgacgaggccgactgcgtccacgagatctatccggacggctcggcggcggcggcctgggaggccctggtcacgtcgccgtcgagggcgccggcgcagcgggagatcatggcggcggtccagaggagcgaggcgcgcttccggaccacgtccacgccctcgtagctgcagcacacgatcactcgtgtcaggttggaattttcttttcttttgacacgatttcaggtaggattgggggtatttgggtgttggttgtgtgtggtggctgccaaatggctcgtgggacacagttcgtgttatgtacgtatcatactgtacattgtatcaactgatcctgactccgttaccacccggcatattgtttcgttttgccgggcgatcgagctgcatcgaatggagctcgtcggagtcatcggtcatgtacacatgtgtcttgtacgatgtattccggatctagacaagaaacaacacatacttttcatggtcacttcagtgaaagcactgatgaaaaaaactcaatgacacttcccatcgaaacacttgtgtcaagatatatagtttgttcgttgagccaatgtccatgttggcatgtcggacgccgtgcaacctcctggcacatatatatactactacgttctgatactctgattggtacatgctcacctggttggctggttcttcaggatttggatctgtggtcctgtacctgacacccaccgttacatttctgaatctaagatagtggcaggagttgcacttcaccggtgcaaacgcccgcttacttttcaacggaaatctaccgcgtccaggtggcggacgcccattcgctcagaggtgatagaccacgacaccacgccacgcatggataaccagaccagaagaactaaacacgattcgcgagccacactcctgctgtcactcgttgcatctcacctagagaccagcagagtgtagtgtgctgtgtgcctcttgctagctaagcaaggagatagccggagccatggcgaccatcgccgctgccgccgccgcccgcaccgccgtcgttggccggccgtcaggtaagttcacaaagctatcaacagtgctatagtatacttcctgtgtccctaaatattga

SEQ ID NO: 14748 - DNA, 521 bp, Oryza sativa
gctcggtacccggtcgaacaccctgcgcagccgcagcgcgttcaggctgccgttccggaggcggaacgacggcgagggctttcctcgacagcgacggctttgcggcgacgccagctgcgtccatctcgcgcgcttcccctggcgattacacttgtcttctcgaggggtttattaggctgtgtgaacttatttctgatcgaggcgcgtaaaacgtatatgatggcgtagagagttgcccgggttcttatagacgacgaaagtgacccaaaaaaaaaagagagaacatgtcgtcgttatcacgttattactgtatattagtattaagcaaagttcaatggactggaattctgctagaccaaattgaaagaaattaattatgttcggacacacttatctaacacaagttggctgtacgatcaatcagatatatatccacgtcaacaaactcttccaacatgcagcccactttttatttttttgacaggcgagagaggtttggcaggattgtcccaaaaatgcca

SEQ ID NO: 14749 - DNA, 618 bp, Oryza sativa
gagctcggtacccttctagcttgaattattatagtttttccctggaaagatacatctaatagacattactatcctgtaacaatgtttccattgcgcagattcatcaggatgatctcaaaaaaaatgttatactccagttgcttgctcttgttgctaagcaaccagcttttcaccaattacgttcagttgagcaacttggctacataacactgcttagacaaaagtacgtacaaccttcacgtaattgataggatgtacagtggtctttttgccttggttggcaagaatggtgttctatatgtagactatgcaattcctgtaaaatcattgacactgatcctgtttacccagaaatgattcaagtgtccgtggtttgcaatttataatccagtcaaccgtgaaggtagatatatttctcaatgcagtttcaaacccgctgaaacaatcattctcctattctaatatattgatttgacaggatccagccaacttggatgctagagttgaagctttccttaccatgtttgaaggaactctataccaaatgcctgatacagaattcaaggttggacagatgatgtcactgactcactgttaatcattggcttctattacagc

SEQ ID NO: 14750 - DNA, 615 bp, Oryza sativa
agggcgaattcgagctcggtaccctatgagcaagattcatgtgacattaaggaaacttactgatatatctcctaagtatggcttcaaagtttttaggagcaaatcttccttttataaccaatctttgttgcccatcaagggatccacttgttcccatctcagcaagtaaaaacatcatcacatgttcaggttgcctatgcattctggaagtgtaaacgatgatttcagttagctcatggtaatttatcttctctgaaataaaagcaggcctagagcatatggtatggagtggtaaaaaagtgagatcatacgttttgcacaaatccatgaagttcacaaaaactgtcttctttgtgccttccctaagaacttgaggaggcctcataacagttcttcgtctatcaccagcaagatcaggattattctcacgcaggatattaaatactctgccaagcagctgtcaccaaatagattgaaagggttcattaacagaaacacaattgaatactagttgaagctgagctgagcactacatgagatactaataccatatcaatagcaacaaaaacataagaagatcaaaataaaaaaaaatacttaaaagggagcaatgct

SEQ ID NO: 14751 - DNA, 694 bp, Oryza sativa
tttggttggtgtttgcttcttcttctcctgaagagcacaaaattaaatgtgttatgagaaactttaactgatgatgagtagttcaagatgaagaggccgaccacatgattggcatttggcaacatggtaaagataaaaaaaaaagtagaggaaatcaagtactgaactcattttataagccataatcagagagaaatcagaaaacatgtatgcagatccttactacctagatagcactctattaacttgaaataacatccaccacagaaattaaacacctagagttattaagaatgttgatctatatcattaatgataacagaagaacaaaaaggaaatctcaatcttcatttcggaaaatgaaagcaccttagaaccagaaggtatgagaccaaccatgccaggcaacggtatcaggctcattctgtgatcctcaattaccttcaagtagggaacaaaaccacaaatcagaatgctttaaaattacggtaatgtaagatagccaatgaaggactgcagtacttcacctgcacttttctagttttgatcatggacttttgtgtcctttcacggcataactttccatagttcaccaaattatcactgtgaggcttcatgtcaaatttatgctcgacttttccttcacatgaaagtttccctacaacacacaaggtcatctttgggtgatagtcaa

SEQ ID NO: 14752 - DNA, 564 bp, Oryza sativa
tagtatcttgttgagcggcgtgctcgagacatctggccatgttttatggtcgtaattatccaactaaaatgcgactgaatggtgggctgtggatgcatggttttgcgagtgcacccatagcaattaaggaccggttcacgggaaaccctggaagacttacagcgcttgccacaagcgggaatgggtaactgcttgatctgaagtatagctcgaccctttcctaggcaccggtggcgagggtgggcgtgatggagttgggtcggccggggtgtccggttgtccagctgccggattcaccgcggcgcaagaggggaccgcccactgccttttgaggggtgggggtgaaaccttaacttggtgtggatggttaggggagggttatgcaaagggtttcgtcacaatcactcaacatggtgacgtgtgcatcatgggcacatgatgacaccgtgacatgtccgtgggttgtgtcttgtgggtacagttgtgcacctctggccagagtaaaactattcaatagccgtgcccgcggttttgggccatcgaccagattcaccgtgattagtc

SEQ ID NO: 14753 - DNA, 659 bp, Oryza sativa
ccgccgaaagttaacggtttgcccaggctcacaactgaaagactttctacggtgtgcgcgtgcgatgcgcgtagaagactgatttatcaacctgtctttatatcaggattcattacctgactatttgtgggtaaagttcgtagtgcgctgatcgtgcaaaatgattttagttgggaacagttcgcaactctgtcccataaaaatcagcatattcccatctatcccatatccagcgcattgaccatcgggatactgaagggagattccatcatctcttagaaagatcaccatctcttttgtttcaatttgcatatagctacctggaggatttatgaatacaaggattttcatggactattaccatgagattgattttccatctttattcgcgagagcagtggaaagcgatgacgatgtgggtactacattgcgcattcacctactttgtgagcgcatggtcgaagcatggatatgcgcatgctgtgactgccaagatctctttggaagagataaaaacaaacttttaatcgaatgtaatactaaaatatccatggcgggaaacctgggaatccccccggaacttatgaaatcacttaaaaccatcaactcaatgcgtaatgaccctgcacacaatccatcaatacaaagcatttgttgtt

SEQ ID NO: 14754 - DNA, 4362 bp, Oryza sativa
  unsure (1)..(4362): unsure at all n locations
atgataggacaaccatatgaaggagctgatcagactcctgcagcatcaggagtaaactatacttctcctgtggccacaaaagggcaagagcgccaatataatgaggaaaatgtggaagtggtgaacattgacttgtcttccaatttcttgaccggcggaattcctgaagacatagtctctcttggtggattagtaaatctaaatctatcaaggaatcacttgagtggacaaattccatataagattggggccatgagaatgttggcatcgcttgacctatcagagaacaagctctatggcgaaatcccagcaagcctatccagtttgacatttctaagttatttgaacttgtcatataatagtctcacaggaaggataccatcagggtcacaacttgagaccatctacaatcaacaccctgacatatacaatggcaacagtggtctctgcgggccgccacttcaaaagaattgttcgagtaataatgtaccaaagcaaggtcatatggaaagaactggacaaggtttccacatagaaccgttcttctttggacttgtaatgggactcatagttggtttatggttggttttctgtacactattgttcaagaaatcatggagggttgcctacttccgcttcttcgataagatgtatgataaagcatacgtgcttgtggtcgttggttgggcaaggcttaccagaaagactgcaacaatttgaggttactaccaagaagctgatgtggttataacatcttgcacggcgcatggcatttcttttctgaatgagatactataagtattattccagtttgtatctctacgagaggggagaaaaccaagaattttaagatgccgatgtctttattatgttttgcaaaaagatgtcaaccattggtcttcttcgaacacatgagcctttgtagcatttgtaaactgctttcctaatttttcccactgtaacatgttccccaagcatggttaaaatcttgagtacttgcctacataagacttatatagttaacttatatatgttgtcatcttttgggggaaattatcaagttggacagccaatgattaatagtagctttagctgctgatggagaaagggatttcaaagattcaggcactttttgctaatttcaaatacttcagcatttcacatgtatgcccatagatttattaattagcttccttttgggagatattaattagcttcctcagctcggtagcctttcaaatctcaaacaccttgacctcggtttcatatcgaatatgtgcacaacagatatctcatggttaacccgtctgcataagctggagtacattgacatgagctttataaatctcagcacaataactgattggcctcttgtggtaaacatgattccatcccttaaggttctcagcctgtacaattgctcacacacacacacataaacctcacaaaacttgagcaccttggtctatcaaggaactactttggccatccaattgcttcaagttggttttggaaagtaagaaccataaaggaacttggtcttagtgaaacctatcttcatggtccatttcctgatgcactagggggaatcacatccctccaacagctagattttaccaataatggtaatgcagccacaatgacaataaacttgaaaaacctttgtgaattggcagcactatggcttgatgggagtctatcgtctgggaacataacagagtttgtggaaaagttaccgcgatgttctagtccattgaatatattgagtttgcaaggcaataacatgaccggaatgctgccggatgtgatggggcacataaacaacttatccatccttgatctttctaacaacagcattagtggatctataccaagggggatacaaaatctgactcagttgatttcacttactcttagttctaaccaactcactggacacataccagtgctaccaacaagcctcacaaatttcgacgtcgccatgaacttcttgtcaggaaatttgccgtcacaatttggcgctccatttcttagagtaattatcctatcgtacaatcgcattacgggtcaaattccgggatctatttgcatgttgcaaaacatttttatgttggatttatcaaataattttcttgagggagaacttccccgctgttttacaatgccaaacttatttttcttactcctaagtaacaacagattttctggagagtttccattatgcatccaatacacatggtcattggctttcatagatctttcacggaacaagttctatggagcattacctgtgtggattggagacttggagaatttgcgatttcttcagctaagtcacaacatgttccatggaaatattccagtaaatatagcaaatcttggcagtcttcaatacttgaatttagcagcaaataacatgtcaggatcaattccctcgactttggtaaacttaaaagcaatgacactacatccgacgagaattgatgttggttggtacgaatctttaacgtattatgtcctactcacagatattctgtcgctagtgatgaaacatcaagaacttaactatcatgcagaaggaagttttgatctggtgggcattgacttgtcacaaaaccaattaactggtggaattccagatcaagtaacttgtctcgatggattggtgaatttaaatttatcatcgaatcacttgaaagggaaaattccagacaatgtcggggacatgaaatcagtagaatcacttgatttctcaagaaacaatctttctggtgaaatcccactgagcttatccgacttgacatatttaagctccttggatttgtcacataacaaatttgttggaagaataccacggggaagtcaacttgacaccctatatgcaaacaacccatccatgtatgatggcaacagtggtctatgtggacctcctcttaaaggaattgttcaagcgttaatgcaccaaagcatgggaaacaaaacataagtgtggaggatactgaggctgtgatgttcttttattttgggcttgtgtcagggtttgtgattggtctctgggtggtgttctgcgccatatagttcaaaagatcatgaaaagttgcttattttccaccaaggcggcaacttatacgacaaagcgtattgttttgcacctgttacttgggccagggtaaataggcaggcaactgcaaattaagcacttcaaatcatatgcttgttctgcttcctacaactgacaggtttactggtatgaatgaataaatgaaggtggaaaagcactcaaaagaaaaaggcattctggaaacctttggttcctgtggtagtggtgtgacagtcaatgttgtctgatagttgattaattttctgcccaccactaaccatatgtaatgtagtccaccatggtataatttgtatcatcagttgtggatgagcttggttagttctttgtcagattcantgtgtttgtgttaatcggtcttactttcagagattccctaaactgtaaggggattctcagccatagtagtatatacccgggatcaatattttcagagaaagcacccccactcaccaaaatttatctgaatcatgatttgggtccggttcattcacccattcttcaatttagctgtctagtatcatctcattgctttactgcacgcatatgcatataatagattaatcttaccggaaactaattttgtttccttgaactgaccattctcaccacaaaagcagagcaaaacagaggacaaaacaggggataagaggaaaggaggggaggtatcaccagtttgctccaagaggacaaggcttcttcaagttcttcgccgtcgccgcctgcatgcaggagcggatttgatcccgctccgcatccggggtagggtggccgcgccatgcgctccacgattctcctcgccgaatcgaaggcaaccacgcgggaagagatgagttcctcctaagtcaacaccgcgagcgcggccgccaccgctgccgttggccaaaacgcggccacngcngttgccctctccttcccttttctccgtaccggtaataggagtatgagataacccaagggcctatataaaaaaatctcaatctttgcgcggtttcacacctgtttttaccttgcatctttttattaagtgacgatttcagagctgtttttagcgctcgattaagcttcctgtcttgtaaagtcaaactgtatagaatgtttaaattggtgggagcaataatgtaacagcaaaattgaatggagtagttattatgttagtgctcgttgttgctgtactgctgatgtataggggatcctctagagtcgacgtgcaggcatgaaagagtagatctatataagcacgc

SEQ ID NO: 14755 - DNA, 1646 bp, Oryza sativa
aacaacctaagtggttcagatggccacattccagggttcataggatcttttaggaacttgagatatctgaacctctctggcatgccgttcatcggcgtggtgccgcctcagcttggtaacctctcaaagctgcaatttcttgacctctcatcttgcatagggctagaaatgcagtcaagatcaggcatgacatggttaaggaacatacctttgctacagtatctcaaccttaattcggtagacctcagcgcagttgataattggcttcatgtgatgaaccagcttccttccttaagggttcttaatctctctaattgctcacttcaaagagcagaccaaaagctgactcaccttcacaataacttcacccggctcgagagacttgatctctccgggaaccagtttaatcatcctgctgcttcttgttggttttggaacattacaagcctcaaggacctcatactttctgggaacagattatatggccaactccctgatgcactggcagatatgacatccctccaggtcctcgatttttcgattaatcgtcctgtacctatctcaccaataggtctgcttccatccagccaagcacccccttcctccggtgacgatgatgccgccatcgaaggcatcactatcatggctgagaacttgagaaatctatgcagtttagaaatcctggacctcacacagagtctctcatctggaaacataactgagttaattgataatttggcgaaatgcccggccagcaaactgcagcaattgattttgaaatacaacaatatcacaggcatcctgccaatatcaatgggagtgttttccagtttagtataccttgacctctcacaaaactatctcacaggacaactgccttctgagataggcatgcttagaaatctgacatggatggacttaagctacaatggcctggttcatttgcctcctgagataggtatgctcacaaatttggcctatatcgacctaggccacaacaacttttctcatctgccttctgagataggtatgctctcaaatctaggatatttggacctaagcttcaacaacctagatggagtcatcacagagaaacactttgcgcatctagcaagcttggagtcgatatatttgccttataattccttggagattgtggttgatcctgaatggttacctcccttcagactaaagtatgcatatttttattgttgtcaaatgggccccatgtttcctaaatggctccaaacacaagttgatattattgaacttgacatagcaaacacaagtataaaagatacctttccagaatggttctggacaacagtttcaaaggccacatatttggacatctccaacaatcaaatccgtggtggattgccaacaaatatggaaaccatgttgtggagacattttatctggattcaaacctaataactggtgaaatacctgaattgccaataaacctcgaaacactggacatctccaacaattacctatcaggacctttgccattcaacattggagctccaaatcttgctcacctgaatctctactccaaccaaatcagtggacatattccaggatatttatgcaacttgggagctttggaggccttggacctaggtaacaatcgtttcgaggga

SEQ ID NO: 14756 - DNA, 2177 bp, Oryza sativa
agatggtccccttttctttttcttttttcctttattttctcccgaatcaagtaggcaaatcccaaatcaatccccaaatcaaagtaacatcccaaattcacatcatcatatccacatcccaaatcataaagttacttatacaaacaaatcaaatacatcataatatcctaaaaaattactcaaatacaacacagatctaaacaatgaatcacaaatatgtacatctcagtgaatcacaaatttgaaaaaaaaaagaaaaaacaatgtcgctgccgccgctcgccacgactgccgggcgcccccctccccccagcgcctgccgggaaggaggggggaggaggaaggggaggaaggggaggagttgaaggagagcggatgtggaagagagttagagaggatagatctgaggagagggggagatattcgtctgcccaagttgtaactgtggaggagaggataagtgatagggattatatactacgtgttcaattttagtcccggttggtattaccaaccggtataccaaccgggactgaagatcctcggcctcctgaaatacatctgacaagggatgaaccgggactaaagatcaaaatttttataaccgggactaaaaactatctttagtctcggttctttttggaaccgggactattgtggattttgccagaccgatcaaagatggtttctccaccagtgtaatttaatttgtgggcgttgcttagagaagggtcattctttgtctgtttgtgttgggccctttcggtgccgaatttgtaagagttcgggtcatgcggcctgtttctgtagctcaaagaaatctccctctgagggtaaattgccaaagtctgtttctaccccccccctcgcattaatgcagatgctacggtcctaaactcccggggtaattgcaatcttgtttggagacctaaaaagctagcgctggttatctcgtagccttctcgccttctccaatctactgttgagaatattgttcaagcctccccagcccaaagttccttgccaatggcggacctcaaccctaaccctcatcgtttcctcaatcaaggtcacattgtgcatttgggaggaaatttgcgtgtccctagagttgatctcaccatccctcaaaggcatgttcgtcattatgaagagttttgtgttgctttggtggagccgccggtgtcggagcaagattgggatcaccaccgcatgctgattcttcatcacattcttgatgagcatctttttgaggtcagaaacagctaccgtcatgcttctgcggtgggtatgtatcaactccgttctgctatgcatagagatgccctggtccatagtgagccatttgtttatgatggagtgctttcggtaacttttgtgaagcatgatcaaggcccaaattggagagcatctcagtgccatagagagggttggttccttttcttggttttcccccttgactttgttgattggtaccatctaaaccttgctacggctacatttggccaactttctttttggcttgaaagggatcagatcaaggggagagttctgataagggctaagtttaaggataatgattttgtgcctcgaaaaattgttttgcatgatccggtgggtatgggcggaggaggagaatcatggacagtttccgtgtttttgttggaaggggatttcattaacatggctcctgatgaagatctgccccctgcgggccctcaaccaaatcctaatggtccagatgatgatgatgatcctaatgtgggcaacatttggcagatggggcagcctcctgctggtccaggtgacttggatgatttggtccaacagcagcaagctgcaaaggctgaggtagaggatgcttggggccaagactatccaatgggccaagtaatggaggtaaatcctaatggtctgcttgctttggtacctattgtttcagaggatgctagcgcttctgttcctgctattgctgtacgtaatagggggaaaaaggatcaggacccagtccaagacccgaagtccagaaattcttagcttacttggataaactggctagaagtgaatatcctagacaccattatttttatccaatgtctggcctgaatgagaagattgacctcttgtgtaaagaaaagggaaccatgcaccaatttcttgcttctagttttgttctt

SEQ ID NO: 14757 - DNA, 1075 bp, Oryza sativa
  unsure (1)..(1075): unsure at all n locations
acatagaaagcaaataatacaaacaggctataagactattgaaatagtaaacaaaaccatttttaatggattctttggttttttcttgatttactgagacttgaatgggcttaaacggagcacatatgaattttctatgaattttagaagattcactgagtttttactataaaagaaaaaggcttaattgaattattgcgcattaattaaccccggatgacatcagtgagggggggagcgccggcatgcgggccccacatgtcatcggctcagaggcgccggtccacggtggaccgagtccacgagaccaaaggaggggagcaccacgtggcgccggcgtggcggccacgtgggctgccacgcggacggcgatggacggccctgatctacccatgggtagatcggccggcggaggtggcatgcggccgggcgtacgcgcgggcggcttaagccggcctggcagccatggcgcacggcggcgacggcccgaggcggcgagcggcggcacacctaggcggcggcccaccggctaggcggctaggtggcggcttaccggcacgggagagagggagggagggaggaggggaggcctcttcgacgacgatcgacgacggcgagcggcgcgatggcaggacgggctccgggatgacctaaagaacaaaatgagggaggttagagaacgagagggaggccgcagcgagttagggcgctggccgaaggcnnnnnnnnnnnnnnnnnnnnnnngtgcaagagggatggcggattccggctgcggattcggccgactgaggggtggacggggtggcgctcgaggaggtgaacacaacggcgttgacggcgcggctcggcgcggcggctagcggcaaccggagcagcggcggcggcggtggagaggagggcgacggcgctagggcgatggggtgcacgggagcggtcgatggcaatgtgaaaaagagagaggaggggccgggggtgctttatgtaggcttgagggggcgggacgtggccgggattggcgggcgaggccggcgaagtgggggaggtggagagagagagagggctcccggccgtttct

SEQ ID NO: 14758 - DNA, 23492 bp, Oryza sativa
gagtcggcctggccttcgggaggaggagggaaaacgggccggcccggtaaggaagggggcgcgggaggtgatgggccgacggcccaacaagagagaaaaagaaaaagaaaaaaaaaggaattcccagggattaaatattgcactttgattattctaatgggttaaaattatttccaaggctctgaaaattccactaaaaatcctgttagcatattttgacatgtagaacccaagaaaaattccacatgcctttttcgattattaaatgcctttattatattagggtttctctcatgcctttacacttgtaatttcttaggaccatttattaatttgatttaggcttgggagaagaacttcagggtgtgacagaccaccaccgccaccgccgtcgccaactgccatcgccagccgaccaccaccgccggtcaccctccagatccggccaagaggtgcggatctgagggccgtcgccgccacgaccaccaccaggcgccgctgtcgtctcctccactcctcgtcgccagctacccctccgccagatccggccaggccaggcatgaatctggcctccactaccgccgctcccgaacatgatacttcgccgtcgtcgccaccaagcccctcgtccccacgactgccaccagccgccgccgtcgccaccttcgccagatctggccgggcccatcgctggtctggcctccaccgctgccgctccgagcatcgccccctgctgccgccgcatagtatggggagggacgaggccccaccgcccctgtccttgtggccgcccagctttgccggcgcctgctcaggcggcggcgaggcggggaaggaggcgggtgaaggaggaagacgccggcgtggtcgcctttcgagtcgcccggggaggcgacgtgagagggttttctcaagatactactgcagttgtagtttaattccccaccaaacacagggtgcagaaagcatagcaagcaggcaatgggatggtttgacttcgccgagcaaggatagctatgcacgattcatttcgggcgtgtttagtaagattcatttcgggcgtgattagtaagggaaaagaaaatttttaagcgtcacatcggatgtttgactagatgtcggaaagggttttcggacacgaataaaaaaactatttcagaactcgccgggaaaccgcgagacgaatcttttgagcctaattaagccgtcattagcacgtgtggttactgtagcacttatggctaatcacagactaattaggctcaaaagattcgtctcactattttccccataactatacaattaggttttctttttatttatatttaatactccatacatgtgtccgaagattcgatgtaatgtttttgggcccgaagtaagaaagaggtcgattaaaaacaaaaagaaaaatgaagaaatggctaccgcctaccgtagtggcaagctccgtaaaaaccacgcctccgtccgccgccaatgggtgcatcggcatatgccgcccttcatcgcctcctccctcattcttccggtgggggtgctcatcttgaggatcgagggaaggggaggagcccgcgcgtcgtccggtacgcggtaaccctacttttgtcaacgggatttctttattcgagttcagatggattagatggggattcgagtatttcggtgtgtgctaaagtacaagagagtttccggttgcaggcgggaagctccgaggctggatggatggaggaggccaccatcatggctgcggggagaaaggaacaaagacaacatggcgcaaggccaaaacggcaagaggaagttgggactggtttcaaaaggaattgaagtcaaaaaagaggaggaataagacgagtttaaatcagtgtggcaaatgctaaataaatgttttctaaatggtgggaaactgtaaattaagctttgacagcagcatgtcctgaaagtttcaaaaaaaaaaaatgtcatatgattagttatcccactatggatcgaagatgttgcttgagagtatgacaaggagaaggcccttgaagaattgagacaagattgactgtgcaacgcagcagtctgcactgcagttataacacttgctttgaaaggagatacgcagggtgcttcggatcttgttcgcaacaatggttggtggaggactggaggcacctaaatattctcagctataattattattattttactttgatcaagactaaacttccagtgctaactgttgtcagcacacctactacaaatactggcgagcctgctgagttttcttgaagcagaggagtgtaggtaattggtgcatgttgctatctagaatggtatgagattgggaaaaagtcaagaaaagcgactgcaacggaaataggaaaacagatgtaatcctcttatctccttgatacacagagacggtgcctccatttttctctttttgcacaggtacctttgtggtctgttctgtgttattcatttttcggagttcaaattgcagcgatgttttgctactgcactattaaactttttttctgacatgtcacttgtttatgtattagttgcattgtaaacagatatactggctatattttccttctgctaatgtttgttttgacttgtccatatctttcaggatcctcctttagttttctatcatcatcctctattcaaaccccagtggtatcatcaattgtattttttttatttcgtggactaagctttcttgatgtaagatttcgtcaaagtactcacctaaccaccgatgtttacattaggtacatgcaacctgccatcttcatgacttcatttctcagctgccaaagagtcgctagcatgacctttcacccatacatatgagctacttctcttgcatatttgtttctttgtgttcccttgtcgagagcttgtcaaatttctgcagatctgtttttgagcaagatttacacataggtatgtctacaagttctggacaagccatggtgagtgtttcgacgggagtgatgaactgccttcttgccaagcttgccaccctgattgatgaagagcatgttaagttcagcaacattcctaaggaggtgggcttcctcagggatgagctcaggaccatgaaagctttcctggagatacttgcagacaaagacaacctcgatccactcacaaaagagtggatgaactaagtaagagagatggcttatgagattgaggactggattgatgaggccatgcatcatctcactaaggacgacagcaattctgggttcatttcgaagatcatttttcgtctcaacaggatgagaacacaaaatcgcatggccaatcaaataaatgaggtgaaaacacgtgtggtggagatgagccatcggcacaaaaggtataagcttgatgcaagtatctctacatctgactatacagccattgatcctcgcctctgtgcgctatatgcggatgcagaggcccttgtgggtatggatggtccaagggatgagattaccaaatggtttatgggtgcagatcaacagttgatggtggtgtctgttttgggaattggtggtctaggcaagacagcacttgctaacgaagtgtacaaaaagattggagggcaatttgattgtcatgcatttatctccatctctcagaaaccagatatagtaaggatcctcagtaatatactctcacaactgggcaaggagacatttactccatcttgtgagatacatggtgttctcaataatctgcgggagaatctacaagacaaaagataccttttcttcttcttcttcttttttttttttgtttctgcaatgtaatgtctcatggatggttatatattggtcatgagtaatctacaacttatctcctcttaaaaacttaattggaacagttctgctctgtccaaaatgttcatagcaatgaactgagaatgagtctttcctttgtgctatttgctctgtttttaaggagagtgtagtccttacttactcttagtctaatttgcttattttatatgctgcatgtgaaacatttgcaggtatttgatcataattgatgatttatgggacaaatctgcatgggacatttttagatgtgccctccccaaaataatcatgctagcagagtgataacaacaacacggattgaaaaggtggctatggaatgttgcagctatcgctgtgaatttatttataagatgaaaccactgaatgaacatgattcaagaagactattttttaatagaatatttggctcggagaatgcctgtccagaacgatttaagggagtttcaactggaattttacaaagatgcggtggtctgccacttgcaattgttagtgtctctagcctgttagctaatccagcaacctctgtagatagacaatgggagtacgtaagcaattctttgagtgataagtttggaataatgcctgcattggatggaatgagaaacattttacatcttagttacaaaaaccttccttatcatctcaagacatgttttctttatcttggcatttatccagaggactacataataaggaaaagtgatgtggtcaggcaatggataactgaaggttttgttcataaagcccaggtacaagatgcagaagatgttgcaggtagctacttcaacgagctagtcaacaggagcatgattctacccacagacatagactatcagaataatgtagtatcctgtaagctacatgatatgatgcttgatcttatcttgtatgaggcagcagaagagagattttttacagtaacagataatttcagtacattgctgggcctgcacaatagtgtccatcggctctccctccaatatgacaacggaaaccatgacaccgcagcagcaactactagtctaacatatcttcggtcgcttgcaatctttggaaattctaaatacatgcacatgcatcatctttcagactttaagtttctccgagttttaattacagtgttttcagatgctgtccaccagatgagtttggacctaacaggaattcgtcagttgtttcaacttagatatgtgaagattgaagccaatattcatgtgcagatacaattgcctgctcaaattcaggagctaaaacttttggaatccattgatatagaatggggatcagtttgcattccaccagatattgttcatctgcctcacttgattcatcttgttatcccagaaggaacaggattgcctgatgggatcggaaacttgaaatctctgatcactctgcgttcttttgatctgggggagaactcgttacataatatcagaagtatcagagagctgactaatctgaaagatctcaatctctgttactctggaaaaaatgtagtatctaatatggagacatggattgatgttttgcgttcttcccttgaaaagctttccaacctcaaatatctacatttatattggcctggtacttgtgaaaatggcctatgttctttgaaccctccatcccgccatcttcagagactggagatggcgtactggtggttttccaaagttcctaagtggattggagggctccatgagcttcacgtcttgaaacttgcagtgaaggaggtgtcagatgatgatatcactcttcttgcacaactgccttccctgacaaaccttggattgcgcatgcgaggagcacctaagcagaagataattatctataagaaggcattcccagttctcagatacttcaaattctggtgtagcacaccctgcctggtctttgaggcctccgtgatgagcgaagagctgcggaattagcgctacaaaatgccattgatatgcatcctggtcgtcctagtgttaaggtcgtcagttgcccgcatacacagttccattctgacatttccgattaggaggaagtggacagggataacatatgccatctgaacaaaacctagtaaacgtcgctacttgataccatacttgtagtagtaactgtatgcagaaatttttttattaatgtgaaatacaacagaaaatcgcagagcaaacatgatcatctgctaacagcattttgagtactttgatggtaaacaaaccccactgtttggatgtgctgctaggctgctagctagctatcgaatggccttatactattgctatttagtggccctgaaatcgatgtaatcaccttctgtcttcaggcaccacacatttcactacctgttctcaggaaacacatcctccctctgtctctaaatataagtgattttagtaggatatgacacatcataatacaatgaatctggatatgcttctgaccagattcgttcgctgtactaggatatgtcacatcacactaaaatcttttataactaaaatcccttatatttagggacggagagagtatatatctgccgcatctgtagctgcagagctgttgacttgtttttgcactctgagaagatgaactatgtgatgtcatggaacttcctgaaattatcatacatcgaggattcctctgctgcaggttgctgtgagagcaactgcagcatgtccggaacttggcaagtgaaaaataaggttcgccaggcccatttgtggacaaaagtgatttcctgctaatactattccaggactatatttgctattgtttgtgtgtaccgtggtttctgttgtttatttgatcacttgagaaggctaaccctaactaatctcttcaatcctgcatacaaaattgattttttttccccttttcgcacgcaccgtacgtgttgagcagtatacccataaaaatggcacaaaacatgatgattgatgaaatcctgtatgtatgatatgatatgatatgacgaaacacgaaactgcgatcgagtgattgatattgcacgttttgcttgatcttgatcaacatggaaatggatcggtctgatgaactcacgttgtaactcctcactattgagttgaacatggacgaaattaatatggtgatggatcagcgatgggtttataacttcacctatcaaaactaaaatattgacgtccacgaatatcatgcacaaggggtatgctttcaatctgaattttatggggttaagaactgccgctgatcctcgtatcttgaatcatatattagggacacacttgcggatatcctccgtgagaatgtgtgcatgcgtctttggggttaaaagggaaaatgacaagggtatacctaagcaagaagaacctataattttgtagttgtgttccatccaatatgggaaggaaaaatgggaccgatggcaagcatgcacaaaaggaaaagcgaagttaaagggcaagctaaagatggaacgtgtggttgggacgaagcagtgggggatccagtccctcttccccctctcgccgctctcctctatttatagcttacatatgcgcgcctcacaacccgcgacgaacaccgaggagccagcaagagacaaacctgaccaaatccaccctagctacaaattttcttggccgcgcgcggcaggcagatcgagcaggcgagcgaagatgtcgtggcagacgtacgtcgacgagcacctgatgtgcgagatcgagggccaccacctcacctccgccgccatcgtcggccacgacggcaccgtctgggcacagagcgccgccttccctcaggtaacaaaaccaccaattcctcgatcgccgccggccgctgttgttcttgttcttgcgtgatcgatcaccggccaccgttgtgaattcgtctgtgcctgtgcagttcaaaccggaggagatgaccaacatcatgaaggacttcgacgagccggggttcctcgccccgaccggactgtttcttggaccaaccaagtacatggtcatccaaggtgaacctggcgctgtcattcgtggcaagaaggtacttatcgtatctgatttctaaccatgatgggtccgcagtttctcattgtctctaacctttgattgattaaatttgcagcttcttctcatatgtaagccatgggttcttgttgcaatgtttggtttggcagggatcaggaggcatcacagtgaagaagaccgggcaggcgctggtggtcggcatctacgacgagcccatgaccccggggcagtgcaacatggtggttgagaggctcggtgactacctcgtagagcagggcctgtagatcgatcgatcacatccattgtcgcgcaccgttcccaaatttcaccaacaaattaactcagccaaacgagtcacattactagatccatatgcaatttttctagccaccaccgcgcatgcatgggattaattgtggtttaatttttttttctcatcttcccctgtcaacaccacacattgcagatcacttcctgcagtgccatagtccctctcgtttcttcgtgtcgtttcggctaataattgtgtgtttttttttcttttttgccggtttggtcatttcggctgccgtttgagttgtgaatctggaacaacatatatgtgattgccattgtttcattgcaatacaaagaagacagtatatacattcatccggtctgttggaaaaaaaaacaacgaaaactatatatagttatttcttcagtttttgtttctaattgtatatgcatcactcataagtatataataactaaattaaagctagttttctttgcataaatggggcaaactaaatttgagtaagcatcagattgttttggttcttagagcatctcaagagagactaaaaaagtagcctccaaaaaccaaggattgttacaatccataaaaaaatggggcccaaaacctttaccatctttgcgccctagatgaagaggactagcggcgccctagatgagaagacaagttgatgacggcatgagcgcaatgctgtttggaggtaccaaaaataagagccaggccgacaatggcggaagaggaaaaaaatggtatatgggtggccgaaatgatatgtgattactatgaatgggggcatatcgaggtgccgaaaaagctagatcagattggcaccatttttaggattgggtaaatattgagatgatatttgggtatatctgttcgagacttttttctttttattaaattcctgaaatttacctttagggaacctgtttgggcctctcttgtagatgctccaagagcatatcaccaagagattggctaaattcccccctccccccaaaaaaaataaatctgattttaggaatcctaaatgaaatttgatatctgaaaatagctatccctcgaagagaccggctaaaattgactcccaaaaaccaagaagcggacccatgcaaaacaaccattatataaatcagtttattcctcctcccatgtgacgattgccgacaatgcaagagatgacaagacggtgagcaaagcaaacgcattgtaggctccaagcttgcataaccagacaaacaagtcaatgccttctgacctagctaggccatctcttcatatcattctcggctgataaatgaagaaagaaaaagtcagagcccagagggatcaaggaggtaggagatgtggtcgctggaggattgggacctagaggtggtcgctgttggcagcgatgcggtggaggggacatagatgccaacggtggggttgatctgatggtgacgacagtgggtggtgggttccaagtagcaacaagacggaataattccaggagtggtgttcctcggtaggtggcaaggagggcctgttcctcccggcagcggagcggaggcctgggacaagcacaatcacagcctaggcggcagtgtttatcaagagaagacaaggcggaggaggcgtggggccaagttgtcgacggcgacctgtgaggtaagtctcccgtgtgcgacgatggtgaggatgccaagaaggcttaggtggagaagtgagccgtggagccacatgtggccaaggatgaccttcccaatagcgacattggagatccggtggaggggagttggggaggctggcagtggagacgatttgcgtgggctagctagcatgaggttcgggaaggagacgtcacccaggtctgcatgagtctaatggatgtgggaaagagggtcgacgcggagggatgaggcccctggcccggtggtaggcagatggtaaagatccagatggagggtgatggatctgaccaggtcgaggtagcagtgttggttagtgacgaatcgacatgtgtggaggttgaagaggacagtgatgaagcttgcagttgcaccgattgattttctgactttctgcgggaagatgaagccaatgtcagggcacatcgagctaccggcagctaaggttgccaagaattgccggacgggaaaattttgctcctcatgtaggaacaagctgagaagaccgagagcgcaagattgggagtggaagaggagcccttgcttggcctcatatgttgagagcgaagactataggataggaactccaaaagttaaggagcagagtagagaatctctcggagcagcttttaaattaaaatcctaaaatatcagtattggaaatggaataggggtactggtgatgctcttatgcatgtctagtcattgttcaggtggtttttatattttgtttccaggacctcggtctgactagagaaaactgaaccacactctaggacagggctttttattatggttaaaccttgtggctttctcggaagcactgaaaactaggatggtcttagtaatcgagtagttaaaccatatggtttttctcgaaccacctaaaaacttgggtggtccacccagttaggtgtgacgagggagttgaacactacacgttgtgttgcaatttataaaattattatttttttactggtgatttgatctgtgaaccgttggtggttaactactaatttcaccgttttaatcactataatgacgcaagatgttgatagaggatgttaattcctttcaagtatgtttgttggggccaatacttgtagtcctctcttttcgatttgtttggacacaacagtgtgttggagggatgaacacccttcatggtccatattactatattggcccaagaacaaagccgtgtaaactggttctgggtgttttagaggatgtggaaatgagacggtgtgtgatgttgcttgtttggaggagatcaaagagagaacgatgtcatacgtgtctcacaatgtattatcactacaccagaccgggtgactggtgatgggtccaaaccatcatctcttatagttatgaccctcatcagagatgagtgatcagtgataattctatctcatctctgaaaggtgaagacccgtgagaggtggtcatcacctatgacgggccgtataaaggacccatcagaggtgagtctgaccaccctgacctagtggtattgccacccgtcaagttgattcatttgtgatgggttggttttgacacctgccacaggtcagggtaatcggaaattggtggagtcaataccgctcatcactattgtaattcactggtgaaaaaaaaatcatctgcccttcctagtgaccaactggtggcatcactcacaaaaaatcacatgaaaaattatagtggatatcaatcatcccaatcacacattcacattgcatggactcatcactcacaagtaccaggaaacacaaaaaatcacaagaatcagtggatctcaatcatcacaattactgcttgaatttcttgacaaagagatagtcacagttggaggagacgactgcagcgaggttgatagacaagctgagggaggacagcggtgacatcgtcgacgagctgctggtgacgctgattcatggttgactgcacatggttgcaggcgtgcagtcagttccgcccttacatcctccgcatatactactgtacgtaataacatgttaaaaatcaacacacatatgtgttgatttttaacatgttatggtgattcaacaacataatgggcctttttgtgtgtggggggggattctgagaagcagctggttggtagccagcttctgataatctggaaaagctgggtttcctaccttctggcgtctagttcattttttgaattctacaactacaacttatcataatctggaccaaaagcttgactatttgggggaacttctggttctggcagaagctgcagcaactagaagttccccgaacaggcccaatatgctcattcaaaagttgtgataaggatataagtgacgcatggcacaactcctctttatcacttggagcatcaagcaaattgtcctgtgacaaaggtatttcatcaattatgttataactaccggacatatttaacacatcaaaattgttcataccttgaataagtatagcacatttgtcaatacctttgttctcggtagttgtgggtgtggtatcaattaaaccttattgaaatatgcatgaagcaataggtatttctttttccttattaacttggaggttcttaagtacatgcaaaatgttagtatcgaacaagaggtacaacaaagggtcactcctccaacacattcacatcatcttagcaagtagttatatctatttgaataacaatttgttttcttagtattatcaggcaatgtatcatgtgaaaatgaaactaaactatgtcaccatattaatactaatccaattaatgtactagtcacattcctaattttctattttttcatagacgtggcactatgcaaaaatttgatcatttcttttcccaatcaatgtttccatccttgcaaattttcatcattaccaactccattataataatgaatggaagaaaggatatagctagacctcaacgcagtagatgcgcagtggtacaactctcatctaacttcttcatatcatgcccataagtggtctaacctgccatagttagtagaagacaaaagataattcaaaaatattatcccttatcagctactatattggaaataaagtcacactctctcaagcattttaccatgctcttacaagtgttcttacttacagaacaagagatgtaattggtggctaactgaggcactgtaggatgtgtagtgtgaaaattgctagaggatgtcaatcctgatcaagagtatgcttagcttgaaaggcatatataatagcaaggatgtgctaaatttaataatagagtagcaaagttgaataagtatactatatacttcacaatcactagcagagacacgtccctaaaactagtataagcaagcaagagtaatgaaaaaaggaacttaggatgctactctctcacgaagtctctcaagatgaaacaagaatggcacaaagacttccccttttttctcctttttttatcctctttttgtccctttctttcttctttttttttcttttcttctttctttctttttcttctttgtttttttgattgacacctttctttagttataatagcaaatacttcaaaacaagaaagacccaaagtggattcacaaaagaatcaaagatgatgaaaggccttaaaacaagaaagacccaaagtggattcagaaaagaatgaaagatgatgaaaggccagcaaaaaatgaattctggaacttgtaagggccaaaacaccttgcaaagcaaccttgttgcttcggctagggcaaacatttgatttcacaatctcgaatagcttacgaggaattttgatgtgatacgaaaaccatctgaaagcatacgatcataatcttttgaaaaagtactcatgggtcccaagcaaccatatgcatcaatggctaggtccgtttcatgttgatactgttaggaggaccaaatccgaccgaaacatgttgaatcatatatcttggcttatatagctcaatagttacgttatataaatggagaagacttgggagagtgttggtatttcttaacgacattactagaaatataattcccagcaatgacgcagaaatacttctggtatattatggttatggagttcatccgcaagcgcacggatataccattgtagcatttcacccgagagtattccaagggtatcatatttattttatcccgtgggaagaccatgtagagagaacttaaataataatttatatattacttgtgataatcatattctaagcaggggttaagataatccaagggtagagtgacacacaagcattaactactcattctcataatatattatctaagctaagtggaaagaaaagagaaagataatctattcctatacttctaatatacatagtatacatacattctagttaaccgatatactagctaataccctctttccgatgccctcctggtacttcgagaaaccacccctgactgccgagttccttacgacagcccgtcatgaccatataaccggggctaaatacggaggaataccctccccaaggaattaacttaggattatataccggcgtggaggaatacccgtactgagctgtcaccatcagcggcccacctctcatccgtaatatataaccccaaataatgatatcccgtaatctggacaccacgtctaaactaccagatactactctaatatcatcgtcatgacatagagtaattgcatatgcaaacattatacctgcaccaaagcatctcccagataagctagccgtatattcagtataacatgaacataatgtaaagtaggtactcatatactcgggaagtatttcaataccataaatgtatttagaagaatattctaataaaagtacacagcttataaaagagaagagaaaagctactagagccatacctgaactcttccgaaggcttccggactcctgatttctactatattcctattccaccagctagatactactaaactaaacttgagagaaatgagagagctattgcttgaggtgtgagagtgaagtgagaatgagagctccttttatagcctcccaatgacggttgtgacggttggaatggtcggtaataccctccaaccgtcattggggagccatctcagccgtccaggagaaccctggatcaaacggagctgcggaggttcggccgaaccatgggctaggctaacctggcccaatttcgacaggcagcctcctcttttgttctcatacgcagacttgtgaattttggcccaattcattgtgtcaattctgagttcttggcccattcatacataagtctgattctcgacatcgtccgattgatttatcgtctgagctgatgtcgattctcctccactttattgttattctctgcaaaaggttaatatacctaatagtagtggaatattattattttaacagatatatgcattgcaagcatcactagttctcctctattttagtaatattgatggtcgaaactgatcgataacggccgtcaacagagaggttatggtttggtcctcaattaacttcgtttatcatccatgcattccatgagcctattcttgcatcatcccttgtttaaatatatagtaaataaatcttacatagagaatatgtacctttaatttattaatgtgtaatatagccttggtcatatcatagctagtgatgtactcgtcattggtatgattgttagggtgactatttaatagctatggaaaagtctaatttgccttggggatggtaggaacgttgtaattttttttattatattgttcgaagtactagccaaatagccatgtgtttcaacagattcttgaaaatagcaaaactaagtgtttgttaaaaaaatgtattttaattggttgaaacaagacttttcatattaaaaacaaactaaatgccatgtttagaaaattaaagagctgtagtctacatagtacggactgtagactcacctgaaccctaatgtcagtgatggtattggtggtgacagattcatcacccccactacttttttgtagtatagattagatattgtactcataagtttgtaatgttaggtagtattcatgactaagtagcatattaattgtgacttctacagcatatgtttaacttacatattcaatattgtactcataagtttgtaatgttaggtagtattcatgactaagtagcatattaattgtgacttctacagcatatgtttaacttgcatattcaatatatactagaaaatcagtgtgccggctggcatgtcgacaaattgaccgcatatatggctatatattaatttgcacaaaattcgtattataagattagagattgactgcatatatggaaattttacgtggagatgagtgaagacgtgcaccaacgattaatttacacataatttgtgttataatattattaaaggttgaccgcatatatggctggttgtggtaaatctggattctttctgatttctctagaatcgtccagtgatatttcatattttgcacggcctgttaattttgcagttgtccatgggcccatttattttttttagcaaaagtcacaccaacgcaagcgcgaggcaggagctttttccagtgaaaccagttgagccacgtggcacgagcagctgcgagagtttttgcacaaatttcgatattagagattcgttgtaaaagtatcacgtagcaatgttttttaaaaaaatgtcatacatagactgcacaaaattaaactttatgttcattgcatacataaggataaaatggactttttcagtatcttttaaatataatggtcaactgacagaatgggcagaagacatcaaaattaaaaattaaagggtaatactaattttagcaaaattagcataaaaacataagggattttagcggcgtcaaaggaattttctcatgttaattacatttgttgttacatttccaaactccaatggaaatcgaaatgaccacgtcagaaagaaatacaaaaagttattagccaaaaacggcatgaagaaatgggatcaaacaaaatatggcagaacgtacaagaggtgatccagaacatgcttgcggaggtggacaaggaaagaggagaggaaaattaaaccacaatccccatgcatgcatgcacggtggctagaaaaatgcatagcatagagatctactatgtgctgtgtgtgtctctcattcgtctccgtttaatttgttgctgacgaattgaactgtggcaacgacgacgatgatggcgacggtgatctacaggccctgctctacgaggtagtcgccgagcctctcgaccaccatgttgcactgccctggggtcatcggctcgtcgtagatgccgaccaccagcgcctgcccggtcttcttcaccgtgatgcctcctgatccctgcaaatccaaccattgcaacaagaacccatggtttacatatgacaagaaattgcaaaatcaatcaaggttagagataatgagaaacagcaaaccatggttagaaatcagatacgatgcgtaccttcttgccacgaatgacagcgccaggttcaccttggatgaccatgtacttggttggtccaagaaacagtccggtcggggcgaggaaccccggctcgtcgaagtccttcatgatgttggtcatctcctccggtttgaactgcacaggcacagacgaattcacaacgatggccggtgatcgatcacgcaagaacaagaacaacagaggccggcggcgatcaaggaattggtggttttgttacctgcgggaaggcggcgctctgtgcccagacggtgccgtcgtggccgacgatggcggcggaggtgaggtggtggccctcgatctcgcacatcaggtgctcgtcgacgtacgtctgccacgacatcttcgccgccgcctcctgctgcccaacgaacgactcgtcctcctctcctgcggctgcaaagatacgggctcgatcaggtggtttctttctcctcgtcgggtgttcgtcgcggtggtgaggcgcatggtgggtggatggtttgattaaatagaggagagtggtgaggaggtggagggagtggttccccgctacttcgtcccaaccacacgttccttctttcgcttgcccttcaacttcgcctcctttgttgggctgctcgcaatagctaatggtcgtcccaattttccttctgcccctggattgttggcccagactagagatcaatagatctagtatctctgtgaatataatagtaatatttagctatgtatttggacatacttcaaagtttctatttttttagaacagaggtagtagttttttgtttcggtaaatctaattggagaggcctctccaattagtattaaccagagacacccacgtgctagtactttaggagttttggttgctattaatctattgaacaagtacggaaaatattcctatcatctatgcttcaaaaaaaaatttctcttaaattactcatccgatttagaatccgattacaccgttgtgttcgtaataattaaatctttacaacaagatctcacatgattatattttgatgaaaaatcacaaattacttttatgatatgtctaaattacttttagatttcactaagttacttcttagacatataaaagtaaattcagtaaaggctaaaagtaatttacatatattatagaagtaacttataacaaaaagaaagtaactttaattaatgttttttttcattgaacaaattatcatatatatatatatatatatatatatatatatatatatataagttacttttagatttgataaaaatacatcctatacattcataatgctctgaggtgattacttttattattattttagttaatttcataatttgtgctgattaatttaatttctagatagagtcatgttcttatctccacaacggatttacttcaaatgacatgctaaagttaccttcgttttgttctaagttacttctataatatatataaattacttataggttttattgaatttacttttatatatctaagaagtaacttagtgaaatctaaaagtaatttagacatatcataaaagtaatttgtgatttttcatcaaaatataatcatgtgagatcttgttgtaaagatttaattgttacgaacacaacggtgtaatcggatcgtagatcggatgagtagtttaagagaaaaatgtatttgaagtataagtggatgatgcctcttatagatgaagtggtagctagtttagacaaactagctaccactagctgtgtagttacgtcctttttgtttatatgctttgtaagagctctcatatcacttccacccatggttttcaatttctattcggaactgtggaaattttagtaattttgcaccccacaagcaaccaaatttctcacccaaaatttcctcttttttccaaatttagttaaaatttattcgaattcagtcaaaattgttaaattttcaagtaatttcgggaaaaaagtttcaaaattcccaaaattattggaaatttcggtgcaaccgaaatttccggtgccgaaattgaaaaccctgctttcacctcatgttcttctcttttctttcacttcctaagtgttttttttattttgatttgccaaatatggtgccatgtcattgaatagcagtcttgttcaagaccaggaatgaaatgtgaatggtactgaaagttgatagaacaatagtcactactggttttatatatagttgaggggaaaatcagaccaaatgtgcgcctttttcttgtagcatcaaaatgtatctattttattattacaatctgtgtttattcagtttttggtgcaagaatattatgaattatgtacaacaagtccatgcatgatatctctttatacaatcaatgaatacatgaatggtcactgctcggtatgcaatcctgcgtgtataaatcacaactaggtagtagtagggtagcaatgatcaaggcatcttgatatataggcgactcaatttgatcaagaggaggatgccaagagattcttgaaccactgcactgaattctttgggtatctcttccggttcttgtagtctacgtagtataatccgaatctcgaggtgtatccagcggcccactcccagttgtcaagaagagaccatgcaaaatacccgcgaacatcacaaccatcctccctgcataataaagttattagagtgtcaaccataacagggaaaattagtcctcgactcataaccgaaagttcaattgtgtcattgtttaagcaccttatggagtctgctaagtttgtaagatagtcattgtggtatttggtcctcttgtcgtccttgagggcattcttcagagagatgaaggggctgttgccatcatccattcctgaggcaaaagaagggaatctattatattacttgagtttttgttcttgcgaggaaacttcaatgaaaattttattcgaaagattatactttgttatgttaaacttgaagcaatttttatgtttgacattttttattactgtagtatttgttttaagcatacaggaacaaatcacaaataacgtaagtacacttgccattctctgttatgtagacagttggtttgttgtatctgtccttgacatagttcatcaagatcctcatgctacgaggcacgatgtacaaccatatcgagttggcctgcatggcgaatcaacagtcatatgctcagtcagttcagaaaccaagttcagttttacaaatcaaggttttcaaatcttgcagtaaattaacaacaaaagaaaaaaatattaatgtcaattttattttcacatgagaaggatgtaatgttgcagaattaattaccctatccccaattggctgtccatttctgaaggctgaaaaatgcaggcatgagaaatgaattagtcatgagctagctaatttttcaaatttaatcatccaaacttgcaaaaagaacacaatgggcgactagttttctcatagcacaagcaatctgagaagtagttagcccagttgtgtgctttgtgctttttatcatttagttctcttattattcagaaaacagtgtgaatgaaaagtggaacttacggacactgatggttgcagtatctgccaaggtgttgttcagcaatttttctattacagtagattggtcatcctttgtgtagaatgtggtatagtgattgatccccatgaagtccagtgatccgttcacaagtgcagcctctttctccgtgaacttcggtagcctgcttcccactctcgatctcatcgttgccggataatctccgaagaagaagggatccgcaaaccttccataccaaattgagcatttcatcaatggtggttctatcaaaattcagtacagggttgagtacaaaggaaaaactacagtagttacagaacagagtgcaatggttctgtccattttgtcacagtagtggtactgaatgtctcacagctgtggaatttgcaagaaaatatgaagcttgtgagttgtgaaccttaccatcctagctggaattcctgtgctctcttggcggcttcaatgtcagctgtggaatttgacattggttcgtaccatataacatcaaaagatatccccagctccccattctgacttgcctgaaaaacatgaaagctaggcctttgcatcattgtgttacctaattacgtactgaacactgaaaatgatctatggacaaatcttcatgcaggattgacttgagaaagcattgcaatatcaaagcagcacatacatatgcttacagttacagaagcctgaactatatgcagaagaattgttcacctaccttgtatttcttcctgtatatgtctgaaaccgtggcatgtgagaggatcatgttatgagcaactatgtagggctcggtgcctgaattccctttcttgcagtagaggtgcaggagcaccgagcaccggcccggtgcatgcatcccgctgtcataggcctgcaccgcgacggtgtggggctcgttgaaggtgatccagtgcttcaccctgtccccaaatgcctggaagcacgtctcagcatataccgcataatcattgctgcaacaagatcatggtacttctgttacagatcgaatagccattgtaactgcatgagaagtttgcaatgcttacatgatctgcctgtcaagccacccagtgtacttgtcctccaaagcttgtggaaggtcccagtgatagagcgttacatatggttcaattcctaggggagatgttcaacttgtcagtaaaatttaagaaaactttagattcagtagtgaattaaacctatgttttaataagtagttagctcaaacatttcaatttgtaggttttggggagtcaattttagtgtccacctttagctagtaatgcgttgattagcttgttgtagtgatcaatgcctgcctggttgacctcaccagtgccatctgaataagagtgcagatatgattattgttagtagtgcaggtctgtttatccacagataaaacatttcataatgaagaaaaacttcaaaggttatgtgtgaccattaagttaacataaagatgcaaattaatgaagagatccaagtggaaatacccatattaaccaatgaattattatattacatacttgggaaaatcctagaccatgaaattgagaatctatatgcatccatccccatgtctgccataagctgaatatcttcctgaaatattgatatgacaagcacagtaatctcaaaatttgaactcgatcaaaaaaaatagatagatatactttcactttctgtgttagagtgtagtgtccaattgtctacctcgaaacggtggtactgatccactgcaacatcagcattgctgaagtcaatgatctttcctgaaaataagtaaggcaaatatttgcttataatattgaaccatgggtgattaattttcatgatcaaaggtcaactcttaatgatttctttgttattccatatgttcgaccaagtcaatagtcaaagctatttactatatggtttcacacatgcccagaatgtacgaatcaggaacactgagattaagtgtaatgacaaagaaaaatatctaatctgtggtagcataattgcatacaggttttgaatatctgacctataaattatacaacatgagagtcgagagatgcttgttccatacgtgaagcaggcataactattgatagtaacagtagtactaagatagtagaagaaacaaggtaaggcaaggatagccagatatatatcaagaatccataggcatcttgagtcgtataccactacatatattacgtatgtttctcgaccagaattacaaacctaaaaatataattactgaatctttatcctgcttgacttggccctgaggaaactagagatgattaaatactgattacagtgattgggaaaaaagataccaaatgtatgtgcgaatttgtcccaaatggttggcccccttccgtcctccttgacagcaccttcatactgcaggaaaaatagataaatatgaaacaaatattttttttgcgtgaatatgaaacaaatattaatcatcttaatagtcaaattgaaacgtggatattactgaattcaactgttttacttatttatgatcagtactttgtgtagccaaaataagcattctagcgagcggtgccaatcgattggtgtaatagatatacacttgaa

SEQ ID NO: 14759 - DNA, 12195 bp, Oryza sativa
ggtgaccgatctatcccaatcacttgatttaagtatatattgacataaagattatataatgttaatatctacagccgattgaacatatttagttctttattatttacctataactgccgatcgatgcatatatgacatcggctcaaagataaacgatatgtcatcggcacttagccgatcggctatcgtttatggatttaaacacagtttctttgcctttacttcttgttgattgatcaaatcaactggcacgcttgtatacccgaaggcgagttttggacctgcactggagttaagcagatcttccaggcctcgtgttttccatcaacaccgaccacccatacgcccccatggcaacaacgaggacgaggacagcggcgacggcgacaacgacgaccggcggcttcgagaaatgacgtcgacgaggagagtggcgacggctttggatgcagatgacgtaaacacctgcaagcgaaaatccactcacaaaaataacgattttcgcagaccatttggtgcatgcaagtcgttccaccgcatgcgataactggatttgatcatatggaaaaatgcatttcgtagcagtgactggcagcaatatggtgttctgtagtaatgaaggcttcgttacaattggcagtttaattcattttgctcgtggtaggtcatgcaactgtggaagttgaagttgcagtcgatatacctgatcgagatgtacagcataacgaaatgcacggcgctataccatacaagtctttctgttcttcttttcttattctacaatggcgaaagatgagatgggttaattagcgaacaactccatctctttctttaagcaagttagaatggccacgttgcatctagacttagtatgagcgcagtacgaaatagcagtggggtctgagcaaactagatagaggtacagtctcccttccatctacatatgataaaaaattttagtgggatcttcgtgggggctctcatagtcttcacgccagtagtaggggctcgagaccctgccgccccaagctggatccgcccctgtatgagcgggtcttttttaattttcttctcctgcaaaggagaaagaaagatgggatgggatggctgttaattaagtcaacagatctggtcctttattaaagtaggctagaatggcacccttgcatctaattaagcaagtttgcaacaaagtaaaggtcaacgatacttaatgttattgtaaactaaaaacttagtatatgccagtaattatttgtatacagctgtgtagagctttgcaggattctaattttgtggtaactgggcaatgtagttgatctaaccgttatcattcaattgggaacatatcatatgcacatttggcttggcatgtatatgtgtgaatgacgaatttcgtgtcaactagcctgcttcacttgccatcgatctgtgggtacatctattatctttcttcccgcttgtgatgcagatcgggctggacttcatcaccacacgtctccttgccattgtgcgcctcccgctcactgtcgcgcagggtttacattaccgtcggtaaccgcgcggttactgcggttaccggtcttaccgtggggcacggtaatagaaaaaaccacggttaacctccgtaaatttaaataaatttaaaaaataatttgaatttttgataaattttgtatggtttcgtacggtttttcacagttaccgcgtggtaaccgtgcttactgccggtgcacggtaaccccggccccggcggcttcgctgtcacgtcaacgaagctaccgccgtcgtcgtctaacgcaactgttgtcaatgccacatcccatgtaccccgctctacactgccgctgcgatcaccatgtgcctcctcgttgtcgtggcctcccgctcgttgtcgccccaacgaggttgctgtcgttgtctaccgccgtcgtcgtcagggccacatcccgcgcctctccctcgactccaccaccgcgcctccgcgcgcctcttcgccaacacggccttcttcgcctccgcccctacgcggcctccaccgcctctgccccacgcggatttggccattggcatggatttggggggccaccgctgcctccgcctccgcctccatcggcgttgaggaagcccgtggcgacaacagggttgggtgtggacatgaggcggcgagctcgagcgccaccatgcccatctgccccacctcgagctcgaggatgggaatgggctcgaggagcagtgggagaagaggaagaggggagaaaggggaggaaagaaaagggttgtagagactaacatacgggtcccagtgtcatacttagagtatagagtttagcaatgagtttagcttgccaaatcaatttcatagctggctatatagatgtttggagtgtttgatttgggtagtctgttgaagatgctctaattactataagaaatgataggtacgtttcacttacgtcacaaaaactgaaatttacgtcatgacttgaaatttgtgatgttcgtatgatgaaaattcatttgtcacctattatgcgtctctaatcaagttttatgacaaaaactttttttggcattaatctagtaacgatccttctatcatcattgagtctatgacacccatttctatcattattgagcctagaaatcgtctgaactcactaaactttgatgagtagatgccacgtcagatagaaaacgtcataaaaattttagcacaccatgatatggagctgacatggcatatttttttgtcaatttattttgtcacaaaatttcttgtggcctgcgaagtcccatacaatgatcaatttatgggtcatgcccagttacaggcccgatttaggtttttaatccaatatttagcttatatgttttatactccaaggccctctttgtttaggcttagatttttttatttaggttttcaatctaatattttggcttatacttcctccgtttcatattataagactttctagcattgcccacattcatatataggttaatgaatctagacatataagtgtgcctagattcattaacatctatatcaatataggcaatgctagaaagtcttataacctaaaacggatgtagtatgttttataagccggtggctttgagccatatctccatctaacataaggaaaaaaagctacatgaagctttttttttttttgcttaataatgtaagaatggcttatatgtctttgaaaaaacaaaaaaaaaaaactagtcgtttgtttaggtggagttttgactcaaactttcttataagcctagaaagccgaaataacaatgcaattgatctagtaactgtttctcggattaattagtgattatcataatgatttattgactaacgtggcttaacgagacttcctgtttcatttgtaaatagtaatatatatctaggtgaaacagatatgtaacgaggggaggtgcctcttactgtcctacctcatcatatcataattagaaagacttagaaagtctaggtctttttactattaattgatctgttttcggtaggtagaattaacaaaagggatgagaattaactatatttcaacagccccggacctttatttaagcaggccagccagaacgaacaccgtgcatctaataaccagattacatcgagtcagtgactccagcgttgtcaatatatatggagcttttgcttcttgtgtttcttcttctggcggctatgtcagccgccgtggagagcatcacgagcacggcggtgaaaacggggtgccaggagcgctgcggcggcgtggacatcccctaccctttcggcatcgggcccggatgctcccgccacggcttcgagctctcgtgtgtcagcaacggcagcggcgccggcccgatcgcggtgctcgccggcacgtcgatccaggtgacgcgcctgtccgtcgagccggccgagtcgcaggtgatgctccccgtggggtggcagtgctacaacacctcgcagccgaccaggacataccccgactggagccgcgcgaagacggagatgaaccgcggcggagtgtaccgcatctccaacacccacaacatgctggtcgtgctcggctgcaacaccgtcggctacactgagagcttgaggagcgagggaggcgcctactccagcacatactacatcggctgcatgtcctactgcaacaactcggcgagcgcgcaggacggccagtgcgccggcgtcggctgctgccacgtcgacatcccaccggggctcaccgacagctccgtcaacttccgggtgtacgaccacaccggtatggtggactacagcccctgtgactacgccttcctcaccgaccggaccaactacagcttccggcgagccgacctcatcaagatggacaagaaccggaacgttccggtgtggcttgactgggcgatccgcgagaacggctccatgtcctgcgctgaggccaagggcaagccagggtacgcctgtgtcagcgtccacagcgagtgcgtcgactctactaatggtccgggttacaactgcaagtgtaccgcaggctacgagggaaacgcctatgctcctgatggatgtactagtaagtaacaatttccttctatcagtacatttgttacataccatttacctccctccatcccattttagatacagttatgggttttttgtgttcaaattttaaccatccgtcttattcgtcttatttaaaaaatttatgtaaaaatttaaaaaaagtcacacataaacacataaaatactattcgtgttttatcatctaataacaataaacatactaatcataaaataaatttcaaataagatggacagtcaaatgttagacatatgtcacgcccggaatttctatccaaaattccaaacgcttacatgtgtgtgaaccctcgtccaggaatcagccgaggcacacaataacaaattgataatagagtgcagttattactctaattaataagcgaataaaatgtcattacagaggtagatagttcctctcaatcaataaagatctaagcagcggaaagataagataaacggcgcagacgactccactccacaggcagcttgaccagggctacacctaatcctccacaccatcagcatcactgtagaactcttcctctgatgaatgattgcaaggtgagtatatgacatactcagcaagtcacgcagcaaatatgcaagtgcacaggatcacaaaggatggcataatagggtttcatttgtataaacagcatttaataaacatttcagaatttaataaaacagttaagtaataattaatcaatattaatccaacgctatacaacataccctgttgtataggcccaaccattctgaacaaccatacccggctatacagatctatctccaaaccaggaatataccattccaaaccaggagctaaacaaattattaccatttatagcatctattatcatgatgagaggtgtgagactaatcacgaaagacattgttagacccgcccataaccgcgggcacggctattcgaatagttttactctgatcagaggtgtaccactgtacccacaagacacagccccacatcatgtcaccatgtgcctcaataccaccacggtacctcggaaaggagctgtgacagtacccctcgcacaacacaatccaccgcagcgcaccattcctggatcataatcacccccttataaacaaggcatggactccccagcgacccccgtgggcttatctccgccacttctcagtctggtgccccgcaatgaaccatgctatacaaaaggtaaagccgttgcccacgctggcttgtggttggcacgattaatgtttcacaaccgaaactcgtgaaccggtccttaattgtcatgagcacgactctcaaaaccatgtgctcacaacccaccattatcaagttttagttggcaaataattaattaaccaatcacgattgaccatcgtgagctatcattaagccatcattaaataatagtgagtcataagttatcccaatagtgtgctattgtttctaagcatggctaagcaatcacatctaatatctagctgaaccaatatatataaagctcaactagtcaagttataataacccaaggtatcaaggaataaagtaatcaagaacaaaaggctataacaaacaataggttgattccacccaatgacattcgaaaataaatgcaatatttgaatagaaacaatagctttaaatgggatcaacatgcttaaagggttgtttgggatctgtgtgacttgccttgctggccttggaactcttcaaattcttctcctgcgaaaacggactctccgaaaacgtcggaatctaaacagaaaagagcaaaaacaccaaaacagcacataaacaagcatgaacagaacatgtggatatttttatcatgtagatctcaattttagaaaaatttagagacttgaaccaactaaatccgagctaagatgaattagttatgaatttttaaagattaaatcggattaaaacacttatatggattttaatagaattatgacgcaataatgaattatttttgaaaaggaaaaggaaattattgcgtcagcggctagggtttgcggtggaccgggcgcacggcagcggttcacgggaacgaacggccgagatcgatccatccaaaacggacggccgagatcgatcgggtctacggcggctcacggcagacggaccctgatgacgtcagcggtgacgtcaccaccggcggcggctcgggcttgcacactcgccggcgaacgacggcgcttcggcacgaacagagggcaccaggacgtagagcgcgacgcggcgaactcaccgatgaccaaaacgtcggcggaagatcaacggacggcgacggcgacgaggaagaagcgacggcggtcttcggcttgacgacgacggcggtgctccggcgatctacagcggcagcgaaggggcggacgaggacggcggtgacttggcgaccacgatggcaacctccccgagcgacgacgacgaccggaactcaaatctccttcttcttcaaaactcaaatctctgcggcgattgtcggcataattcttatgacgagactgagccactcgcaatctttcttgaatgatctttaccttttcttctgcttcccttaggatatccgtcccgaaaacttgacgttctcccgtttgatcccacaaaagcggagtgcggcacttccgaccatacagtgcttcgtaagaagccatctgaagactagcttgataactgttgttgtacgaaaattctgcataaggtagattcttatcccaacttccaccgaagtctaaagcacaagctctcaacatgtcttccaaaatctgatttaccctttcggtttgtccgtctgtctgcagatgataagcagtactaaagttcagcttagaacccatctcttcctgaagcttcttccaaaaatttgaagtaaactgactacctcgatcagacactattttcttagggacgccatgcaaacacacaatccttgccatatacaattccgccaaccgacttccagaataagttgtctttactgggatgaaatgagccactttggtaagtctgtcgactatcacccaaatagagtcatggcctgatgacgttctgggtagaccagtgatgaaatccattccgatttcctcccatttccattcaggaatcttcaaaggctgcagcaaacctacgggtttctgatgttctgccttgactcgctgacaaacatcacatactgctacgtattctgcgatttcacgcttcatacttgcccaccaaaatctttccttgagatcctggtacatcttggtactaccagggtgaatggagtataaagtatcatgagcttctttcagaattgcatcttttaaatctttgttgtcggggacgcagattctctcacccaaccatacagttccttgctcatcttccaagaaaccgatagcttttcctcttcttatattcttcttgatttcttgaatatcaggatcattaatttgggcttctctaacttgatcaattagagtgggcttcgcttctaaggctgcaacaaaacctctactgacaattcccaaatttaatctttcaaattccttgcataattccaatggtaactgtcgtccttccgtagcattgcaatagcctttcctgctaagagcatctgctacaacattagcctttcccgggtgataatgaattcccatgtcataatccttaattaattccaaccatctcctttgtctcatgttcagatccggctgagtaaagatatattttaaactcttgtgatcggtgtacacctctgtacgagtaccgaaaagataatgacgccaaatcttcaacgcatgaaccactgcagctaattcaagatcatgagtagggtagttcttctcatgcggacgtaactgatgagatgcgtaggcaaccaccttcccatcttgcatcagaacacatcctaacccaagcttagatgcatcgcaatacacttggaaacccttctttggatcaggcaaaatcaagatgggtgctgatattaagcgacttttcaactcttgaaaactctgctcacattcttctgaccacttgtactttacatctttctgaagcagtcgtgtcatgggcttagcaatcttggagaaattctctataaatctccgataataacctgtgaggcctaggaaactgcggatctctgaaactgtctttggttgtttccagttggttacggattccacattactaggatcaacggcaactcctcctgctgagatgacgtgaccaaggaacttcacttcagacaaccaaaattcacacttgctaaacttagtatacagttgatgttctcgtagcttctctagtgcaagacgaagatgttcttcatgctcttctttggttcgggagtagataagaatgtcatcaataaagaccaccacaaacttgtctaggtattccataaacaccttattcatcaagttcatgaagaaagcgggggcattggtaagtccaaaagacataacagtacattcaaacaacccatacctagtggtaaaagctgttttaggtatatcttcctctttgattctcaactggtgataccctgatcgaagatctatcttggagaaaacagtggcacttttaagctgatcaaacaaatcatcaattctgggtagcgggtacttattcttgatagtcacatcatttagtgcacgatagtccacacacatcctctggatatgatctttcttttccacaaaaataactggagctccccatggagatgaactcggtctgatgtatcctttctgaagcaaatcgtccacttgcctcttgacttctgccaactcattggctgccattctataaggtctcttatggatcggagttattcctggtaccaaatctattctgaactctatatcccttttaggcggcataccaggtaaatcgtctgggaacacatcacgatactcccggactacaggaatctcttccaaagttatttggttcagtcttgaccttaaagactcggaagacgatgcatgaacagttacaactcgaccatcattactagtgagagttacttttctgttagcacagtttatcacacctttatatctggctaaccagtccatccctaggatgacatcaaggtctttggattctaacaagataagattggccagaaatggtactccttgaatttctattctgacggaggggctacgtcgcaaagagagtacttgattacttggggtactaaccatcaaaggacgtctaagatcttctacttccatcccatgatttcccgcaaaactcatagataagaatgaatgtgtagcaccagaatcgaaaagcactgttgcaggaactgagttaacaagaaacgtacccaaaatcacatctggagcaccttgagcttctgcagcagcaacatgattgacatgggcctttgatgctggtacggtagagttgctctgggtagggacaaccttcacgcgtcggggcttcggacacttgtcagcgtaatgtcctgggtctccacagttgaaacacaccatgggcttgctgccttgctccttcttggcaggttgttgctgtgtcgaagctgcaacatggcgtggagcttgattgcggatgttgttgcccgcattgttgttgaagaactgacgttgcggacgaacaacagacgaagaacctccctgtggcatggactggggtcctaaagtaagacgcggcctttgactattcccctgttgtgccttgaattgagcaatccggcgtttcttctgctccatgcggttgtacttgtcctcttgacgaatagccttatccactaacttctggaaatcatgataatccccagtcatgagtgagtaagaaagctcatcattaagtccttccaagaacttctcctggcgctcttcatcagtgcgtacatcttccggagcataacgagccaaacgattgaactcgtgcagatactccgtaacagagcgagacctctgggtgagcgacctgaattccttcttcttgagagacaccactcccgatggtatatgcgtcttccggaaagcagcggtgaactcaagccaagtgataggttcagcagtagtcctattcaggcggaagtgatcccaccattcagaggcagggccatgcagctggtgtgatgcaaatgagaccttctcctgatcagtgcattgaagcaaatccaacttcttctctatggcatgcagccaatcaccagcttcaacaggattagtggtgctagaaaaagtaggcggcctcacacgaagaaattctgctaacttgttctggggaggtgcatggttatttccctggttctgctggttctggagttgctgcatcatcatgttcatgagctgtgcctgttgagccagaacttgggcaagtgtaggattctctccattgttgttgttattgttgttgttgttggggccattcccgttgctgtgagtgagcaccatctggcatggacaggacacaagaagagaaaccggggaaaactacttaggacagggaattaatttttcttttattgatcttaagtgagtttcattattacaaaactgaagactctcacaccactgaactcaccaactacctaacactcgaaagcaaacaaacacatgcacttacatcccaccactgatgtaaatcacatgcgagacacacacaaacaaacttaaacaaacaaactaacacaacgatctaagacaacgacttgacaaggcattttagttcttccgggcatcggagttgattgaaggctcgttcggctcgtcttcatcatcttgagtagctccccactcaatcttggaatgagtgtgcttggattcttcttcttcatcatcacttacattgacgactgggggatccgctggggctggggtaacttctttttccaccacacggacctttggcgccaattggtagcgagggacaaatagagctctcttccttgcggtaagacgaattctggccttctgcggtggtgcttctcccttcaatgcggctagttccttctccaaacgatccaccttgtcctctaacttgcaaatcttaccacgattccggtcttcacgatcttgagctgctaacacagtctccgcacgggtttcatccatagcccacagcatctcaaccaaatgccttgtggtagcatcgatctcaattccttcagtctcaaggtagctgccacggtcacttccctggggttggcgaggatggtagcgatactcagtgtcggccaactgatcactgtagcgatcgtgaagctctcctatggcgatccttgccacctcctgacatgtatggatgtagcttcttcctccagcttcgaacatcactgaggggatatcttcactattactgttcaaggtgactttgacacggcacttctcttcatgacgatcatgaggaatctgggcataaaaaggggcagtcccaaatcctttgacaaaggacatcgtacgcaactcctggacaaatccctcaactccaaacaagtactcaggcttgtagcgcggcatctaaagacaagtgaaaggagggagttaagacacttatccaattaatagcacaagtttttagattaatttgaataaagttagaaaatcaaagaaaaaggtaggtaaataaagtaaac

SEQ ID NO: 14760 - DNA, 706 bp, Oryza sativa
ctgagatatacataatcaatacagtgtcacaagtgctggatcaaaatgggtagattgtgcagttgcatgcgcaaaaggcatctctttttcttcacagttttagaatagaatgggagttacagctgatcctcaaatggcctttgaattgagtactcacttctcctgaagcatacatttggaatgtttggtggacatgttttccacataagaaattgacagtcttatatccattatcccagcagataaagcgcttggaccaaatgggttcaatggtttctttatgaaaaaatgttgacatataatagctcaggactactacagattggcagctcattttcatgctggatgcacaatttggaaatcttgtagttcttatataactttggttccaaagaagaattcaccagagactgtcaatgattacggacctatatctcttatgggtctgagtttaaagttcctaaccaagctaatggcagacagacttcaaggggtaattctcaagctagtaagtgaaaattaatatagttttatcaagggaaagacaatacgggattgccttgcttggtcctttgagtacatccatcactgtcaacaatcgaagagcgaaattgttcttttgaaattggactttgaaaaagcttctgatactattgaacactctgctattctttttgtcttgcaacatatggattttcctgaaaaa

SEQ ID NO: 14761 - DNA, 741 bp, Oryza sativa
atgaacggtggtgtgaccaaccaaccgtataggcgaggacaccagtcggcggcgacggaggcaggccggcggtgaagtcgtagacgcccaacagcggcggcataataggccagccgtgcaggcggaagcaccagtcggcggcgacggaggcaggccggcggtgaagtcgtagacgcccatgaacggtggtgtgaccaacctaccgtataggcgaggacaccagtcggcggcgacggaggcaggccggcggtgaagtcgtagacgcccaacagcggtggcataataggccagccgtgtaggcagaaacaccagtcggcggcgacggaggcaggccggcagtgaagtcgtagacgcccatgaacggtggtgtgaccaaccaaccgtataggcgaggacaccagtcggcggcgacggaggcaggccggcggtgaagtcgtagacgcccatgaacggtggtgtgaccaaccaaccgtataggcgaggacaccagtcggcggcgacggaggcaggccggcggtgaagtcgtagacgcccaacagcggtggcataataggccagccgtgtaggctgaggcaccactcggcggcgacagaggcaggcccgcggtgaagtcgtagacgcccatgaacggtggtgtgaccaacctaccgtataggcggagacaccaatcggcggggaccgaagcaagcccggcgtgaagtcgtagacgcccaacagcggtgggataataagccagccgtg

SEQ ID NO: 14762 - DNA, 580 bp, Oryza sativa
acaatcgtgccgccgctaggaaaaatacattcttgtacagtatatagattgttcccaacacgtgcatgaaaaaccctatcatgtcgcgccatgataggatgttgtcttccaagaagtagcaggtgatgttgtccgaacctccagcatggaacatcagcaatgcggcccaaatggtcaccagctgcacggactgggacgacggtgcgctgccgcggatggaggacagcttgccaagcgcgaacgtcggggcccaattagccaagtggtacgcaagccacaggaccaacgtctccatgcctgtggctttgcgccggcgaacatcgccgagaaagacgaggaggagttgtgccacgaagctggagagtattgccaaccggatcatccacgcattccagaagagctgcaagccaatcatccatccaggcatcgcggaccctgctatagtgaatgggtacatgttagtccgcaaggacaaaagattaacgcaaattacatgttaagagatcaaggacaacaactgatccaggatatataaaactgaatgaatatccgttacacctcccagtataatcactgatca

SEQ ID NO: 14763 - DNA, 727 bp, Oryza sativa
aatttggggtgaaggttgcttcttgcagacactgaaaagtaaaactaacatcaattctagttgcttctattatgatagaagttatggcattattacttagcactaaattctaattaatggtgaggttgcattcttccatattaccttattggggtttgatccttcctaaatctgttgcctaaccatgaattagtcatctacaattttacttaaccagaaacatgcttaaatgcagttgttccggacagaagcttgttcacattggagacaatgcagatgcttacaaagttgagaccatttgtccgtagatttttaaaagaagcaagtgatatgtttgagatgtatatatacactatgggtgacaaggcttatgcaattgaaatagcaaaacttcttgaccctgataatgtatattttggctcaaaggtgatttcgaactctgattgcactcagcgacaccagaaaggtcttgatgtggttcttggagatgaaagtgttgcagtgattcttgatgacactgagtatgtaagtgcaaataatccagtgaacatggttgataaacattttatatgataatactgccagtaattaccgtctgtagtttgttagaactagataatgtttactttggccactgaaagttagaaatggtctctgactgtgatatgattgcttctacacagcagtagaaacattcatcctgtattgattaaatgttgaagggctg

SEQ ID NO: 14764 - DNA, 567 bp, Oryza sativa
agaagatagcatcagttggcgttataacaggccagccgtgctagcggtgacatcagtcagtggcggatgcggcggccggccggtgaagacgtagacgcccaacaacggcggcataaaggccagccgtgcaggcggaaacaccagtcggcggcggcgaaggcaagccggtcggtgaagacgtagacgcccaacaacggcggcataaaggccagccgtgcaggcggaaacaccagtcggcggcggcgaaggcaagccggtcggtgaagacgtagacgcccaacaacggcggcataaaggccagccgtgcaggcggaaacaccagtcggcagcggcgaaggcaagccagtcggtgaagacgtagacgcccaacaacggcggcataaaggccagccgtgcaggcggaaacaccagtcggcggcggcgaaggcaagccggtcggtgaagacgtagacgcccaacaacggcggcataataggccagccgtgcaggcggaagcaccagtcggcggcggacgaggcggccggtcggtgaagacgtggacgcccaacaacagcggcataaaggcca

SEQ ID NO: 14765 - DNA, 8221 bp, Oryza sativa
aagagattggccaaagggaaaagtgttgtaaccgcatcggttaacatggtttttacgttgcctgctgagtttggggtcaagcaatccgatgtcgatgaggttgaagaggaatcggctaagttgtttttgtcgccagaacaagcagtcttcaagaagccggaagggacagagaatcggcatcttaaaccactatatataaatggttatgtcaatgggaagccgatgtccaaaatgatgatcgatggtggggctgcagtgaatttgatgccgtatgctacatttaggaaattgggcagaaatactgaagatctcatcaagacgaacatggtgctcaaggacttcagtggcaatccattagagactaaaggagttttgaatgtggagctgacagtcggcaacaaaaccatccctacatcattctttgtcatcgatgggaagggttcttacagcttgttgcttgaaagggattggattcatgccaattgttgtattccttcaactatgcatcaatgcttaatttagtggcaaggcgacaagattgaaattgtgccagctgacaggtcagtaaatgttgccagtgccaatttggctctttgggagatggatggtcttgattgtttgtccgggaaaatttgggatggagattttctaaaagtgtccgattctgatacacacccagttaaagatggagaacccaagctattattttgagggcgtcgtggagggttcaaacgtctacaccaaggacacagtagatgatctcgatgataagcaaggacagggttttatgtcggctgatgatttggaagaaattgacataggtccaggtgatcgaccaaggccgacgtttattagtaagaatttatctgcagaatttagaaccaagttgatagaactattgaaagaattcagagattgcttcgcttgggagtattatgagatgccaggacttagccgatcgattgttgaacatcggctacctatcaaaccaggggttaggccacaccaacagcctccgaggagatgcaaagccgatatgcttgagcctgtcaaggctgagattaaatgattgtatgatgctagttttatttgtcctcgccgatatgctaagtgggtttctagtatagttcctgtgatcaaaaagaacggtaaggtcagggtgtgcattgatttccgaaacttgaataaagctaccctaaaagatgagtatccaatgccagtagccgatcagctggttgatgctgcctcaggacacaggattttgagttttatggacggtaatgcaggatacaatcaaatctttatggccgaagaagatatccacaagacgacttttaggtgtcctggtgcaatcggcttgtttgagtgggttgtaatgactttcggcttaaagagtgctggagctacgtatcaaagagctatgaattatatatatcacgatttgatcggctggttggttgaagtctatattgatgatgtggttgttatgtctaaagaaatagaagaccacatagccgatttgagaaaggtttttgagagaaccaggaaatatggcctaaagatgaacccgacaaagtgtgctttcggtgtatcggctggccagtttttaggatttcttgttcatgagagggggatcgaggtgactcaaaggagtgttaatgcgatcaagaagattcagcctccggagaacaagacagaattacaagaaatgatcggcaagataaattttgttagaagttttatttctaatttatctggcaggttagagccttttacaccattgttaagattgaaagccgatcaacagtttacttggggggcagagcaacagaaggctttggatagtattaaagaatatcttagctctcctccagttttgattcctccacagaaaggaataccttttagattatatctgtcggccagtgagaagccaatcgactcagtcttgattcaggagcttgaaggaaaagaaagagttgtattctatttaagtcgtcggctcttggatgcagaaactagatattctcctgtggagaagttgtgcttgtgcttatatttttcatgtacaaggttgaggcattatctattgtccaatgagtgcactgtcatatgcaaggccgatgtggtcaagtacatgttatcggctccaattttgaaaggaagggttggaaagtggatattttccttaactgaatttgatcttcggtatgagtcgccgaatgcagtcaaagggcaagctatagccatggactttattctttgatgggtcagtgtgcactcatggttgtggcatcggcttggttataatttcccctcggggggcatgttttgagtttgcttatactattaaaccttatgcaaccaacaatcaagctgaatatgaggtagttcttaaaggattgcagttactcaaagaagttgaagccgatgctattgaaattatgggggactctttgctagtaatcagtcaattggcaagggaatatgagtgcaagaatgatactttaatggtttataatgagaagtgccaagaactaatgatggaatttcggctagttactttgaatcatgtatcttgagaacaaaacactgaagccaatgatttggcccaaggggcatcggggtataagccgatgatcaaggatgttgaggttgaggttgcctcgataacagccgatgattggagatatgatgtgcatcaatatctgcagaatccatctcaatcggcttctcggaaattaagatatcaagcgttgaagtatactttgttggatgatgaactctattatcggacgattgatggggtattgcttaagtgtttgagtgccgatcaggctaaggttgcaatcggcgaagttcatgaagggatttgtggtactcatcaatcggctcatatggtgaagtggttgcttcggcgtggagggtatttttggccgacaatgctggaagattgtttcaggtattacaaaggatgtcaagattgtaagaaatttggagcaattcagcgagcaccggcgtcggctatgaatcctatcattaaaccatggccgtttagaggttggggaatcgatatgatcggtatgattaatccaccatcgagtaagggacataagtttatcttggtggcgaccgattatttcaccaagtgcgtagaggcgattcctttgaagaaagttgattctggggatgctatacagtttgttcaatagcatataatctatcgatttggtatccctaaaaccattataaccgatcaaggttcaattttagtgtccgatgagtttgttcagtttgccgatagcatgggaatcaaattgttgaattcttcaccgtattatgcacaagctaatgggcaggccgaggcatctaacaagagcttgatcaaattgattaagagaaagatttctgattatcctcggcaatggcatactcggttagctgaagcattgtggtcttatcggatggcttgtcatggatcgattcaagtccctccttataagctagtctatggtcatgaggctgttttgccatgggaagttagaatcggctcgaggagaacggagttgcaaaataatttaacagccgatgagtattataaccttatggccgatgagagggaagatctggttcaatcacgattgcgagcccttgcaaaggttaccaaggataaggagcgagttgctcggcattataacaagaaagtagtgtccaaagatttttcggaaggtgaacttgtatggaagttgattttgccaattgggactcgggatagcaaatttggcaagtggtcgccaaattgggaaggaccgttccaaattcataaggtggtatctaagggagcttacatgttgcaaggacttgatgaagaagtttatggcagagcgctaaatggcaaatacttgaagaaatattacccaagtgtttgggttaacgcatgatcggctgatgttgccgatgcatgatagccgatgtgtttacatcaccttgagatggctgatatggttatatcgcccttagttgttttcatattgtaatcggttgtgctttgccgatgtgcaatggcctatatggttatatcgcccttagttgctttcatattgtaatcagttgtggtttgccagtgtgcaatggccaatataaatatatcgcccttagtcgtttttataattttatcaatgtttttgacattgtaaaattagggggcacatacatggaaaattgcaaatttttgagcgtatttggaagttatgttaatcggcatgaaggatggtcaagacagtaaagtactagagtatcttagccgattacaaaaaattcttaaggtctattatacagaatgtcactgagacaaatatcgctgaatagccgatatagctctctgcctaatttgttctacttcttctatggcttgggcatcttgagcatcggttccagggatgactttcaaggacttggtcatatcagcgacattcttaatagccgatttcagccttgccttctgttcttcgacagcttgcgggagatcggctagcttcttgtgctccatatccagctcgacgttgcattcttgaaggtgtgccatgagatcaatcttacgagcttcaagccgatcgatattggacttgatcgggccctcagacagctgatcaagcttggacttctcttcatgcacaagctgtcgattgtgctagattgtagcttcaatatctttgcgctcccggcgatcgactaatctctgcctggccttctccagcttgaattggtgttgctcaaggtagacggctggagtaagggcatcggctagttcatctgggagtagagcttggatatctgtgaaccttgctcggatcgagccacagttggtcaccaagttgtctagtgatgcttctagccgatgagagatatccttaagcgttctcttcacatcatcggacagaggagctatggctttactagtggtgtcttcctctgtttcatcgagacaatccttgatgtcgaaggaaaacagatcggcgaagacctgcaagagataatattatggatggttaaggatcaaaacatgactagccgatctcaaatttgtgtcaacaaaaacttactggaatagtaggagcagctggttgttcttcctcttcgacattgtgactgtctgcagccgatggggtacggttgcttgattctagttgcataggaggtgaaggaggaggaggaggctgtaaaagagaaaaatgttaggcgtaatcggctgagatcaattaatgacataattgagaatgtcttactggtggggccggtttgagagttggtgctgccgatttcttcttcacagcagttttcttcttctgcaactataagatcagtgagcaatcggctataagtgaagtgattgcaaaaggagctgaggagagctgcttactcttggaaaatgagccggagcagaaggagttggaggagtttgcttgggcgaagccgatggtgttctttctgtatcgcttacttcgtctgcggcttggtcaacatcatctcgatgtcttcttcgatagatggatctagggcgggtagatcatcacttggcttggttttctttgatttggttttcttcttgggagccggagctgatgtttccacagccgacgatctggttttcttttcttgccagcatcggctggttctctaatgagcctttgaagaagagttgaagtcttgagggcattatagccgatgacaggaggagatggtccacctccatttggaattaagcctggggcatatttgatatctctgccactattgctttgatgtggaggggaagattctgttgtctacaaaatagaagagaaggttagtcaagttatgaatcgactgataattgttcaaacagaattaatgagatcaaggtttacctgaggtataacatcggggaacagatctgtcatgtacatagaagctggttgatggaagatatgttgttttcattcaccccaccatctgtcaaagttcttgctcctgaaccttgccagctctatgttctcaatactgcccaagggaggtcttgggatgttgagtagccgctccatcatcagagttgatgagatttctcctcggcactggatcttgttggcaaagaataagccgattgggagttggcccattccaagttgtctagctaaactcattgggtggtagaattcataggagacttggatgtttctcccttggtggatgccgacgggtaagatgcatgggctgattgcagttgagaaaacttccctggacttttggtatctttcatggttaatgtcttcaaatctgaagtccgatggattttccagaagtgatgaatcttcatagaagaaccaaacatgggcatctttctggaagccttcataaaagctgcagaaccagtccttgagcagctcagccgataactttgctcctgcatcggctggtgtggatgcatattccccataggacatacacctgcggtgggtgcgctcttctccatcatcatctgtaatcggctctaatcttggaaattcagcttccgtcacggatggccgattgacagctttcatgactactagatttagccaagtttgcaacaaccaccatggcccgcctgcactgacaattgagctgacagcaatcttggctgacgcgttgttcagtgtttgatacaagtagccgaggaggatcttgcctaagggaaattgcttttttgtttctagggcttcggctacaaactgccagttggttgtagggccgcaacttgatccacagaagagaaatttctccagccacatcagaagaaaggctacatgctctcgaggagtgacaggccctttacccatatatgctgctacatagccagaccaaccccctatgcttttggtcctgaagtcaaattagttcttggtgttcatactcatagggttagccgatgaagttacatctaatccggtgatcttggtgatgtcgatcaaagttggagtcatcggcccttggttgaacaggaaggcattgatagtgttggaccagaaataggtggcggcagccattagaggttcagtttttggctgagttggctatggtaagatcaagtgcttggccgattccgatttcgtcccagtgaacctttttgctagccgacatgcgcttgaaccatgtaatccagctcttctcgggtgaggttttctcaagagatggccaagatttgaaggtgttcttccaatgacctagatctgggttggctaatctgaaaggaaccctatttgtttcactgataatgaattcggtaggatcgggattatcaactgggccaagaacatagtggttctcatgcgacatacttggaatcgcaaccagattggacagatgctacagatgcaaatggggatagagaagaagaaaacaagatgaggcaagagaaaatcaatctgctgcgaaagaaagagatctagccgatgggtacttacctctgcgtattcggccgatggcgcggcggatggattggcggaggatgacatcgccgcgggcggagatctaaccggagacgaaatcgcctagggatcgccttgtgcgtcggagaaatcgccggagagagagaggacaaagttaacttcggcggtgaaaatggaagaaaacggtgtgagtttctcgggtgcaaaggttagtatttaaagcactggaataacggtcgggaaacggcagagtgcgaatcttgctcggagttgatgtatggcaaattcgaaacattaccaaatattccggacttggggggcatgtgttaatgaccaaatttggtaatatcagcatcggaaaggaagattagatcgaagcggaatcaaagataaggattatcgcgggaacagagtaagaatcggctggagtccggatcggctacgatcggatcggctaaattcgagtcagacttgttttggtgatgcagctgattccgacaatacgacttggtgtacaacatcgggttgagttgatatgcttcaaggtgattgccacgcatggatagagtcctgggaaggcaattgtatctattaattaggatattttatgtaatttacttagagatatgtttgggcaaaagtctgccgtaaagacttatggtatcttagagtttgttagagataagagtcgtgtccgatatgggcatagtttgtaatttgcgggtataaattgaccccgaaccctatgtaatcaatga

SEQ ID NO: 14766 - DNA, 1154 bp, Oryza sativa
tttctcaaatcggcaaggggacaagcccctttctccccctccttttcccctttttcctcctcgccggcgtcatcccccctgtcgccgctttggccgcgaccgccgagcgccagctcgcgcccttgaccgcgcaagtcggtttccaaaccgacattgccgccccctataaacccaggcgcccttccttccccttttcccctcccatctcgctcgccgcccccgcgccattgccaccccctctgtttcgccgtcaccgttcgtcgcgtgtgtgccggaggagccggtgcgcactaggacgcggaagggagcttcggccgcgtcctctccttcctcttccccggcccgaggccggagagattactcccgcgccgtcggcctctcatcacagcgcccctcctcttctcggtgatgtctctctccgttcttcctcctcgctccatctcctccccctagctttcggtagtagctcgagtagcctccccgtagttagccggcgccgccccgaccgttgccgtcgctcgccgtgtgctcgctgccgtcgccgcccgagctccgtagcacccgcacgtcgccagcctcgctcggcgtagctccgcccaatccgacgctagcgtcgagttcccgtggcggcgaggatgctctcaccgccgggaatcgacctctcgtgacctcgtcgtcgtttccctcttctcccgccgccggttgccgccgccgcattccgccgccgtcgagcaacctccggcgaatccgagccgttggctcgccttcccttgtcacgtgcaaccgcccggtgtgctcgtcgttgcccgtatcgccgtggttcgctccgccgctcgccgctgtcgcccgccgtccattcgcggccgggtcgtcgtctacctcccgccagcccacgtggcagccacgtaggcgccacgtcggcgccagcccagccgaggtcgggacgggccgaccccggtcagtccctccccgtgcgcgcgttccaccgcgagccgtgaggctgcgcgtgggcccgccgcacccacgtccaccacgaaccacgcgcgtgcaccgcgtccttcccccgcccgggcgcatgagccgcgtactccctccgcacggtgagccgagccgctgacaagcgggtctcagggtaacagtcgaatccaaacacg

SEQ ID NO: 14767 - DNA, 1834 bp, Oryza sativa
  unsure (1)..(1834): unsure at all n locations
ccgccgtgtgattgacanacgagctcggtacccttgtgattttgtggtttgtttcttcgattggatgttgaatttcctggttctttgaaaaaaattcgaagtgataatggtggtgaatttgaaaatgcttcatttgaacaattttgcaatgaaagaggtcttgaacatgaattttcttctcctcgtgttccacaacaaaatggtgttattgaaagaaaaaatcgtgttttggttgagatggctagaacgatgttggatgagtatcacactcctagaaaattttgagctgaagcggttaacactacatgctatatttcaaaacttggaaaaacttcttatgagcttcgatttggacgtcaacccaaagtttcatatttgcgtgtttttggttgcaaatgctttgtcttgaaacctggaaatttggataagtttgaggcacgctccaccgatggaatgtttcttagttaccccgcacaccctcgtggctatcgtgtacttattttggaaactaacaaaattgttgagactagtcctggtactagaccagaaattgcaagtacattgtcacaggtgcaggagtaggatggtcatatatttgaagacgagagtgacgacgacgacgaggtcgactcggccggttagaccgggcgccaggccgatcagaccgccggcacacctccggtcagacagcctcaggatgagcggtcagactggccagggtcgttggcttcccgttctgttcatgctgatcgtgatggtcctccagaggctacaacttcgaccaatactggtacagaacgtgaaacaacttcagaagtcgctgctcctttgcatattcaacgacgacatccgccggaacaaatcactggtaatctaggtgagcggactataagatctaaggtaacgactcatgatgtttctgcaaattctgcatttgttgcttcttttgaacccagagatgttactcatgcattaactgatgaatcgtggattaacgccatgcatgaagaacttgaaaattttgagagaaacaaagtttggactttagttgaaccaccttctggacataatattattggaaccaagtgggttttcaaaaataaacaaaatgaggatggtttgattgtgacaaataaagctagacttggttctcaaggttttacccaagtggagggtttggattttggtgaaacttttgctcctgttgctagaattgaggcaattagacttttgttagcttttgctatttcaaaaggttttaaattgtatcaaatggatgtgaaaagtgcttttctaaatggttttatataggaggaagtttatgtcaaacaaccaccatgttttgaaaatcctgattttcccaaccatgtttttaaattgtctaaagctttgtatggcttgaaacaagcaactagagcatggtatgataggcttaaaaattttttgcttgcgaaatgttttacaattggaaaggttgacaaaacacttttagttcttaagcatggtgataatcaactgttcgttcagatttatgtggatgatatcatctttggttgttcaacttacgctttggttgtggagtttgctgagactatgcgcagggagtttaagataagcatgatgagtgagttatcatactttttgggattgcaaattaagcaaacacctcaaggtacatttgtgcatcaaacgaagtacaatgttaacatcaattggttctacagctgtgttggatcctgatgaagatggtgaagctgtaactaacaacatgattgaatctttatcgcatctgattgcttctaggccagacatacagatttgctgtgtgtttgtg

SEQ ID NO: 14768 - DNA, 10890 bp, Oryza sativa
  unsure (1)..(10890): unsure at all n locations
gcgcgatgaaaatgatatggcacccttcagaaaatccctgttgatttagaagcattgcgcagcattcctctaaaagagagaacgaccatagaggatgtgtctgccaaacttaacatgagcaaatcaaagattcaaaggtatttgagaaaaggtttccttaggcgccactctagtagcatcaaaccatatctcactggagctaataaaaagtctaggttgaagtggtgtgttgacatgattaagagggatttgcatggtggtccaaggtttaaggatttttttgactttgtgctcattgatgaaaaatggttctacctctctcaaaaatctgaaaaatattatttgctacctgaacaagatgatccccatcggacttgtaagaacaagaattacatccctaggctcatgttcttgtgtgtttgtgctcggccaaggtttagggatgggaattgcatttttgatggtaggattagttgttttccacttgttacttatcaaccggctatgagaggcaatgtgagaaccggccgtgtccgtggagacttggttttgaagcccataacttcgatcacaagagaagtgattagagatttcatgatcaacaaagtcttgcccgctattcgagccaaatggccaaaagaagatgtgggcaaaccaatcttcattcaacaggataatgcaccttcccatctaaacttggatgattcggatttctgtgagcatgctaagcaagaaggatttgatattcgcctaatttgccaaacaccaaattctccggatttcaacattcttgacttggatttttttcgagctattcaagcaattcaatacaataagaatgcaaaaacaatagaagctctagttccaacagtggaagaggtaatttgatcaaattgttcacacatgttacattgattcttcaacaacaaatttgctcattgactcatttcttgcacacttattttgtaggcattcatggagtattcggcacacaaagcaaaccgaatgtttgtaacactacaaagtgttttgatggaagctatgaaggtgaaaggaagcaacaattttaagattccacacatgcaaaaagaaacattagaaagagaagatcggctgccaacttctcttccttgcgaaccatctttgctagatgaagccaaggctactctccgattccggtgcgagctcctgcaactccggtgcaaaggagtccggcacgagctctgactccggcgcttccacggaatctggcgcgagctcctgcaaatctggcgtgaaggagtccagcacgagctccgactccggcgcgtccatggagtccggcgcgagctcctgcaactccagcgtgaaggagtctggcacgagctccgactctggcgcgtccatggagtccggcgcgagctcctcctctgcgacggtgtttctggggcagcggtgtttctgggcggtggcgtttgtggtgaataagaagatgagcgaggaaaaagcgcgtggtggaaccgaagagtgcgaagttaatacagcgccggcgtggggttgagatcgaagaggcaggggcaatttcgtcggcttttgtacgtgtggctaggaacatcatctaaacgtgaaagtacgacggccacgcaaaacatcttctaattgtgatacggagggagtacaagaatcagtgagcacgtgaataaaaaaaagagaaaaaaatacatccccacatcccagaaaccagaacgcatccagcgccgcctgccgaccttctcgcttccatcgccgccgcgaaaccacttccccatcaccatcgctgcctcctccccatgatcggggtcacggtgcatgtggtgctagggctcggtttaagtgcacgaggtctggcggggctctgatggtggtgacaatgtgtgtaatggcccggcggcagccgaataggccagacgatgataatggcttcatccggcttcccaactatgaaaaggatgggcacgtgaagctactgaggttctagggatgacacctgcacggaatcaaatggtgactcaccggagaaggaggatttggcggtggtgctcggcggctagagttggggaaaatggaattgatctcggtggtgctcggcggctagagttggggaaaatggaattgatctcctagcttgctctaccaaccttggcgcttattggggcattttgaagaggatgccgaggtgatgaatgaggtgaggcgaccaagctggaggtggtagagggcaagtgtcacgtcccgccttcccccaggccaggcccgcttacatctgatagctttcataggttatagactgccctcacagaccaacacatgtcttttctgcacactttgtcctcactcgtgtgcacccggaaagaatttcccggtcggtcacccatcccaaattgctccaggccaagcacacttaaccccggagttctttggagattagcttccggaaaagaagttgcaacttgttgatatgagtattctattaattctattaagccctaggccgggatgttacagcaaggtgaagcgctcggtcgaagacacctcatgcccacgcgtcgtcggcgctctgccgctctgcggtgtcccttcttccctctctctctctcactctctcggtgttctgggctgaggaggagggaaaagaaaagtggacaagggtggagcgagacagaggggctttctagtgggcctagaccgatggaatcaatggtagggagaccgatggaatcaaggttagggtgagcagtatgggtagagattgagtgaagatcagtttctagaatattacaggattatttctctctctctttgttaatctgtagtttaatttgtgggcatgctaaaatagggtggatggaggcagatgaatttttagttggtttaaactgaggaaataaattctacaaaaattatatttattcattataattaacctggtattcgaataaattagttccattatacacttgtattcagtgtaatgcacattttggtgatggtaggttttagctgattaaggtttataactaatccactgtttgactactttgaccgatttatttgatgtaacaaatgtacatataaaattaggtaaaaattacagtgatttgattatattgattagtactttcatgaatttttccaagattttatcttgcatgaattatttttgataattcgcaaggccttgctttatatgtctgtttccagtatagatatatgtttaagtcattgtgaaattatattttaattttagaatgagcattgttgaggaaccaaaacaaagaggcctgatcttgaatataacgtctgaacttttcgttcaaaatatatgttcatctagatttaactatttttttatcatgtcgatcctatgattttacaaaaaagttcaaatttaaagtagacacagtaattatcatacttatagtgtgtatatattttgggctttttataaaggcttctaaagtcgtgcaacgcacgaccaaatagctattttttttaaacgaataagccatttgcccctatttcattaattcttgctaacggtgttaaatgtgaggtgaaaaggacaagtatacccttagatattttccggtacttttgtacaccactttcaaatttaacccaaattttagctaacttttacaaaattttgacaaactaaattattgctatggcatcaatagatctgattatgtcaaaagtacgggaaagtattgaagggtatacttatctttttacaccccgcatttaacaccattagcaagaattaacagaacagaggaaaacggttgattcatttaaaaaaaagtaggggtaagaacgaaaatcaatattagacatcatcaaagtagggggcaacaacgaaattgtcccaaattaatttgtctactatatgtacagtgtacactatagttgtagttatgaaaatggcatttctattattctctcacacaactcatcttaggatgcggagttgtctgaaattctaccttgtttaaaatttccccatatacctcatgctgcaaaatatagataggccgtgttttgttctttggcaaaatttgtttgacgtatacggatacatatttgaagtattaaatatagactaataataaaacaaattatagattccacccgtaaactgtgagatgaatctattaagcctaattaatctatcattagcaaatgtttaatgtagcaccacattatcaaatcatgacgtaattaggctcaaaagattcgtctcgtaatttacatgtaaactatgcagttggtttttttttttcatccacattacgctctatatatatattcaaatatttgatgtgatgaaatttttggaagtttaaagggaactaaacactgtcatagcattaaattaacatccgttgttccctatatatgcatagagagactgtatatatacatatgcatgcctgcaccaaaattcagccaacaccttgctgacaaaaagacaacaaaagtttagagaccagtacctactgaaatcctttgtcgtagaatctgcttgacatatcaatctcagctctgagaaagtttagattagaacataatttaataatgattaggaggcatcaggaaataatgtcctacacgtttctctcatcatccttcctcagcaagggtcaagctaaggccatttacaatgcaaagacgtggcgtgtgacaatgtagagccacgtaggcaaatcgcttgcgtggagtagagaggggagtggggaccgttcccaacccagcttcgcgtgatcaagtttggccacacgaacctcaacaacttttgtccaaaaaaaggggcacctccacgagaaacgagaaagcaaaagaaaggaggcacgctggagtaaaaaaaaaaggcacgctggagtaggggcactcggggcgtggggctcaccaaagtaggggccgccgctgcgtggtgctcgtcgaatgctcgccgaagtagaggcgctcggggatctcaccgtcgctgccttgggctcggggaagccacccgagatccgccgctcggcgccgccgccatcttctaggtggagctcgccgtcgctgcgtggggctcgggaagcctcccgagatccgccgctcggtgctgccgccgtcttctgggcggagctccagaagctcgccccccacctcgcgcgccaatggcgttggcagggtccgcggccgcgcagcttcggtgctgtgcctccaccgtcgacgacggtgtcgttgacgcagccgtcttccaccacgccgcttggcgccgccggcgtcttcggccgcaccgctggatgctgccggatctgttgctcatcgccgcatgggtccctccacccgtccgccggtgccaccgagctccgccgcgctggccggagcacgccgccatggccgccctggacatggggacgtgagaggattaggtgggggtgggggggtgtgggaggggtaagattttttatattatctgtaggtcccgttataaattttttaaaccacacttgccacacttgcactgtgggtatagtgtcttttagagttcccaagcctacatggcagctatggcatagcaatttactaggacgcattgctactgtcctgatgagcctccattgaggaaggttggatgtagcaacatatatatataagaaattgacccattgccaaacagtggctctacgtattacatccaggcagcaggctcacatcaggctatcaagatacgcagccacctcgcagtctaactgcaaagaagggacaacaatacagagaaatgtgtcaggtttggccgtgttagtctctgcaggtaataatagaggagcgatagcaatgcccctggattgatcattggctgaacatttttagtcctgatgacttagcacctaccttgttgtttacagaaagagatcatagttactaccaaagctaatttgatctcaacagccattatttccccaaaattcatatatcttcaagacttcattatttttagcagcaagggagagacaaaggggtaatgaggggacacagtataagaaaactggcatgacaaagatcataagtttaggaaaggagagtgagttccttttggattgacgataatacacttcgagtaatacacatttattaaattttatgctgcacataatgtctcgatatttagattcaattgatgaaattctgctttccaagaaaggttaagcagttcatttgttattccagatatcattggttaaaaggcgtggtttctacgaaaccacaccttttaaccactcttttcttgcgaaatgtgtcctgtaatttttttgtgtacagctttattgaatgtgtcattaatttgaggcaggtggcaacctttccagggcatatgaataattttctatgttgtactgttatataaacagcaagcagtgtaaagaaacacttcaaaagttcaagggccttttacaatgtacatgtgctatgctctaactaagggcacctactagtggcattgagttgataaatatccagtagaatgcaaattatattttgctgcaaactcaaaacatagggctggattataacacgaagcaatgtcagacagcgatagccttttcatgggttctttgtgagagtgttctaatcctgactcttaaatttaatctaaatggttgtgacaaaattctaaacaacttgacaatctagagtatagtaacatgtaccagacaccactgcaccaaaaattatattcaacttcaatatacaaaatgagaaacaaaaaaagattaagatgtgaatactgaaagtagaaaagacgattaatatggctggtctatctcaagaatgaattgtgtactctgaaatactctgttcttgcaatgaaatgctcatgtcatgcaatacacatgcaccttctttgtatatccatctttatgaaacttttttttaaaatttacgggaagctgcagccttcgtagttcatataaagatcttctctataatatattggagaataaataccatgcagtatatatataaatatacaaagagtgaatataaacaaatggctagcttcttaacaagttggagggccttttgcaatgtacacattcctctataattttctaataaaccaatacactggcatcctctgatgtatccatctttatttgtttggacataactagctagtataggattggaagtaatatggaattctggcataattctctggatgactaaaatcatactctataaactggaaaaatggccgagcataacatatggatctagaaaacactgccatggacaaaggtgacacataggtgcccctcggtgattttatgcatcttgctattgttgtaaacattatacagaaattttacaaacattgttggttagatacttagagtcttacgaactaaatcataatgcattgtcctatttatttggacacgaatcaccggtgaaatgcaaaatgtatcatgttgtaaatttcaaacatggaggaagtaacatatatcctacacacttaaaaccgtgacagctagctatctcatcttgtccatggatgtagttttttatgaactttttaagcctctgcaacaagattcattttctaaggaaacatcgtatggatagccactttgattttctaggagcgctgatcatcacagaaaacgtcaagaatggccagtcacagatgctcttgggaacgctcatcacactacatggtgtaaaaatcaaagtgtgtcgatcagaccagcgggtcaactccgatcagagctatctacatcagatttaagggtaatttttaattccggtaaaagttttagtttttgggtacttcaaccattcactcctctggttggtttagttcttgctattcgagactacacatgggacaaatgccaagacataattaataaggctagctatcatttgtagaccatagttctagtcatgaaaatggtctttttatggtcctctcacacaacttattttatgatacggacctatctggaaatactaccttatttaaactttctccatctacctggtgctgcaatacataaatagacttaatgaaacttctatcttccttagccagcaaacattttatatatatggagccgatgaacacctgcaccaaaattcagggaacactttcattgacaaaaacaaaaaaaaaacaaaaaaaaggtctagagaaactcgtactactaaaacctatggagatagaatataatgttcttgcgatattaatcccagccctaaattaaaaagttaaagttacattactctaatatgattaggcggcatcaggaattgtcctacacatttgtttcatgatatgtacatgagtacatacatgattatgaccgtctacgccaaatagtggctctacgtaccacatccagacagcacgcaggctgcaggcaatcaagaaataaagaggtctcgcagccttaaccgagagggatagttacccaactttgctgttaagagtgctcaatcgaacaagatcacccagtgttatagagactcttgaatctattgacaacttgccctagttagtgagttctctcctgatttttacccgtacaagatgtctttcaattcattattttgctcaccttgcttgatatacgtactaagtacaaaagtggttttatacagcttattccatcttttggtctacagcaaaactgctaggctatctgaacggcatgcaatgaattatttctgtatatacgaccagcaaagtcatatatggcatttctaacaaaaaataaccttgataaaaaaaatcaggcattgctgcttgctgcatggtgagtttggctatctgttcgttgctttcgactttctccctcccaaaatgtgaaaaatatgtttgctaattggtagatatatagatgctcagtctctctcacacacagagagacacatacatatatacacaaaagaccagcaattcgaatgatcaagtgcatgtcgctacgcacaaactagctaattctcgacctggaaaatatcatgcaacttgtaggttttaatgtacatcttttctggacaacttgcatagaattaggaggcatcgggagtaatctagcctctttgaaacattctaattgtttaattgttactcgagtattttctgcaagttggtcgttggcgacgaactgtccacaggcttggaaataactggcgagctggctggtttaagaaaaaggccaaaggtgaagaaccatttcaaaccatgcgttgtagcagtttccttctagttccataccacgtctttgcgagattgcagaggcacagagatacagtatgtatgtttgataatactttttgtaattaagttgtcgtttaatttataatatattggtataatttaaacattatttttaagaatagtataaattagtacgacgtataaaaaaatatcatgtgaagcaaatccagaaatggtggagggcatctttttcttctttttcttctttgcatgaggatccaacggggtagggggcttgaggcttacaaatatattaaatttatgttaaacatcgcatccggaaatttacattcatttgatgaaatttctacaagctttccgcaaatggttaaacatttcgttcgtcgttacacgtcttgtaccagcgctaggaaaccacacaatttcccactctattcttgctatgaaatttgtcatgtaatgcatgcaacttcttgtatctagctagttttttttgaaatgtgcaattaattttaggcaagtaacaaccttgttaggggaacatgaataattttcattgttatgtacgttggagcatataagtagtgcaaacaaagagttcaaaagttcgagggccattcacaatgtacatgtgtgcaatgtgctcatggtattgagttgacaaatcaccagtataacgcaaactatataatgttgcaaactcaaaacatcaatgcggcagcatgcagtaacagatagcctccatgggatggcttcatggcagcagttttctgcttgcgcgtactgctagattgaaacacgaggctatcgtcaaaatcttagtcatttggactgacttctctattttttatcaatgcataataaactatttgcattgtgtgtcatataattccaaacaggctccaacctgctttgcgtgctgccgtggcatgccatggtgacaccaatgcctacataaattaagatcaattttttttacttctcttttttaattatttatttaaaattaaaaacttccttgtctcatctctctcctctctttctaaattttatattttgtatgcgactaacatgtaggtgtcattgtggcatgccatgtcagattatggagcgggttggagcccgtttggatttatatgacacctatgaaaagtttaggcacctacgaatgtattttcgagaggggaaaagtacgaattatccccttaaaccacaaaactggatatccttcacccctaactatgtaaatcggacaaataaccccctagctcaatccgcggcggttttggtcctccatggcagtccattcaacaattcttttaataaaaaaatctatgggccccacatatcagttccccactcctctctatctctatactctatccccaatctctccttctcaaccatctccctcccctcaccagctcaccagcacggcagcatcgagaatggctgcgggtaggcgagggtgggggcaagcagagcttgctcgggcactggtggcgctggctatggcagcagaggcggaggtcccccgggtagctgtagcgcccgttccgtcgtggcgcctaacgggaaaaattatctcttaaaaaccctanatgcgaaatttggttctttgcttggtggctagcgcc

SEQ ID NO: 14769 - DNA, 9303 bp, Oryza sativa
catgtcatgatagaatcttgatcttcgctgctctgcagcgtcgactctagaggatccccgccgtggttcgctccgccgctcgccgctgtcgcccgccgtccattcgcggccgggtcgtcgtctacctcccgccagcccacgtggcagccacgtaggcgccacgtcggcgccagcccagccgaggtcgggacgggccgaccccggtcagtccctccccgtgcgcgcgttccaccgcgagccgtgaggctgcgcgtgggcccgccgcacccacgttcaccacgaaccacgcgcgtgcaccgcgtccctcccccgcccgcgcgcatgagccgcgtactccctccgcacggtgagccgagccgctgacaagcgggtcccacccgggaccgcgcatggtgagcccggtccaccggactctctctctcctccctccgggcgcgcgcgtcttgggccgctctgggccgcctccttgggccggccgacccgttaagttcggccgagccgccctttctctcgggccgcgccctagccgcccgagggaagtctattttccccccccccctctttccttttcttttcttttctaaaaggatttaattaaatccttttcctttaggtcaaaaattcaataatcttagaaattcaatatcttcccaaaccgtaaatccgtttgactccgttcaacttctaaaattccccaaatctcgagatctatctaatggcacgcttagaggtcattaatagggctttattttcgccgtttgttgagttgtcccgtttcgcgtgtagtttcggaacccgaagacccgcagtgcgaggatttcgaggatcaagctccagatctcgagcaaggcaagccacctttgaacatcttgagcctatatttgaaatttaattatattgcttgcaaaatattatgcattgataggatcacacttaatccgtttgtcccgtctgcaaggcagattggcggacctacctaattcgtcgcatttgatccttcctttgttaattgttatatcttgtccccttgtaaccatctagttgcgcctcgatattcgtgcaccctgtgcgagtatcgacggacgccttcaaacttaaaatctatttaacaacttgggtaaaacttgggttttacaaaaggtttggaaaacccgacacctgggtcggtgcttgcgaactaaatgaatttccaaaaccgcggaccgggaaatgtaccgggtgtatggtttcccgctctcgcacttaaggaccgattccttggaatttcatccaaacataagacaagtacgaccacatgggtggaatgagacactcctggctgagtaactagcttatcaggggagccttgatgccgagagacatgtggattcgccggggtggtgtcggggaggacccctgggcttcctggcacagtatggtctgggacctaacctgttgttggtctgggacccctcttgtcggcatatggtaaacctgtgttggctttggaaatgccttgtcatgaaagcttggaggtctcccgacgtggctgatccccacgggctgggtgacccgggttagtaatgtcgtgtgggtaaagtgtaccccctctgcagaggttaacaaactgttcgaacagccgtgcccacggtcatgggcggatgtgaggtgattcctagcgtagttttgtttgactactgcttgtgaaattgctgttgagaataatgggttcgatgtttgaaaaatcagcagctgacgggatcagctaggcccgggtggccgtttgaagaagttgttggcccgggtggccgtttgaaaagttgttggcccgggtggccgtttgaaaatctgttgactgggtgccaaccttgtttcaattttaaagactgatacattgcacatactccgaccggacgagacgcactgtctcatccgtgtcgtttgagaagcactcacctagtgttttagaaaagagttcaaataaaatcaattgcaaaaacaaacagcccttctttgaagcctgcattaaacacttatttcccctggcttgctgagtactcccgtactcacccttgctctatataaataattccccccccagttgctgaagaagatgaagcggatcctgctgatgaggagttctttcaggagcaagccggctacgacgagttttagggtttcgacctagttcccaagtcgcgcctatgatgattggtccaagtcctggcttccgctttcctactgtaatgcagttgtgagctcgggatctgtccgcagcccaacatgactgtacttctactccataataaagagacctctgttgctgtgatattctgtctccctgtgataccagcactgtttcctgggactggtatcgattaacaggttaatttggggcgtcacgggctagttccggtcgggactggttcggggcgtgacagtagccgacagaggaggaggtagctcgagcggccgatgggggaggcgtggctcgttcgggcggcagacagtggcgtgcggggtcgggcggtgggtgggggtacgagacaatgagggggatccagtcagtgggctccgcacaaggaaggggaagagggcggttgcagcaacgccagcgtgtcggagctccgcgccaccgcagccgccacgctccacatcccatcgcccttgccaccgccgccgctgccaccggagccggctaagtgctgcccatgatgaaaccggagttgtgggcggccacaacaagcatctgcccccttgacgcatcgatggtgagacctagcgcaaccctcccagcctgaaccccagcgagaacgtccccatgaacgccgccactgcccgccactcgaagccaggcgacgacacgcagagggagaagccgaggatgaggagagacattgccatgtcgcgccacacgctcgtcgacccgccgccgccgccccaccacccgccccagtgtgctgccgggcgcgccgaccgcccgccgccactcgacgtacccgacggctagagaagagagagtggaagaggggaagaggaggttatagtgtatatggtaggtgggccccaccaataaaaaaggaaaatacatactggattgacatgtgtacgccacgtagaataaaaccgttctggattgggtcgagagggataaaaaaggggtgcaaatattgttttatgggccatcgccgatggttaccaaataatcactagacgggttcgtgcagcgtaacgctgcacggttagaaatatgaattggtgattatactattttatttttttatcatattgatttatcacatatgtaatacatgttattactttatagtctgagacgtgtgaccgtaccgtaatttttatcttcaattcttcaattatggatgtgtatctctttaaattttcagtcgtaatttaaaactaatcgacgcaactatcaacatatacaggaagaaattagtcggtaattcaaccaccatttcaacatgaggttgtacgcgtgtaagaatacatagctctgagacttgggctataccgctatagcatgcattttatagacacgtaatcactagtggaacaatagccccggttcaaataggaaccgggattaaagattctttttagtcccagttaaaaaacccaagggaactttttgatctttataaccaggactaaagatcatttttagtcccagtttaaaaagtcatccggccccactatctttagtccggtttaaagatatatatttagtcccggttgtttataccaactaggaccacatttgaaaaaaaatatagccgcacaccttcactctcgagacactatcttctcgtccaccgcgcacgtcttatcccttcgccagactcatctcccctctcctctcgatttcttctcctcttcacggccttctctcttggtggcaggtggtggcggccggtggtgcatggcagcacgccatgaaggccgtggagggtggcggcaggtggagtggaggatagcggcaggtggcgggtgggcggacgggcgaaggggtgggcgactacggctcggaggggtcggcggcggatctgtgttgtgttgattttttgttgtgtaaatgcatggtgttgtttatgattattttttgtgaatttgtggacgattaattttattgttgagtatgtgaatttgtgatatcaaagatctgtgaatgtttatttgatttgtgaatttagcgttgatctgtgaatgtgaatgtttatttgatttgtgattttgacgcgaaattaatatgcaaacaaaaaacaaatgaaaaaaaaagaaaacaaattggtgatgactctactgtatttatagtaccggttaaagttacaccccggttatttcacccggactaaagatagctataaatagtttcggattcgtagtcccggttaaataaccgggacactacaggccgtgaaccggggttaaaaaccctttctccagcagtgaacagaaaaactggaaaaggaaaacagaacaaatatgcatgcgtacgtaccgattctcttaggaatcctaaggaaatgatttaacttatataatacctggtatattgaatctatatatacaacagtacgatggcaaggggttaaccataggattcagatttcagaattaacattccaataactgagacactcataactagtcatctctgctgcaaccactatctttttctatagttgagccgtcttattttatgatgggagaaaagtttactcctccggttacgacacgattttaaaatatatctttttgactatattatttttctactataatatatgcaagaatatatatatatatatatatatatatatatatatatatatatatactccctcagtcctaaaatataacaacttttagcctcgagatttatccaaaatataaccacttctccaccaacattttcttcccaaccaatcagaacttttcatcattcaattttcccacctaccaccattagtgcttaaccaatcataaccctcaaccattcacttctacctactttcttaataaccgtgtccacctctaaaaatacttatattctggagtagtactttataagataaatagctagtgcatttaaattaaatatttttaggttattgatagttaaaattataaaaatttaacctcattcaaaagtcaaaacttttgaacaggagtgagtacatgttttttaataatggtttacagggtttcactacaagagacggttacaggatgaaaagttacatcttccaaacgaaaagctattctgtaaagtcgttttggagcgctaatctacttttattgtagtcttctacgattaaataggtgacatgatattctctagctactcctaccaagttgcagcttttgcatgctgttgaagagataaaaaaagattttgtgtaagcaacaatgtgctaacaaataattgactttttggcataaagggatagaagaggaaagcacaaataatattctaccttgtctgtactgttgtaaattttgggaaaatcacggtgaaaagaatgcaaaaagagaaaaagaaaataaactatgatgagcttttggggaaactggtgtgttttcaaatttaatcaaagggaatcaaaccaatataaccgcatttggcaaagatactttaaaaatgttatccaagattttaccacctaaaagcaagaatgcatagcatgctaaaccaatatggttgttatctctacaaagatagaaagatcatagaaagtttcattcgcgctcgcgccaccacatattaagctcgggttctacgccgatgcgctagggccacagtttcacccacaacaggacccaccagccacagccggtctggcatcatggaggccaacgcttcggtggacattgacgatcaacatgtctgcctgaagatctccaaccaggagtccaccacgagcatgtttcgctcgcacaagcagaggcacctcgtccggctcaccgacgcccagctagccctgcgccaagatgcatccacgtacatctcgcactcgcgttgttctagctgaactaagtagtgacgatgccaggctcagagaactatggcgacgggagaagtagcggcgacgcaggaaagagcacggccagctaaataactacaaactaaagaaagacaggaagtttgatttgaagcatggatgagaaaagaacgagatgctggcttaaatagggaaagaaagaggtattaaagcgagaaaaaagtactaattaagaagcaggaaacagaaaatgtaccacggtatggcacaagcgcagcggcattcagtgagccaagtagggggaaaagctagcctacgagaaaacatgtggccatgcatggtagcacgcataatacgcatgcaggcacgaggcaagcacaaacagctagctgtgcgtttgcttactacagcagctaatttttccaggaagcggcatgcattggtggaaccggttgagcaaaaaaaaaaaaaaacgagagatcaccggcacgtatacgcggggagcatcgaccatcgcgcagacaccggatacgccacctgaataaatatccaaccggttacccgacaagaaggaaattagaaagaaaatccatataacacgcggcaagcaacggagtgaatagaaaaaaattcaaaaaatcagaaaaatgggaacctgatcggagactactaggtaagtatgagttccgtaatcaaacgcaaccatttgatggtacagtggaacataggaccgcccctcaagcgcccagcagtagttcaaaccttactaagttggaaggcagaaatttcacaatgagaaaaatcaaatgatcagccaatcaaaggtactgacaaaaagaagaaaactaaaagaaagaggggaaatgatggtgagagttcacaaacaagtagttctggaggaaatagtcccacggatcctatggactggtggaagaagaaaagcattttcttcaaattgcaatattgggagcacttgtctttgcgccataatcttgatgtaatgcatatagaaaaaaatgtgtgtgataaccttgtttgtactctgttaaatgatgccaagtcaaaggataatctcgaagcacgtcttgacttggtagacctaggcatacatcaagaacttcatccaaaactggaagaagatagtcgttatatagtaccactggcttgcttcacaatgtctagagagaataaggaaactttatgttcagttattcagagcatcaagttgccttatggctatgcatcaaacatagcaaggtctgttgatatgaaaagctgcaaattcattggtctgaaaagtcatgattgccatattttaatagagcaccttctaccgattgcactgtgaaattgctatcctaacaaagatatcatgtcaattgttgaggagctatccaatttcttcaaatcattgtgctctaaggtgctagacatatctgaacttgccagccttaaagaacaagttctgatgacactgtaaaatggagaagttatttattccttcctttttcactatcatggttcatttaattgtgcacctggttgatgaagctaaattaggaggtcctgtacactatagatggatgtacccttttgagaggtaattaaatatgctcattctatttgttccattaaaatttacatattctatagtaattgatttgatcatgatatcaaacttcagatattttgttcggttgaagagctatgtgcgtaatcgtgcacatcccgaagggtctatagcagagcggaagaatgtttaacattctgtgcaagatttctcaaaggggttgataaatctagtctttccatgcccacaaattctgaacaaaaaagtatttgtttgatagttttggggaaacaataggctctgctcaagatgtgaagtttgatgcaaaaacacttactcaggcccatcgttatgtcttacgacatcttgatgaaatagaggattttcgtaggtatagtacctaactgaacattacctttaaaaaataaaatttataaaataatataaatatgctatttgtagagaatttctagaggaggagaagagaaaacaaaagaagtcagttttcacttcttttgaatctgacaagttgattaatgagcgattccatgattggctataccacaaggttagtataagttaggcaaaacaagtcagatcatgcatgtacttatgttttgtaaaattaatatgcctaatgtttaaaacccatgtttttattggttatgcttaatgcttgtggtcctgatccacgcatcacggaaaatatcataaaaatagctgaaaaaccgagtaactatggaaggagatttggtagattcttaattaatgggtttaaattccatactatttctcgtgagaataatctgcaaacttaaaacagtggtgttgttaatatatctgaaggtgatgccatcagctattatggccgtattacagacattatagagctgaactataatggagcatttaaggtcttcttatttaagtgtgattggtatgatgtgcaccatcgcgtgggtacgagggaagatgagtttggttttactcttttgaatttttcgtggggtatacacattggaaataagctgatggacgatccatttgttttctcttcacaagttgaacaagtattctatgtccaagatttgtttgacatgggaaaggttggagatgaagatgatgagatatgagttgtacatgatatattttgttgcatttatttgctgaaggcattagagttttagttatttacattcaaatatatttttaatgtatttgtttgttcaattgcttggtaatttctataagacacttccatttagtaactggagatatggagatgtgtgatctagagctatgtgtggtctcattttgtcattttaactggtatgcaatggttgtcttgttacttatatctttaaaattctaatccatttttaaatatagtgtgaatggctgcgaggtcccagacactacagggcttggatcttttgcagaatggagtgcaaaatcaagaaatagatataccaaggaatgatcagtatgttgaagaacagaacatatcaaatgagaattggtgcacaaactgccatgagtatcgtaagatatattgtttatttttctgcaaaattgtttcttatatactaacttttaaaactttgtagatcctgatggacgtattaaaagacgtcggggaccaacaaaattggcaaatgtttaaaatctttcaactggagttaagattattggcaaactggacccgtttaatgcaccttggtgacaattttt

SEQ ID NO: 14770 - DNA, 2590 bp, Oryza sativa
ccagccttggaggcgtactgtgaggcccgtcatcgcggggctgcgatcgaggcggggagagtatgaatcggcattgattcacttgtgcataagtatcggtagcgtgtatttgacattatattaactaattgatttacaattgctaatgcaggtacttcaaccgctccgagtcagagctcatgcccccccagtgttcgacgataggtacatcccgtacctaagggcggccgggttgcttggggtggccttggtcgtgagcagaggaatgccagtgttcaacgctcctgcgttgacagcacttgtggacagatggaggcctgagacacacagcttccacctccccagtggtgagatgaccatcactctacaggatgtggctatgatcttggccctcccattacaggggcatgtcgtgacgggcaggacagagactcctggatggcgtgcacaagtggagcagctgtttggcattccactgaacattgagcaggggcaaggggggaagaagaagcagaatggaatacccctgtcttggctgagtcagaacttctcacatcttgacgacgacgctgagccatggcgtgttgagtgttatgcccgtgcatacatcttgcacttgttgggaggggttctgtttcctaatgctgggggtgacattgcttcggcgatatggattcctttggtcgccaaccttggtgatctgggccgtttcagttggggctcagcagtgttggcgtggacatatagacagctctgtgaggcctgttgtcgtcaggcactatcatccaacatgagtggttgtgtgctattgattcagctgtggatggggttaagactaccggttggaaggcctaagtggaggcaaagcttcactccttggccctacaatgagccagacatggagaagacagtggcctacctttttgagagtactgccactgcacatgctcaccgggatgtggcatacaagcattatgtcaatgagatggactgcttacagcctcaacatgtaagtactttcaatatcacttctagttagatatttacttctttaattgagatactaaccaacgacatctcttcaacttttgcagattgagtggttaccataccacacaaatgaggcttcaagcctgtccttgaactcgatgtgcaatcgagactctgactatttcatgtaccagtgcccattggtttgtttctgggcagttgagtaccaccttccgcaccgtgtcatgcgacagttcgggaagaaacaagattggccgcttgaggacatctcaactggagttaaattacacaagtaaatatttcttatctttgtttgctttcattgtcaatgttcaattttgtaccatttaacccttgtcgatgctcactattgtttcatcaccttctacttgtctagatatgacagggtgagaacaaagaaggtgaaagactgggggctagagcataatagatacattgatgaatggaggacagccggaaggaacgataggtacatcgagactatacaccaaaatcatcttttctcagagtatcttcgttggctgcataggacatatagactgttcctccgccctacttggacggaagccgacatagaggatgaccacgactccgatgaggggcggaatccctatgatgtccggactagagttggatatcaaatggagcacgccccacttagagacagagtcgtaagttttcttgcatttgtcaaagttatttccatttgcaccctagaccctaacatatatcttctcacgctttcagtcgagagagctcctcaggaatgtgaatgaaatggggcatgccctccaagctccgaggggtggtgaggacacggagaacacactccacaatgttttagaggtaaaatttatttagcactttgcattacttgagttatgcctaacaaacttctttttttttgaaatgcagaaagttcgtcaaaggtgccgaaaacttgcagcaagattaggttgcaggtcggttggattggacgacgtgtaccaaccgcggagactaccaccaccactacctcaatccgtgcgtccaagtaccgctcgatactccatcaggatagaagagcgtgaaggagttggtggctcgtcgtcgtcacgcattaagcaaggcgccggcaccacctagcgatgacgatgacgacgaggacgaggaggatgaggactacgtcgcaccagacgccgaggagatagatatgtcgcagcttcccgacgcgcctcaggggacgcaacccacgcaataaaacttgcgatccactcaggcagcaaaaaagaggtaaaatgagcttaccattctcaaatgttatttgatttcccttattttgtttttaaaatgttttaaacattggattttcaaatgtaggtacactccgggctcgcaagcaattcggcgccaacggaagaagtgatttgtatgaagttaatctattggttggtagtatgacatatgtggtgcactttgtgatataaaatgtgatggactatgtgaggactatgtgatggacttttgacattgtttcatgtgtggaatataggatggacttttggcattgtttgatgtg

SEQ ID NO: 14771 - DNA, 22933 bp, Oryza sativa
cagttgtaagaatggtacatttaacatgtaactacactaaatttctcatgtttagactaattgataggctcaaaaataatccaccaaatatgggcacatttggctgggatctagcttcagatccaccttttctagagctgtagtgtaaccaccaacatgcatactagttgcattcacaaaaaatgactaaaattacacatgtaactactgtttatctgaaatgtaattacagaataactataaaacagaaatgaagccaattcacacataatttacttttttttgcaggaatgaagccaatttcagaatataaacataaagtgagcttggagatagaggggactaaagaaaaacacaagatgaaagaaaatgcaggtatcagatagaaacattaaccaacaaaatagtctgaacaagcataaaaaaaaatccatacatttggtttttacagtgagtcagaaccaaaaatacatatgtatatacagttgatttgtaatgtaactttgtttttcacagtatttgtttctatatttttaataaaatagagaaagttacaatgagaatttaataaaattacacatgtaattatagtgtgtgtgacatgtaacaaaactttaactaaatgtaaaagtactctctgacactttgaattacacatgaattttgatgctataactatttttttaatatttcgcgggagcaggaattatttcaaatgcagaatcaaatgagaatagcaacagtatgacccaaggtacaaaagaaaaaaaatacaaatttgctagatcgtaaaaaatctgacatgccagtacttaccaataaatgtgacacttcttgcaggtacagatattcatcaactacaagatataaggggaagtttaaaagaaccagagaaggacaaaacagaaacaaagcatattcaagaaagaagttctaccatcacacaaaattcaggtaaaaaaaataatattctttgactatatgtattctgcaccaaatgaaaaataattttttaattacaaatagccaatccttcatgcattttcaattgacaggaataactgcaactcaaataccacagagcccagcattgctacatgatgagttaaacatgctaaaactctcgagcaacaccggtaaaatataaataaataagcaacatacaaaaaagacaattacatcattttctctgatactaacaaattgaaatgcaggtagcacagttatcatatataagtctcatgcaccaagtgataaacagtccacgcataaacatacaacctaatatggtaagaatatagaatgacaatatgaatatcattgtacaacaacaaatgtttgactatgagaaaaaataaaaatgatgcaggcaagcctagaaagtttcacaagtctccttcagacaccctcggcctttcatgtaagtatttttctgcatttaaatttttgtagagctaatttatcatattcattgtacaaactaatttttttttaattttgatagtgcagaattcaatgatcctaacgacaagcaggttttctccttaaaacacagagctgaatgacagaaacagtgcaatatcattgaccaaacccgaaaatctatccatccatctgtgctaatcttacagaaaaatcaacggtccaaaaaacgacaaatccagccaccaaaaatcattcgacaaatgtatagcaatttcgtctattattggtgctaccaggggagacataagacgcattgctaaacacattcttgaacaaagggagtatcatccgacggtgaaatatacaatttcgaattgacgttttgtcattaaacaacagggctaaattcacatagcgagggcaacattctgcaatcttggattggtcaataaacaactggaagacaggcacaagacaaccttcgctccaaactccgactacttatctgcggcaggcacaaagagcccaaataatcttcaagcagtttagctaagttacattcattaggagtacaggagcttgtgcattctgttctctgttgcaacaaaatagaaccggagaaaaatgagcaagcatagttgctttccacctcaggctataggtggctgcgcttgctgtttctgtaccatggccttatgcttctgaccaattatgtgaaactcataaactttctggctgttgacgaccacattgcacacggtacatattttcacttctccttgagctgctccagcgtcaagtacacgcctcctcttcacctccagttcctctggggttgctgcagcactcttcttcttcttcgtttgtgcagcaggaatcacactggtagtgacactagtagtgacaggatcaggtgccatatttgctgcaagagcaacagtgtttggagtacttggaggctttactggtttaggtgtgatagagtcttgtagcctctctaagtttttcttgtgcttctttcccgtcttatggatccttagaacttctggagtatcgcactgaatcttgcaaacttcacaagtcaatggttgcacaacctttggctttttctttatatgctttcttgaaacaattttcggcacaggatgcccgaaatgggcattccactgagcagggtgcatgcctggggctgcaattgctggtgccactccattcgaagatctggcggctgctgcctacagatacattgttgttgtgaagctaaaagcaaagaataagtatgaatataaaacagataaccagcagacttatagctccctccttgataagatatggcacataaacaaacaattacaagacaaacagaattatggatttaaacaggattttggcaaatgaatgaaggatagatgcgacatatcctaaataggttcagcaaatgcttaaggctaaaaatctaaaatcaactacaggaattaaaaatgacacacgtgtgttataccagaatgacacatattataaggattgcatatagaaggaaaacaaaataaacaaaacacaatctatggaacatttaatctttgataagagtcagtaaagcttccatagagagaatgagctctaaaataatacaaggatttttgttctcatcctatgtcaacatgtatcgttataagtcgattattttagcattatttacaaatttcttctagtcacaacaggtatgatttattttccaaggtgattgttccaacggacacttgatccaagacttctgctgtgttgtgcaggaaaagcttcacatactactaataatgttcacttgatccatacttaaggttctatttggcacagctccggattcgagatttattggagctgagtatttctagctccacaaatccatagatttagatctacgattacgttgataacatttggattaatcattttattcccattttatatgaaatataaaattttaaacaactataatttgacatacaatcttcaaatccagcgttgatctgggatctatagttgtaccatacatgaccttaaataggtcacaactcttgctttctgctgacactatggcagatagggaccaaaaccactttaatgacgagaaattacagcaagctcaacatgaactccactgaaacagattatttggagggaaaaataagaaaataccaaatggattatatattatacatcatggctctaacaaataaatatattgacagattatttcaattatatgttcatctttttcagcaaaaaaatattttgtaagttttttaatcatataacactcgcagaccatacatgttctatagcttggcttgttaaccttgaatttattgggacctccagaaaacacgtcaataataggaactacagtagttgctgtctgaggagcataagcaaagttcaagtaactaagatctgactgcaagatgagagatgcttcaacttttgcctttgctgccttctatgtaaatacacactttagatttgcagaaataagagaactaactgaggaatcatatgtcgcattccaacaaaacgtgccaacgcaagcagtgtggtatgggagcattacaacgtgcatgaacatcaaatcagaccaccaaaactattgctcaattgatgcattggctgtctaaactctacagagacatctagcaaagaagaaaatcagcaaccttttactaaaaacctaatcagtagtagtagtctagattcagatattagagcactgctttattttaattttcaaaatgccttactttaatcagtacagaggatagtaagtttcaggatgacataagacatatcttcataaacacatattgtaagatcaccacaagcaattgagtgcatattgattaatttattgtatttgtttcatagtttgacaagatcaactttgtggtgtgaattgtgatccaagtgtgcaattacaactacaacaaccgagttattattattgttctaattggtttttcatcatagaatagaatgctataatcaccacagtagtaacatatcgaatgactaatcttgaagactgtatatggtttgttttgctgcaatcttttgcccgacattccaacatgtgcaattgaagaaaacaatctcaaggacctcagaaatgaaatttctatttctatatgtcccaacggtgtccacacaataagacatgaactttactgaaagaagtgaactggtgtaaccaagttagcaaagtttttcaaacatgaaaaaaacatacaacaggctaaaataactataacaggcaaatggtatacttgattatcttttaactttcttgaaacaaaactcctgctaccatatgctgatacaatcctttggttggcacataataaatacaaataacataaacattaataaataaattaattaaaaccagacttcgcatatttgaaacatggtgtcaggtcaggcaagttaccacttgtttctactgtattatatatgtaaaacccaataaaattgtaatattatgaaagtgctttttagcacaatccaaacatatgaatttaaagacccaaattaactatttcaaatattcagttttggaagtttgccatgaagtatgtccagaatgacattttctacaattgtttcaaaggaaaccaacccaactaaaaacataagttattcagttaaccatacaggcataagttctccaatatctccaatatcaatgcgtttcaacgatacggaaaccataagatcgaactccagatagtcaaatgaggacaggtaaaaagaatgaatgtttcaccaagtaaaaaaaaaatgaggttacgtgatagccaaaaaattaggatgcaagttttgccattacttaggatgcagtatacacttaatatgtctcactgtgaggtccaaaggaattgcgcgtaggcaataggcatatgaaactgtggcaagtatctgagtaggctgcctaagctttgggtggcacggtagtggtcaagtgaatagtactcaatatacgccatatatttttacaaatctttttacaaatattatctctaatatatgccatatatgccatatatttttacaaatcttatctctaatatagaatgtatgttatccttcaaaacaaggcttcgatttaatcgattcatcatcttttaagatttcacggaacaaactgaaattcgtgtgtcttggcttatccacaaacaagagtctttcatggaagcaaaaaactcccatgccacagaacatttcagtttgcacgaaagaattgtgcttcacagtaccatgattccacaaccgctaccaacggatgaactaaacaatgtggaaaacacctaatccatgcaaatgtctgagtctcacatataaaaccaagttaggactaatcgaataacaggtaatcccttagcgagaaaatcgccaataggccatcaaattcttaatttatgcctaaaaatgacatctcaaaccctaacacgcctgaattcaccacaaaacaatcaggaactaagggacattgaatcaaaagagaagcagggtggatcctgacctgcgcgtagcgctgaggatcgaacccaaagtgcttcccggcctccttgccagccgccgcggtagccgccggagcaccctgcgacgccgacgatgccggggcctgaaacgcctcaccggcgccgaagtagtaccccggcaggcccccggcgccgccgctgcctggcccggccgcggcggggtcagcgtagtactggtacgccgcgtaggggtcgtactggccggcagaggcggcggcggagaccgcggtggggtagtagtaggaggatgaggcggcggtggcgggctccgaggcgggggcggccgggttgtacgccgcgtaggggtaagggtagccggcgtaggggtgagggtagtgcgggtggtggggatccgccgccggcggcggccccgcggcggcggcgtgagaggcggcggcgccgtagtccatgttggtgcggtgcgagtgcgagtgcgcgaccgtcagatcgcggctgcgggcgcacgtaaggcacaggacaatattgtcgtgtgtttcctttttcctctctttttttttacgcgtcttcacaaaatgcttgctcgtttcaaatttgaggaagaagaatctcgttgatggagggtcaaatttcatcagggagaagaatttcatttgtggtaaatttcaggggaaaaggacttgctaattttggttgcaacattctgttatctcagaatgcagataagctgagtcctacgaagaatgggtagcaagatccttatatgttgtagtcaaattagcgaaatcatctcaagcacatatatgaccgtaactattttgaacacggttaaaccaaatgtataagtattcttggttagatttattttctgttacatcatgagttttatgtgtttccttagtcctatcaatcattgcttgagttaggattgtgtctagtctgagccattatgttgactttcatttaaaattattattccatcagtcccaaaatataaatatctagtactggatggatgggataatacatattttcatattccggatgaagatagtattaaactttccattctctgatttaagaatttgatatccttgttatatatttaatcatacccatagctgtatggatttgatttcattgtgtcagtggagtcaccaacttacattggtaagatctcataggagcttggtaaaatgattaagtgtgtgtgactttcaagactgacacctaatagtttattggaacatgcatatttttacttgtattcttgttttttactaaccatgatagggatacacaaaacaactagagatgattgtgcacaacttcaacatcttcattaagacatgaggacattgagatatgaggaccgaccaacattgggcatataagatatgtgatgatgttctacataaaatcattagtacactcatattttgaaggaaattacctcatgcttacattaaatgggagctagcaatagataaagaatttcaaaagcatgatttgtctaaaaaaacaaaagctttggtgttctaattttaaaaaatgcttcatatgattgagaatatttttataggcatgataaaatacctcaaccttggaaatacatgaaacatatttgagatatatttatgtttccatggattatgccaatattttgttcattgaaccataatatttcgaacaagagagccaaatcgttacatcatacaccatgatcttctttactacaatgtggtttacacgaatgcaaagaaactaaagaaatgaggtttttagggttaacaaagaaattttagacaagattgctcgttgaagttatagttatctttctcatttattacaacttgcttgcaatgctgaagtaaaaataaggaagacataagtgttgatgtgaaaacacgacggcctgggagatctgcttaattccagtgcaggtccaaggctagactcgagagtgtcaagggcgtgtcagctgatttgatcttgcaatcagtaagaaagacaacagcagaattagtcagccgataaccgatcgaccgagaggccgataaggtattgttggtaatctcagccgatggagttagaccaaatcggctatggactgagtatataaaagaatattgaactccaaatatgcctaattgactgtaatactgtctatcaagtttgataaattggtttaagacaatatcataaaagtagccgatgtgacagtatttagaacaagaaagaaatgtactagttaatactccagtacaaacctatataaataaattgatctatataaacatatcaaatagaaatcagcttgaaggtgcaagaatctagccgatactgactaaagcttaatatgcttatataaaatgatctatctatataagtggcgaatatacatgaaacaagtagtaaaacatgcatattaggtaagatcggctgaaaccccgatactatcattattatgtctaattgcaagctggtttgaatggttttaaacacgactagggatgatacatctcaaagtatgaaagaagcatacagtctagacaatcaagcaattaaacacttttcaggatggtagatgccttagctaatctaatgtcacgcccagaaattcccgaatagaattccaagtagaatgtgcattaaaatccccgtccaggaccggccggggtacacaaacaacaaagttgacatacagatccacgtcttacaaacattataaaagtcttacatacatgcagcggaaaattaaaagaaaattggagctaagccttgacttggaccgcagcgggatcacctactccacaggcatcctcgacggcacgaacgaagcctactcctcggagaagctaccatctgacgcatactcaaactctggtgtttgggaaaaatagagtaagactgagtactacccactgtactcagcaagacatgccggaataggggtatgatgcagggaaatatcgagggatggctatagtggttcatttgcataaagcgagcatttataaacagtagttgaaagcagtaaaacaattgtaataattaatcaatattaatcatccactgtccaacgctataccacgttgcaacaggcccaaccatccacctatactattcaattccattagactagactagggtgaaactaatcacggtgaatctggttgaccgctcataaccgcgggcacggctattcgaatagttttactctaatcagagttgtacaactgtacccacaagacacagccccacgacacgtttccgtgcaccgacatgccaccacgacatacctgatagaggccgtgacaggacccttcgcataaccccctctaaccaagcacaccacacctcaggtttcacccccactcctcgcaaggcagcgggcagtcccctctcatgcctaggtgaatccggaagccgcataggccgtcgcagggcccatccaaactccatcacacccacccttgcctggatgcgtcagtcagaggaaagctacactacaagcccagccgttgcccacgttggcttgtggtaagtacggggaattctcccagggtttcctgcgaaccggtccttaagtgccatgggcgcgactagcaaaaccatgcacccacagcccaccatttaacatattttaatgaagcaacaccaggacggtggctctaatccaatgtcaacactagaacctgaagtctagacattaatataattttccccattgtgtgctagttgaactaagtatggctaagcaatccctagtccaatatctagtcatgttatatcttaagctaacaaaggaacatggtacaaaatagcatggctataacagtaggtaaacatcccatggtaatattataaaacaatgcagtatttgaaggaaaacaatagagcatttgcaatataggatcaacatgttcaagtgacaagcatgacttgccttgctctgctgctggaggaacctcggcgactatttcaaagtacaccggagcgtcgggagagccggaatctaagcgacatacaaagcaaacaatacaaacaagctataagactactgaaacagagagcaaaaccatttttaatggattctacgcatttttcttgatttactgagacttgaatgggcttaaacggagctcggatgaattagatatgaattttagaagattcactgtgtttttactataaacagaaaaatccttaattgatttattgcgcaataaataaatcccgggagagagagaggcggcgccgaaatgcgggccccacatggcagtgacatgggtggcggtccgcggtggaccgggtctacggaccgggaaaggggcggcgcaccacgtggcgctgacgtggcgccgacgcggcggccacgcggcagccacgcgggcggccgaacggatggccctgatccactcggggtggatcggacggcggagggggtggcactcggccggcgcgcacgtgcggctcaagctggcctgacggccatggcgcacggcggcgcggctcgacgcagcggcggcgttgcggcgacgcggatggcgacagcggtggctaagcggctaggcggcggctaagcggcgtaggagagagggagagagagagagagagaggaagagaggcctcaccgacgacgattgacgacagcgagcgacggagggcgatggcgacggcgggacgagctccggaaccacctagtgaacaagatgagaggggttagagggagagaggaaaatgggagagggcgaggacgccggccgaaggcggcggccatggcggtcctcaccggcgcacgatgtggagtgggttccggcggcggattctgacggggaagaggtggacgggatgatccacacgacggcgaacgtgacggcgtcgacggcgtggctcggcacggcggctagcggcgaccggagcggcggcgacgccggcggagagaaaggcaccggcgttagggtggtggagggcacggaagagctcggcgaggaaaaagagagaggggatggcggtggtgcttaaataaaggaggaggggtccggacgtggccgggagaggcgggaatcaccggccgacatgggggagtgggagaggagagagaggcgggattcgaaaatcgaatcccggccgtctcgagcgcgggcgcgggcgggagagagagggaactgggcgcgggggacgctggtgcgagggcgacgtgggcgacgtggcccgggagacacgggagcggggtgcggcggcgccggctggaggtgggagacgggcccgacaggtgggccccacctgtcggcgacccggggagagaggagggggctcgggcggctggctgggccgtggtcttcggctggcccagcggggagggggagagaagagagaatgggccggcggcccattcgaaagagaaaaagggaaaaagaaaaagaaaaagaaggaaatggattttcctgggattaaatattgcttgtgctcaattttaattggttaaaattatttctagagctctgaaaattccactaaaaatcttgttagcgtatttcgacatgtagaactcaagaaaaattccacatgccaattccgattattatttgcattgatttattagggtttactcttgctttacaccggtattttcttgagaccatttataacttcaatttaggcttgggaaagaacttcagggtgtgatatctaatctagcaagacaatttagctgaaaccagcataaaccctaaagtgagcagcagccgatagaggtaaattgagaagctaagaatagattaactaagacacatgatagcaattactcgcgatatcgagcctaacacgtctaaagcgacatgttagccccaatagcaccggccattgagatgggttacctcttgcgaagaactcgccgaaaacgaagaaaagtaaaaagggtagcgatgtgccgaagttgtattggattgtctctcgtattgcaatgttatggggttcatatttataccccgaatacaaacttagtccattatggacatgactcaaacctttctaaagttaagatacaaataagaccatatatggcggtttcttaccaaatctctaacaaaccgactcaatatcctaattaatagatacaattgccttaatcgagctctatctctaattggcaatgacggttatctcaatcttggcccatgtcgagcccaagtcataccataatggttgtatcagccatctgcctcatctacctagatctgactcatactctgttttcagccgatacgatatccagccgatgcgcagtccgactcgtagatcaactcgatttcacaccgaatcctctttgatcttattcctttttctccgaatctaatgcaaaatttcgttgttaacaataagaaagcaatgtctcttacatgtttcctaatgaaagggcatattctagaacaataaaggtctattggatttggctaaacatcggtacgtggttgattgtattagtgggaaaaagttggattttgttgtattttagagacaaggaaaaaggacatgtctaagacaaatccagattgcctcacgggagcgtggattttatctagcattgtcttcttcctcgtggacaatcttggggtatcatcctatggataaaatgctttaaagatggacatatctctcattgttgaaggtaggggtgggcacaataaactgagaccaaagaccgaaaccgaataaatcgagaccgagattgaagtaccgatctgtcagtcctcagtctgttgatcggtctgggacgtggaaagaccgaacttttatttggtgcttcggtcatgacccttggtcaaccgaacagaccgaactctagaagtagcagcaggccataggaccacagttgctccagaaccatagcccacttcacccaggagatcaggatccaagagataacagactgaggcatcagagagagtagtacatgcacaactgcaccatcgaaaacccaaatcgttccccactgccctcctagcaaccgccgcttcaccctgcgctcgtgctatggtgccttcctgccgccgactaccaccagcgccgcacctcggcgtgcctgcgcctgctgccagcaccactcgttcacaactgcattgctgccgtctcctacgtccccctgttgttcggcttcttcctttcgctcgaatccacataagaagagttggccccaacgacactcttctcactgctgctgttgtccatgtcctgcgggagcagtgcgagacgactcaatcttcgtctcagcggcggcggaggcgagacctcctgtaatgtcacatcctgatctttgtttcaggatttataaattatttaataaattattattagaatttatattaaatgttcattaatttacaagtgaagttaaatgtgggaaataaaatttcctaaatataaagcatggatggatttaatttttattaaattctccatgattaagtatactctctgaaattttctcggatttttcggagctcaattcctaaatgatacaaagaacagttcagtaattatttgatcattaatgatctaattataattgttaagagcttttcttgtttaaaaatccttaaattataaattgttgtttaaaaggaattagtagaaatgatcttaaaagcctaaaagagaagatttttttttaatttgctaaatctcaatataaaattgggctagataaaattttgttaaatacttctcttgaatctttagttcctagatttttttgggatttatttgagccaagaaagtatttttaataaatggaattgcatttcatgaataatttaaattgaaaaaggtttttaaaaagtctcttttggctttgggccgaaagccggcccaaaacctctctctttctctctccctcctcggcccagtcggcccagcccgccgtcgcttccttctctctcggtgccgctgacaggtggggcctacctgtcagggctgtcttcctcctccagccgtcgcccggccgaaccctagccgagctgcgccgccgccgctgcccttccaaattccgtcgcccctctctatttccggtcaaattgattgagggcaaatgatctttgagatctcctcttccttttctcttttggaaacatcggctaattttctttggaaaccggtggatttgagttggattcggattcatctatctcctctaaccctagactttcctcctcgccgccggtcgccgtgggcctccgtcgccgcctcctagcctctataaaagcatccctgggacctcctctatccgccgccacctttgccttagcccgccgtcgcgtctagcgccgcctccgcgtagccctagccgtcgccgtcgttgccgtcggttcagccgcgccgcgccgccgttgcagccgccgtcgtcggtcgccgtcgccaccatcgggatcgcgaggtcgtcgccgtccccgtccaccgcttcgccgccgccgaagaccgccggagcaccgccgtcaccgtcgacccgaagaccgtcgccgcttcttcctcatcgccggcgccgtccgttgctcttccgccgttgttttggtcaccggtgagttcgccgcgtcgccctctacccgttggtgtcctccgtttgcgtcgtcgcgccgtcgttcgccggtgagcatgcgttgccgagccaccgccggtgatgacgtcatcgctgacgtcatagctgacgtcatagctgacgtcatcgtcgctgtccccgtagacccgctgtggaccacggtagatcaagtcgatctcggccgcccgttttggatagaatcgatctcggccgttcgtttccttagaccgtcccgtgcacccggaccgcctttgatgacgcaataattcccttttctttttcaaaaataattcattattgcgtcataattcaattaaaatccatataaatgctttaatccgatttaatctttgaaaattcataactaattcattgtaactcagtttaatgtggttcaagttgcaaaaattatataaaataaagatctacatattaaaattatccataaattgaattaaatttatttaattctttttaaatgggctttaattagatttaatcttgtaaaattcataataaattcatatgaagtcagaatgaggccgttcaagtctcataattcatctaaaattatgatctacatgtttgtttactttatatgtattgtttatttggtttttattagtctttttcttcgttttgcgtgttagcttgtcgtttccgtcgttgtgaaggttcgtgagtgcgtcgggagtgttcagaagattaattgaagaccgattattgcaaggcaagtcacacagatcctaaacacaatcctttgagcatgttgatcctatatttaaattctctatttatttcaactgtgcatttattttcgaatgtcactgggtggtgtgaatctattcctttgttatggcctgtttgcattgattactttattccttgataccttgggttattataacttgactagttgggctatatatattggttcagctagatattaaatatgattgcttaaccatgcttagaaacattagcacactattgggataattaatgtttcattattatttaatgatagcttaatgatagctcgcgatggtcaatcgtgattggttaattaattacttgccaaccaaaacttgataatggtgggttgtgagcacatggttttgagagtcgtgctcatgacaattaaggaccggttcgcgaggtactgttgtgaaacattaaccgtgccaaccacaagccagcatgggcaacgactttaccttttgtatagcatggttcattgcggagcaccagactgagaagtggcggagataagcccacgggggtcgctggggagtccatgccttgttttataagggggtgattatgatccaggaatggtgcactgtggtgagttgtgttgtgcagagggtattgtcacagcctctattcgggtactttccagtatcgcgacgcatggtagacatgatgttgaggctgtgtcttgtgggtacagtggtacacctctggccagagtaaaactattcgaatagccgtgcccgcggttatgggcgggttgagcaatgtttttcgtgattagtctcacacctctcacaataattatggatgttatacctggtaataatttgcttagctcctggtttggagttagatctgtacagccgggtatggttgttcagaatggttgggcctgagtagcatgggcgtgttgttcagtgttgattaaaattaatgattaaagtactctactgttttattactcttaaatgtttgctaaatgctgcttttgcaaatgagcctatattatgccatcctttggtatccttgtgcacttgcatatttgctgtgtggcttgttgagtatgtcatatgctcattcttgcaataatcaatcaacctcagttgaagaaaaaggatccagaaggagaagacgtttggcttataccccagttgagctgcctgtgggagtggagctgaagccatcgctagaccgttattccgctgctgatttcttttcttttgtaagtgtgtaacgttattattatgatggatttgtatattaaattgtcagtttgtgtacctcggctgattcctggacgaggattttatgcacaaataagttcggaaattactagtgaatttccgggcgtgacatgtaatcctacctgctgttgtgtcctatactccttcctactaattaagggtgctcggtcaggtcaggtaggaccgaagaccgaaccggtagttcagttaaccgaactctcggtctaagaaattttgttgtgttgatcggtcatcagtttctaaaaaccgaactttaaatagactgaacaaaccggactgaaaattctgtctagaccgaatgcccaccctagttgaaggcgaatgttacctaaaattccatctgatcaacaaagaggataatttcaaatggattctcatggcggtatatagactggcacatactctaagggggatttcttggttgaaatggttcggacatgccaaacaaaatcatcttcccactctaatggcaggtgattttagtatactcaggaaaagtactaaaaaatgcaatgatcgccgcaatagccgttgtccatttctttccagtgttgtcattgacagctttgatttgcgagaaatcgatctcacgggtagaaaatttacttgggcagactcactattgacaccaacttttgagaagttggatagggtcctcatgtctacggagtgggagtccaagtatcctttggtgccggtacatgccaaaaaaggcttatttgatcatacccctcttctcatggacactgatgcacatgttttcacggggaatatgaagtagttcaagattgaacttggatggttcccgcgggatgatttgtatgtttatgtggtcgagatatggaataagccaatgaaacggggaaatgttgttcaaaggtggaacattaagatgaatgccttacgacatcatctacgaggttggattgcacatgttagtggcctttatcagaaagaaaaggaaaaattgcagcacactattgacactcttgatatcaccgcagaagtttgtgttctaactaatcttgaaagaccgactcttattcagtccagagatcggctggcgcacctacatcgtgaagaagaaattaaatgatatcaaagcgataaagctaccaatgttctttttggtgataatctatactctaaaaagattctaatggtggtggcgttggtatttgtcgcgatcacagataaatccgcaagagcatggataccgctgtagcacttcactttagagtatttcaagggtatgaaattacagggaacgtgtgtgtataatctaataacaggttcatccaaggacaacatgtaaatggaaggcttaggatagagaagattcctatggattaagattcttgaattaatttaaggtaaaactttatctcttgcttcggtcaccggctttcccttggtcttccaagtgaatctggaatatagttctgtgacataccgaacgtggaggattacaaagaatggacatggttgtctccacctgccgcctacctctatacccgcggagtacacaacaaacaaatgtaacatctaacctagacatcacgtctctatgttattgattataactctagcctcgcacaagatctttcttctttatcctgaggtttagtactatagcgctttataaatattaaatgatgaacaagtaaggatgggaatatatcttacttaaacaagaaaattaaatgaccaaaagaaatctcgacttacttttataaaagaagtatccgccgaggtacaagagttgagagagtgctgacaaccccaagactcctccaaaacttcccctcactctctacctatttcctaacactctactagagagttgccttgaatgaaagtcacagtccttcacttgagttgtgtgttgtgaagtgaagtgagaagctccttttatagtgcttaatgacggttgctaatgtcggtggttaaggcggtttcatccacaattgccattagcagccaataggggatcaccacgcggaatatggtggcaaggggcgccaaccacccctggttcagtcgaatcctggtttggccgaactaggataaccgccacggcccaccgacttcctccgtgcgtatgacatgtgggcccttatgatgatgaatggtgactttggcctaaattatgttggtttgctctgatttgtgggctcttcaatccgtgtactcgcgtctaattggtcagaggtgtattttgtcacatggcgggtgcgttgtaagggcaatatactcccattgtagtttttacacattacccttgaactttttaatattacataacaactaaatctaaatagatagccacatataaaattaatttgagatgagtattccttgtagagaaaaggtgggtaacataatcatgaaaaacatgctttcatttttttaatgcattgttatgatatttttttccttttatccatatatagcaaagcaagggcacttagctagtcatactaaatattatcacttgattgctaattgcaaacataggaataacttttggtttgcatttaagcagcgttgctggactgccgatcttcttcagaagtgtggtatcgatagccactctgcttgccccttttgcgctcaggagcttgagacggagaaccacatcctcattgactgcgtgtttgctcgacaggtctggctccgtgtgatgtcccctcctggctgggctgccttctctccccctcgtggcagctggctctaggattgtagtcatcctccagggcctgtttacctgagcacctccgcatcggctttgacttcttggttctcctagtctcctggcagctgtggaaggaacgaaactccagggttttcgaatctgcgctcacttcggtcccagtggttctggagtccatccgcttggagggccagctgtggtctttagccggcgttgctatttttggggatttcttgggagtgtagcgtggctctgccccctcccgctgtctggcgttgcatttttaaccgtcatagtagttcctagcttcaggtttttttattttgccttttctcccccctgggcataagccagtctggctgattgctttgtgtaacaaaaactcttttcttgctaatatattgacgtgcaatccatttgcgcgttcacgaaaaaaaaggaagaaacgaatcattagccttgactaggatgaaggaaaatttgagggaaatgaagccttaaaaatttacatcacagagttttgtattaaagattttggaccactagatgtgaattccttctctctcaatgaaaacagaaaagaagacatcccccaagtgtctaaggcataaaatgatcattttattgcatctttctctaaggaggaagtaagagagctgatttttggtatggaaacaaataaggcgtcgggcccagatggctctccggctgaattttaccaaaaaatttggaatgttcttaagcatgatttattgcacatgttcaatgaatttcatgccggagatttcccaatgtttagcctcaattttggagtaatcacttcatacccaaagtaaaggaggacaaccaaatacaacaatatagattgatttgcctcttgaatgtcagttttaaaatctttactaaggtgaccactaacagaatcaactcaaaggctggccatatagtgaggccagctcactaaaagaatcaattcaaaggttggacgtatagtgaggccaactcagtcaacctttatgcaaggacggaacatccttgatggggttgtgatcccacatgagactgtccatgagttacacagtaagaaattgagtggggtcatttttaagattgactctaagaaggcttatgacaaagtcaaatggactttccttctacaaaccctacatatgaaaggattctcatcaaaatagatatcttggattgagtctttcattttgggtggaagcgtagctatcaaagtgaatgacgatgtcgggcgtttctttcaaacaaagaaaggacttcgacaaggggaccctttctctcctattctttttaatttggtagttgacatattgactgttttaatccaaagagtgaatacaataggaccaattgatggcatagtgcctcatctgattgatgggggcttaagtttgtcgattctgcagtacgcagatgacactgttcttttcatggaacatgatttatcataagcacataattaaaaatgttgctaaatgttgtcgaacaattatcgggcttaaaaatcaatttccataaaaacgaaatatattaccttagcgaggccaaagtcatgcaagggcaatatactgatctttttggtcgtgccatcgataacttcccattttgctatttagaatttccaatgcactattggaggctaagtaattttgattagaaagaagtgctagaacattttcagcaatggcttgctagttggaaaggtaagattttatcacttgggggagactcacactcattaattcagtgctcacaagccttccgatgtatatgatgtccttctttgcaatacctaaagatgtgatcaagaaaattgattactttcggtcaagattttattggcaaggagatggtcataaacgtaagtatcaacctgcgagatgggatgtgttatgtcatcctaaagatcaatggggtttggttttacatgatttggcatgtaagaacatagcccttcttagcaaatggttgtttaagttgctcacaactaatgaagcacaacaacaattgttgtgtaacaatcgggttcacaaccttcatctcaagtttggtggaaattgggggattcacacttttgggctagtcttatgaaggccaaaccggattttcttaagtttggcttcttcactattgaggatgacactcaagtttggttctaggaggataaatggtgctgggtaatgcaactttgcatgagcaatatccttgtttttacaatgtggtaagacataaacaagccaccatttcagatatctttcgaccaaccctttcaatttcaccacatctggataattggctctaagctagtggcatagaatcatttactcccacgtatcgctaaatgagcaagatgaatgtaaatggaatctaactaccattggtggattctcggctaaatcacattatagtgcttcacttcatactggtgttcccaatattaaaaaaaatctagaaactaaaatcccctcttaaagtaaagattttttcttcgtggtatttgcatcgtggtgttgtgtttacagaagataacctagcttaaagtaattagaaaggaaacaagacttgttgcttttctctgttttctaaatgtcggtttgcctgatcgatttggtctcaaatccactttgcggccaacatttgtgcgccaagggatgcgtcacatatgtttgggcaatggattttgagtcaacccttaaaatttcgaactctaatactgattggggtggcaacagcttgctggtctatttggctttgtaggaatgatgtggttttgaaagaaaactttatttcttctaatccgcaggttatattcttgattacacgatggcttcatgcttggcttaattttcaaaggcccattttgaaggactttactgttgcggcttgttttcaattggagcaggtagccaaggagtttttttcaccccaatgtttgggtggcgttttagttttcagataaatggcctttgatttttacagctttttctttagcgatgtgcatggggtgttttggttgtgtgaactttgttgtgcagagaccggaagtgttctcagacatttgatttcaataaagtttccgttatcttaaaagaaaaattcttgatgataaaaaactgtctgttgttttgcatagacctccaagatatagtcgttcacttataatggtcttgtataaataaaagtaattatgagatctgaacccttctgtacatgagtgttgtctagaaagtttgtatgcagcggtgtgaaatgattcctttgtcttaatgttaatcatcttttttttaaaaaaaagataagagaggaaaggctctcatagcaaaatttattaagagatcggtgaggctcgaacccgcctttctcaatgctaatcatcttacaaatatgtcacatgtattcatcctcatcatcccaatcaataaatttataaggttcatacttgatatcaacacaaggatgatttggatgaatgcacatgacattattgaaaacaaattctacagctgttctatctgacagagtagcacggaatccactgatgcttgcatggatttgtttgaggcttgacaaatgccctatgccaaaaggtaactccttttgt

SEQ ID NO: 14772 - DNA, 9568 bp, Oryza sativa
agtgcttgagaactatgaatgtcgtgccactgatgacaattctttctttagcggcactccgaacatgcaagtaaagatgagctagggaaggcatctctgcaaggataagaatgtcatccttcaaaagcttccctaaagaaagttccaagctgtgtagcacattgagttcgcctatccagcttggaaccctagagaactgccagtctgaaagaaagagcctttgaagatggtgcgcggacttgaacaaaccattcaaactatcacaacacatagtagacagatgatgatttatatgtagatctttgaggttgcaatctgcaagtcttgcaagagattggaatagaacatctttatatcccacaaaagatgatcctctagaacaagagagatgcagatctttcaaattggtaagctcttgtaagctcgcaatattatgtagggaattcgtccccagatcaaaatattttagagtttgcaagttcttcaagttgccgattccatctggcatgattgtttggtctggtataatcagatgtagcaagcgaggcaaatgaataatatctgatggcaaaatgatgtccaaatgatggagcgaattgaacccgaaatgtggtaccttttcgatttcaaatgtctccaaatgttgtagaccccgtatttgagatgggagcttaaattgttccatagtccgaatcttgaaatacctcagtttggtcaaggtgcaaattccagtgagatcttgttgatcagaattttctaggattaggacctgaagactccgaaagtctagaacatttggaatgaatccataacttaacataacaagtgaacgaacttgcgataggcaaatagttgcaactattttattatatttttccatattaatccaagagtggaatgagagccgtcgaaccttaccacacaaccttctcatgaactttgaatcattaacaattgtaaaaagattctcatctgttgacttggatatgataagatcaagtatcatatcatgtagtctacatgttaatacatcatcattatggtctagaagtatcgattggatcatgcttctgttgataagctcattgaaatagccacgtgcaacacagtatgcatcatgatcattatgtgctgtacgtacaaaaccttcagctacccatagcttgatcaaatcatctttttttattgtgaaatcttctggatatatcccgacataaagaaagcatgccttaatacaatgaggaagatttgtgtagctaaggttcaatatttttctcattccatctagtgtgagattttctccatggctggtgcctagagaattccgtgttattgctgcatcatgttgttgaagttggcgaactgcgcatcagcagattgttgccattcttgcgtttgagctgtgttccgtgaggttgtactggatctccccagtctgcacatcaagggtgtccattctcctagtgatttcaaccaagtcccaacgagaggaacttgagcgccattcacttggagatggaggcacaccacttgatctgggaggttgattgtcccccattggatgtcatgaggcgcacgccaccggtcctcactagcacttgcctagcttgagactccgatgctgtggcgtggagcttgggtccatccgggtgcatccccagttggctcccaacctgcctcatacatttgcacgggtgttgaggatgatgaactctctcattcattccttgtcatggtgcgctttttcctgtatgctccacctgcacgagattcttctatggtctgcaggggaatggttagttcatggcagttgtacaaatcataccccgcatttggcaacgggatttcatttgtacaaccagggaaaaagtaaatcaaagatccatctactccatgcttcagaatatgcccttgtactagataggtctcatcaatacacggatgagcggctgagataaaagcaatttgatcactaacaacccctagcccttttgctatccgagtaattagagaagtgcacttaacaggagtagagaactttatactttctaaccattgccttatcatacatttcaaaggagcaattttgatctttctaaccatggcaaacatgataatcaattcatcccccctaatgggtctaagatcacctctaggaaacaaagtcatagcaatttatttgtgcatgagcctaagtgtaggattatggatatcattcgtcctaggtttcttgcaaattgtagcaccagaaatgtcttcccaaaacctatttttctcgaacccagaaattcctttctgaagatcgattttacaggaatcgtgaaaccaagaagtgtactaaagcctttccatgtaagtgtgtactccttatggaaaaagcgaaaggaaattccatcttctatttctttcaaagtgcacagaaattgcaaagtaagcaaacgagaaccaggctcatctaccacagcaaatctctgccaaccaaccgctttccaaatagaacgaaattcaatatccatacctatctttttcagcagctccggagagtattctcgtgtgtgagaatactcctggtcgctcagcatgtagtaggcttgtctctcccgatcactgacaacgtcgaggtcggtgtcattcaggagtcgtcacggagcttcggcgtcttccatcgagacatcagctgatgaacaagtactagactcgtcatgatgacttgatgaagagctggaccccttgaacagacgagacaatcgcctcctcattctgtataatggacaaagaacggactaactcggtggggattaggaatgataagaatttcgcccgccggttagtttcaccaaagcaaattgtatatatgcaactaagtatttgaatttgagggaaactatcaaagcttgaatgaacttaagagcaaactttggagagggaatgaaaatgtgttgaaatggggtggagttccctctcccggccggttggcttaagtagtgcacccacaacggtcaaaatcgacctgtggggcccactagctgttgcctcaaagagggaggcagccgaccgttgcctggccagtttggccaaaccccctggtgggcccaaccagccccactttcgaccgttggattccaacggtcagtgtcgtcgtggcacaacgaattttcgttggaaattttattttggtttgctctgaaaaattcatttgaagaatttcctcaaaattcaaaaaatcctaaatgcaactttgaaattcaaacatgcgatgatgcaaaatttcaaagtgttgaaagcaaaaatgcaggtacataccaatttacctgttggcgaaggtcgcgtcatttaaagtctgacgtgcaagaccgtacctccttttagttcagtttgcggattttctacccgtcatcggaggtgatggagcgggcgtctttggcttctccctccacaccttcattggctttggtgcggacggtggcttcctctgagccgactgctctagcttcttggccggtatgggtggttttaccggcgtcctccaataacgattcctgggcattattgtttccttctccaggaaattttgcatgaacttcaccaggctgtccgtcttgggtggctccacttcgaccacttgaatattctgcggattcggtctgtactttatcctaaccatggaacattgttccttcctcggttgaaactcaaacttctcttccttcccgttgatgtggaaacggatactccccgtttccacgttaatgttggctcccgcggtgctaaggaacggacgccccaagatgagcggcgtctcttttcccctatccatgtccagcaccacgaagtcaaccgggatgaagaagtcccgtatcttgactggcacatcctccgctatccctgccgggtaacggactgacgaatcagccagttgaaggcacattggtgttggtgccaacaccgtaaagttgagcttgtcgaagacgtcttttggtatgacgctgacactggctccaaggtcgcacaaggcctggttgaactattgtgccccgatcgagcaggtgatcgtaggacaccccagatctttcttcttctccgggagcttgtggagtatcacgtcgctgcattgctccgttagctttacaacctccgttgttgggagcggtctcttgttgttgagtatgtccttgagataacgggtgtatgttggcacttgcatagcgtccaacaacggcacattgatgtggatcttctagattacttcaacaaaacaagcgaattgctcgtccactgatggtttcctactcctttggggaaatggcaacaaccgtgtgtcgcagtactcctgcggcacggtcttctctagctaggggtggatagcgagccagctcggctctgctcggctcgactcggtccagctcgttaggataacgagctggctcggctcggctcgttatcctaacgagctaaaaacccagctcggctcggctcatttaaaagctcgagctagctcgtttggctcgcgagcaaagcaaagcagtagtctggtagatggcaagaagatggctggcgacactcacatgacgacattggcgctggagttggaaacaacttgacttggagacgggcaggaagagcttgtgttgctacggctactggcaggacgatgatacctatctgcggtggccgcctacgggagatggtggcgatgagagcaagagacgatgcccaacgaagagaggctagaaaagcttgaggaaggtctcgaggaccgtctcccaccgcacctccatctccatcgtcgccaaccacgggattcccctcaccgctacacttcgctcgccgccatgcgccgcccatggaagcacccgacgccggccaccactgccgacgctgtggcttggcaccgcgccgccgacctcttcctctgcgaggtcgggctcctccttcgccgccgtattccactcaccttgcttgccgccatgcgctgcccgtccaagcacccgccgccgcagcggctcggcacggcgctgctgacctctgcctctgcgaggtcgggctcctcctccgccgctgcttcctccgccgtgcgacagcctccgaggtgcccccacccctcggccgacgaaatcagcggtagcgagctcctcgcctgagaggctgtcgtctcttctccgtttccatctttttttttcttttttttgtcttttggtttatccatctgagattacaagaggtcgggagctaggctggccagtgaccacatcacaatgtgctgatgcacacatcacatgaaaccggcaccgctgtatcgtggccgatgggcctagttgggccgtcaggatgtccatcctggcatctgacatgatttattcttggctcgtttgggctcacgagcggctcgctcgttatctctaacgagctaaaaagccagctcggcttgttaggaaaataaaacgagccgagcttgtcacgagctgagcgagctaacgagctacgagcttttcgtccacccctatctctagctgaacctccttgtcaaccgagtcactagatggcgctttttttgatatcccattagctcctgcagggttaggatatggcggatcatgagtggacttacctcccctcgttgtgatcgccttaacactttcaacggaggagtcgggttgccccgaaatcctcccagtttcatttgcagggactaaggatgctaagtgagctagctgggtctctatcattttattgaagctcagttggttttggaaagcagaagcgaagccatctaacttaacatttatattctctaggatcttgtcattggcaacaagcattttgcttagcgcattagtggttttagcttgcgcaaaaacgagatccttcaaggagggctggttagaaaagttaccgttgttgttacctccttgataatatgggcgtggttggttccacccctgacctccttgtggacggtacccattgttgcccatgtacatcgcctcctcacgggtttctgggcagtcattcccagagtgacccgtgccgccgcagacctcacacgtaacgtgtgagtccaaggccttgacggtgccttgtggccttttgtcgtggtcgtccaatcgcttcatgaggaggtccagcttggcagcaagcaactccatctccttgacggtatgcatgcctcactgacgggtctggagtcgttcctcgctccaacccatgttggagaccatcttctgtattagatcaacggctccttgaaccattttagagaagaaagctcctctagctaccacgtctaggtgatcgcgggacattggggtgagtccattgtaaaagttttgtaggatcagccagtcgtacatcccatgatgagggcaggcggccacgtactcctgcagtcgttcccatgcttcaggaatagacttgtccctcgtctgttggaaactggaaattcgtccacgaagggcattggtttttcccatcagaaataatatcgagaggaatgccgtagagcatttgtcccaggtattgacagcagcacggttggcatagaaccacttcttcactctcccgagaagggagaacggaaacagccgcagcctgacggtgtcgggactgacgcccttgatggtgtacgtgctacagatctccaggaactgttgcagatgagcattggcatcctcattaggcttgccacaaaacgggctagcctacgccatcgtgacgaggctggacttcaagtcaaaatccacatctcccatgttgatctgcggcccaatggctacattgtcagcagagggaacagcgaactcgtggagagtcttgttaattagccgtagtcatgaatgtcggtggcgctggtacggctggtttctctgtcggtagagttttctgcggagcagtgacttgcggcctgacgctccggaagaaagcttctgaatcttctttgaagttttctggcaagttgaaaccagtcatgcactaccctgttttcacaacaaaagtgaaaacaaccaaggttagcttgcaaaggaaaatgattatacagaggtaaatataaagtattagttcaggtaatctctattatgaatcttccccagtaacggcaccagaaatgcttgttggtatttcataacgtcattactagaaatataactcccagcaatggcgcagaaatactaatggtatattatggttacagagttcatccgcaagcgcacggatataccattgtagcatttcacccgagagtattccaagggtatcgtatttattttatcccgtgggaagatcatgtagagaggacttgactaatagtttatatattacttgtgataatcatattctaagcaggggttaagataatccaagggtagagtgacacacaagcattagttactcattctcataatatattatctaagctaagtgcaaaaaaaaaagagaaagaaaatctattcctatacttctaatatacatagtatacatacattctagttaaccgatatactagctaataccttctatctaatgccctcctggtactttgagaagccacccctgactgtcgagttccttatgatagcctgtcatgaccataccactggggctaaatacggaggaataccctccccagggaattaacttaggattatatacaggcgcggaggaatacccgtactaagctgtcaccatcagcgacacacctctcatccgcagcatataaccccaaataatgatatcccgtaatctagacaccacgtctaaactaccagatactactctaatatcatcgtcatcacatagagtaattgcataagcaaacattatacccgctccaaagcatctcccagataaactagccgtatattcagtataacatgaacataatgtaaagtaggcattcatatactcggaaagtatttcaataccataaatgtatgtagaagagtattctaataaaagtacaaagcttacaaaagaggaaaggaaagctactagagccatacccgaactcttccgaaggcttctggactcctgatttctactctattcctattccaccagctagatactactaagctaaacttgagagaaatgagagagctcttgcttgaggtgtgtgttgaagtgaagagagtgaagcctttatatagaggtggttatgacggttgtggaaggggaattgcccgaagtaccctccaaccgtcattggggtgcaatcttggacgtccatgccgaaccctggcctcaacggtggagatgggggttcggccgaaccccctggttcggccgaaccatgggctggcaaaaaccagcccatcttcggctggcaacctcctctattgcttcactttgtagacttgtgaattttggcccaattcatcgtgtcaattctgagttcttggcctattcatgcataagtctgattcttgacatcgtccgattgatttatcattcgagttgatgtcgattctcctccactttattgttattgtctgcaaaaagttagtagacctaatactagtggaatattattattctaacaaatttatgcattgcaagcatcactagttctcctctattttagtaatattgacggttcaaactgatcgataatgaccgtcaacacccaccacaccttatgactatggtcacaatgtttaagacaagaagtgatggtaagatgcgtcccacaactatgtaaaaaagtcctacgtaaaaataggtcccagcatatcatagagtcattctcaccctcgtctctagtgtgcttgtgtgttttatcttattattttatttctcgaggttgagccataagcgcatccataatgttgcatgcaaagtaaccttaagaaataaattagtatttttgttctatctttatgcattgggataagagaaagcaagaaatgttgttatggccaatcttaagcttaagacttaaggctagaccataagaaataaaaaaataatttatatatggtgctctttcattcacgttgaatagagttttctcataagtgggtcctaccttaagataaaaaaaaacatacacattgtagcatgtgctatatacaaatgaatataaagctgtgggtctcattttattgctctaatgaccataaacattgaggatgccctaagcttattactatttttggcatttaatgccttatgactaatgtccacaatgaatatgatttgttatatggccttatgtctcattcttatggtacattgtggatgccctaagagtggtatttagatagttattaaaagtagatgtactactctgtgtcattataagtgcagatatggtttttcgtgtctgacgtttaatcgtttgggcggttgtagtttttttttttgaacgactcgcatgagacggtgcgaagttctatcgatagagtaggaaaaaattacaagaatacaaccctggagggtcgtaacatggaaaaaggaaaaaatataccaccacctgcacaccgacagcgccaacactgaaagcgtgaccgaccgccgctagaccaacaaagaaacacagacgagatcacccccctaggggatgctaaaacga

SEQ ID NO: 14773 - DNA, 741 bp, Oryza sativa
agccttcatgcgccgaagaccgcgccacacctaccggcagctcctcttcacaccgaggtcccctcctccaccgccggccgcgtctctcgcgccaaaccggcctccatctccgccgtccgcgcctctcaggatgagccggcctccgctgccatcggctgcgcctctctgcgccaagccgatctccgaccccacctccaaacgatgctgcgccggccagatgcagccatctaccatgccctcggcttgccgtccaaggctgccatgcctccggtgacctcagtcacagtcaccgccaccgcagccgctgctgccaaacgccaggccacctcgccatcgccatcctcaccttgcacctgaatccttccccgcatccaccgacgtcgccactgcctccacagtcacagccaccgcaagtcggccgccgttgccgctgccaccatcaccagccgccgatgctagccgccgcctccgcaaaccgccgccaccaccaacgcaactgccgcgccgtcaccctccgacaccaaagcagcctaccgccatgtcctccgccgttgttgccagccgccgccaccccgccaactaccgcgaccatgtcacgcatagaaattcccgaatagaattccaagtagaaagtgcattaaaacccctatccagaaccggccagggtacacaaacgacaaagttgacatacagatccacgtcttacaaacattgtaaaagtcttacataaatgtagcggaa

SEQ ID NO: 14774 - DNA, 531 bp, Oryza sativa
ctttgaagaaaagactttgtttcttcgatttatgcaagaatttcaccatattttgaacataaaggaaattgtcgtgaatagcccttttgcgaatgaaagcactttggtttggggaaacaagctcatgaagctctggggctagtctgtttgccaatagcttggaaattatcttcgataagctatgaattagacttatagggcggtaatgctctgctccattagcgtcatcttttttggggaggagacagatgaaagccgagtttaagtcacgaagttgcaatgtatttagattgaagaaagaaattactgcctttagcagatcctctttgattatctcccaggcaaccttatagaaagccttatgaaacgtctggacctggtgccttttcggccggcattgagaaaatagtcgctttcagctcttcttccgtaatgtcctcttctaaatcctcaaggtctaaagaaggtaggttcaacatgctccaattaattccagatcctctttggaaagaagttcccaatctctctttg

SEQ ID NO: 14775 - DNA, 4451 bp, Oryza sativa
ctttctcgaatggatctttttctgctgattttggttccttttggcccgtttggtggagcggccacggaacggggaaaaaagctccgaccgcggctgcccgcacagaacgatttttatattcccgttttgccctccggattgtactatgtgctaatcgtgtttcttaacaaaaaagtataagggactaagggagggccttttatggtatttaccacttgggatttggtactgttttcacccaaacgatggtgttattatcctacccatttagattggattcatcacacttgtaataatataattcagtaaagcgtgtactccctctgtactcataaagaaattgtttaaaataatgtttaaatcaaaccttgggaatataaatcatgaataactctcaagttatttagtttgaaaatataaaaattatatgaatagatttgtcttgaaaaatacttttataaaagtatacatatatcactttttaataaatatttttatagaaactaagaagtcaaagttgtgttttggagaccgtgtcgctgtccaaaacgacttcctttacgagtatggagggagtatacataaatgtacgtagtgtacttctacaaaatccagcataattgtgggcaactagaaatctaaaaaaagaagatgctatcacaaagtctattggaggggttgaatgttgacaaggcatagtaaaacaacttaggttgcattcgctcgttatagttgggaacattcccctcttgcacggtaaacgaggtagtttattagcgcgtgattaattaagtattagtaaaaaaattaaaaaatagatcaatataatttttaaagcatttttcctatagaaattttttacaaataaaacacatcatttagccgtttgaaaaacgtgcacacgaaaaatgaaagaggagagttgggaactcttagtgccgaactcagccttagggaactatatgagaaaataaaacaagaataagttttttttttcatagaactagatttagaaaccaatccatccctgccaaaggtatctcacaatgccaactaatgcgctggttagcccaaagtgacctataaattcctatattatgattgcattaaatcaaatcacttacgagctatcaagtatcaatcatcgagcgaagccaaggagacctctttcaactgctccgccaaccacccttgaacaatccagtttatctaaatccctgatccctgatgaggttaattgacaggtctagattaggtctatataggtatagattaggtacatatactccctccgtccaaaaaaagataaaccctggtttccgtgcccaatatttgaccgtccgtcttatttaaaaaaattatgaaaaaaataaaaagacaagtcacgcataaaatattaagcatgttttatcatctaacagcaatgaaaatacgaattataaaaaaatttcatataagacggacagtcaaaattggacacggaaagccagggtttgtctttttttggacggagggagtacatccttataaccatagtgtttccatatatcaatcacaacagtagacatagcgttatatcactccaaagagggcacgaagctatgtaaaaataagtctctacgtttttaacttgcatatcacgggaggagagtaaacaaaacataatcgacgtatatattttaatatattcaaatgtttatcgacaaaagttacaaccgcaagaatatcaattctcaaaactattaaggagaatcaatatggctgtgtttgttacttcttgttggaagcaaatccctttcgcatgaaaaacagagcgatccattaaaatataattaattaaatattagctaatttttttttaaaaatggatcaatatgatttttttcaagcaactttcacatatatatatatatatatatatatatatatatatatatatatatatatatatatatatatatatatatatatatattgtcagggttatggataccacatacccaatagtaatcgactaagctcagcagagcccaccatataccatgtcttatatggaatcaaacctcatatatagaaggagttccggataaggaatgatgaatagagttctatatggaaacgacaaggactactcatatcgtatccatatttatctccctagttctacttggacaatgggttatctgtgggtataaatacaagccccctaggagaagaggggacagacccaccacaatctacgacgccacaaagccacaagccaatacgccgtcagatctcgacatcagatattagtctagccataccccatccggtacctacggaggccggcaagagggatccagcgtcgtctctgatctcgccgagtactgattcgaggaggaagactaccctgtcgtcgactacgagttgattatctagccgtcaagtcgatgacggatagatagattatcccaaatattggatttgtgtgatccagatgaataaagggcaacaccggcttcggccaacaggatgtagggctattacctgtaagatgaggggcccgaacatgtataaaaatccctgtctccatctcttttacctcaatctcatatatgccctgtaccaacgatccccataccatccaaataccttagtcgtgactatcaaatgttgacatatatatatatatttgaaaaaaaaatacaccgtttagtagtttgaaaagcgtgcgcacgaaaaacaaggagagtgagttgggaactcagccttagaagtgaagtgtgcatagctcaattagttaggtttctaatgatagaatagtgaggtttctaatgatagaatattctcaccgaagtttaatttctagtcttggtatatgtgctcatatctacagctaattattagtgaaagatgaaacgtgactgttacaagaaagggtggggtcacaagcaacatccaacatgtagcaaatattaaacatttgaaatatttatttctatacaagatttaaagcgaagcgcaatcgtcctccttcaattccatcctcgcaccgggtatccatacgctagcacgttcagtactttatccttaatcactcttcaagcccacgtgatcaaataatttatcctttatcacacttcaaacccatctactatgggtctctctacacatcattcgataaattttcaggccccaaatttgtcagatttctgagcccttggattagcatccaacggcagaatctaataatgaagcaaacatcaaagtgggagtacaatcaaactaaaaataacgtatgggccaaaaaaaacatcattttgggccaacacaaattttaaaataaacaaagattttcttaaaaggcctattgatactatggatcaaatgaaactttctcagcccaaacaaataacgaatcttggcagtcaagaaagctcgacaaaaatagaaaaacaagatcacgtgacttgtacctgctccaccccatcaccaccaaccctatttgtacctgctccacccctcaccaaccccgtccacatccaaaaaaaagggagatccaaaccaaatcagatcgagaagcaaccatggagcagcagaagaagaaaacaaagaagagaaaagatgaagaagatatcaaaaatccaaacccaagcaaggtcagtgcagatccttacatccttttcccattcaaacttcattaaaaatgaacagaatttcataaatctttcaaacttggaagatatatttcctgagaatccctacaaaaattgaaaaagtaagacctagtttgtacagaaatagtacaaaaatgacatcaaagtgtagtttgtcaacatgctacaacaaacaaaaatctgctacattcagaaacttgccattgcaatcatcaatatctgcatctcataataattctctcaacaatgtggtaagaagtagaaaaactaatgaacttagtatatagtaaagaacatgtgcttgaattgttaatgagcaagttacatagtaaaattgctgaagttacatttgtaactacaaaaaacccaccctgtaactgcattgctacagaagaggtgtatggaaaccaaatcacactaaaactaatcacttagtaaaattacagaaaaggcattaaagttaacaccctgtaactgaaatcacccttgaaaactgaattattataaaattacatacaaaaaagcataaagttacagttgtaagaataatacattgaacatgtaactatactgaaaactttcaaaacaaattcaccacaaaaaaatgcatataaaaaatgcatataagatggtagaatacaatcaagcatctgaacatgcatacatgcaatttcatcactttcaattgcagggccgagaaaaaaaacagaagaccagctaacatctaaaactgaacatgcatacaaaattaactttatttgaaagaaatcaccctgtaactaccaaaaaaaa

SEQ ID NO: 14776 - DNA, 18074 bp, Oryza sativa
aatgggccgacggcccatttgacaaaaaggaggaaaaagaaaggaaaaaagaaaaagaaaaggaaaaaggatttttccctggaattaacaatattgcttgctcaattttaattggttaaaattatttctagagctctgaaaattccactaaaaatcctgttaatgcatttcgacatgtagaattcaagaaaaattccacatgtcaaatccgattattgtttgcattgttttcttagggttttatcctgatttcctctgcattttcttggggtcatttgtaatttacaatttggcttgggaggaaaacttcggggtgtgacacgcgccgcacgcacgctgaccgcgcgaccgcgtgggtcccactcccggtcgtcgtcctcctcccgcctggctcctccctctcccgtgaaaccctatccgttccctccctcaaatccgcgcgaatcaattaacttctttccaaattgattagggggaattaattccctttccttcctcttcaattccccctaattttcccattgaatggcaccctcaatcgcccggaacggccgcgccatccccggccaccttccatggccgccggccgccatacccacaaccgttctgacttcctccttggccggctccctcccctcatctataaaatggaaccccctcggtccgtcctccagttttagcccccttccgcgcttttccgggggcttaacaacttttcccggctttctccttctctctctccggcgccggccacctccagccgcacctcccaccacgaccgtgcgccgtccggttgctccatcgccaccctcggcctcgcaggtgcatcctcttccccggcgtcgcctccgtttcgtggggaaaccaccggagacgcgtcctcgccgatgaccagtggtgtcgccaccactccaccgcgtcctttgcaccggccgacgtcgccaccacttccctcggctccgcgacgccgtcctcatctccggcctcacctcctcctcgcccgaagctcgccggagtggtctcctcgtcggcgtccagtacctcacctcctccgggcggctactcttcctcgccggtgagccagcctacgctgccgtctcctccctcggcacggtgacgtcgcccttcaccccgccctgccctcggttttgccggaacgccgccgccgcaccggcctctccttcctcctcatcgacgtctcctccggcagccccttccgccgtgcctgtgcgccggccgacgtcgtcgtctcctccttcagcatcgcagtggcaaggtcgtccttggcctcgcctcccctccacccgaaccccactggcgttcatcgtcaccaccccgccggtcttcgtcgtcgtcctcttgtcgttcccggttgcgctcgtcgtcggccctcccttcgtcaagccgatcgcgttcgccgcccgcgtttcgtcaagtgtgcagcagccccgtcgtcgtcttcatcctcggctccgcgtcgtcaagccttatgctggccgcgtctcgtcttcatccaaggatcgccgccgaagtcgtccccttgccgtcatctccgtcattcccgttcgtctccgctgcccgttcaccgtagtcgttcccacgcctcgtcgcgtggtggtaaggatctctccttcgctgccccgtcctcgttctttttgtgtcgccctgtgcccgttgtgcggttgtcgaccctggtacccgtgtaccggtgtcggtagtcgttcgtgtgtgcgtgtggtgaccgtgtttgtgtgcccgctcggtagccgcgtggtttccacgtgtgcagcccgcgtggtgtcaagtggagtccgtttgtcggccactcgcctcggttgacacacggggtccgcttccgccgacccgtggaccgtctttgtgtactcggtctaccgtagtcctttaggttgacatgtggggtccgcatgtcaacagcgtagccttcctgtcttttccaggctagcacttacacatgttttatagttgtaaaacctaattacaataatccgtaaatctccatgtaacagcattaaacttcggatgaccatatcttggtcatacgaactccgaatcgacccgttcaagtcttttaatgtttgttataacctaaagaaccttgtgcttttctttttatgtattgttattgcttctttatagggtttagctttgcttatgtgcttcgcatagcttctgtcattctggaggttcccgaagcgtggttcgcgatcgtcaccaaaggttcggaaggccgttctctctgagcaaggcaagtcgcattatccttgagcatattgaatcccagtttataaaattattttgatttaaattaatgcattatcgctttatttaaattcccgcgttatcactattttatttagccatgactatttacctttgttatgaccttattactattgctattgttattattaccttgttcaccctagaataaataaaacccaactagtgggtactctatacatggttccactagtatgaacttaggtagatgcttcgttggttaattaggcaacattaggtggttttataactttagactttgggaattctcatatcacttggacactatggaatggttggcttatggtggaattggacatacccctctcttcctctttcaaaacccctaaaacctattttccggtggggtttgggtgcatgccagttgtgggaagtagcaccccggccaatataaggattaagctcggcctctgttgcaaagcactaccgtactaaccacatgtctaatggataaggcttaactcggtgctcagtctagtcctgaacaaaaggacacggatagagatggatgaagtcgttgcgacgatggatatttctgaggcaaatgaaggctacgcgagctgcgtctcggtaatcgagatgtctaggcaaatgaaggctacacgggtcggtgcccgttagtcgagatgccatggcactggactagtacgcgggtggtctcacccctatatgtgcggcgcacccggtctagatcctgttgctaggggctcaatcctagcctgcctgtccgggataccggccgtaggcagggttgggtcggtacttttgttcacggctaggatgggtgaagggttatgtcacatgtttacgacggattccaaggccatggaatgcggagtaaagatgtgtcttgtgggtaaagatgtacacctctgatcagagtaaatctattagaatagccgcgccctcggttatgggcaagcctagcaatgtacccaagttagtggtttaattcttaaaacttgcttaacaactaaaatgtgtaatggttggcctgggttggcttgggacgagctgggacccaggtcaggttgccagttcggtctgaatcatcgtaggccttgggttaaggcaggttcgtgagggttcacagccttgattaataatattgtgtagctctaggatcgtttttacaaaatagctttgagcaactaagtgacttttaaatgctgtttactgcaaaacctagcccctatattattaccccttgtacccccttgcattaatcatgcatcttccggtgtgacttgctgagtactgtggttgtactcattcttgctctatctttccccccttcagtaagagaagctttggagaagaaatcctaggtggagtcctggcttataccccagttgagtgcctgtgaagatggagccgtaggcctgctagtccgctgctgtttatttttgtttgtcaggcctgaagtgcttttgtaataatgtaaatattatcgatataataaagatgtgtcttttatatcatgtttgtgtggtgtaccccggcttttcctgggatggggactaatacactagcgttctggaaaaggtatttttccgggcgcggcaaccaggtatcgcaaacccagccgatgcattcattgagccttgctgctgaatcggctgaaccacctgttgccttaatggcgtctgttgaaccggctgcaaaacctgccgtctttgtggtgtctgctgaattggttgcacaacctgttggactggggatgtttgttgaatcggctgcacaacctgctgccttggcggtgtttgctgaatcggctgttgctgggttggatcaatggcatgttgaggaggtaagaacatagatgcaacctggtcttgggttagccgattcacattctgtccactgtgctgtggttgttctctcaccaacaatcggggattaactaattggcctagagccgaaagtggtgcggcaggtgtaggagctggtgatggtgccgtcggctgagccgatggtgcattaagagggatcgactggacaactggttgattattgatgactaatggccgataattcgagaagactcctcctggtaagtagactggtcctgtagcttgatactcggccattgaaccatcaaccattgacttcaccatatttgccaaagtattgattaatatcctagattgattgatcagagcatggtgtacagcatagtcaacctgatcttggaaattgttaaactgcaactgtgctgcattgccatcttgattaggtccttcacctttaactccctgagcaccatcaccttgaactccctgtgctccctgagagttatcaccttgatttccttgagaatcatctgtagcacctttgttgctcggttgagccgagccatctggggcttgtttcacctctccatccttagaagaaccggtcccaggaacatcagcaactacttttaccttgtacttttgcaccactgtccccttgcgggtctgcatgaatgagctcaagaactgattccctgcctgctgcatcattgcttcgaaatccttcttctgatcaggtgtcaacttgtctggagtaatggtcacgatgttgccctcattaacatcagataagcccagctgctgaatcttctctttaacagaacctggactaaccgaagacggcgacgctggcggcttctcgtccatgaggaaagctgctgacttctaatctgtcccactgggcgtgccaaaagcgtgttgatggaaaacacgaggcctaggatatctgcttaactccagtgcaggtccaaaactcgccttcgggtatacaagcgtgccagttgatttgatcatgcaatcaacaagaaataaaggcaaagaaactgtggttaaatctataaacgatagccgatcggctaagtgctgatgacatatcatttatctttgagccgatgtcatatatgcatcgatcggcagttatagataaataataaagaactaaatctgttcgatcggctgtagatattaacaatatataatccttatgtcgatatatacttaaatcaagtgattgggatagatcggtcaccatgccgggacagtataaatcacttagattgaaatatatactaacaacgagactatatatgttcatggcataaccgatcaaatagatctagcacgtatcggctaatactccgatactactctatactaagatattaaaagcaagtaggatatatcaaacaaaagcttaatatacttaaatgctacaagatcttaatataaagggcagattcaacatatcaatgaagcatataaagcaaatatagttaaatcaggtaagattggctgaaaccccgatgctaccctaatcggcaaccagaaggcaggctaaagattcatattctaagcacgacttaatagatcaaactcaactgatgcagcattaagtatgaaaagaagaacaatatctagacaatcaagccgctggaagttttatagagtggtagatatcctatataatctaagtcaacatcgatgtctaacctaatcggctaccctctaccgacagatgttagccaattgtaggttagatagcgatactgtcagagattacgtaagatatatgataactcgacgaattacataaacaagattagagtatcataaagatggaagcattaatcccgagaacgcaagctgccataacaagttttacctcttgttgaatatcgaaaccgatgcagctcaacccgaaagcaagaactcgtcgaaacaaaacgaaagtaaaatggtggcgatgcgccgagattgtattgaacgtgtgtgttcattaattacatagggttcggggtcaatttatacccgcaaattacaaactatgcccatatcggacatgactcttatctctaacaaactctaagataccataagtctttacggcagacttttgcccaaacatatctctaaggaaattacataaaatatcctaattaatagatacaattgccttcccaggactctatccatgcgtggcaatcatcttgaagcatatcaactcaacccgacgttgtacaccaagtcgtattgtcggaatcgactgcatcaccaaaccaagtctgactcgaatttagccgatccaatcatagccgatccggactccagccaattcttactctgttcccgtgataatccttatctttgattccgcttcgatctaatcttcctttccgatgctgatattaccaaatttggtcattaacagtcgggtccgcccctcctgtcaccgtcaccgcgcgggagggggagcaagatctaccgtccccatgcctcccaactgctggatctgccactgccgcacctccctaccgcctgatccgccgcaccgcacatccccaccaccagatccgccgccgccgccgtacgggggaggtcgaatgtcatcggatctgcttgggcgacgaccgccgtgcctccccaccaccagatctgccactaccggcgcatccctaccaccggatccgccgccgccatgcaggggagggcggccaccatctgagccacgcgggcgacgaacgtcgccaccatcacgcgcttcctacgccctccctagctacccaagccctccaccgccgtcaggagggaggagaggggtgagcaggagtggggagaggaggaagccgtcatcgtcgcccttaccctctgttgccaccgccgccacaggagcccgccgcgaggagatgtggtagggagaggaggaggccgggaaaggaggagtgggagagagagagaggaggggagagaaaaaaaagagtgggaactaggggggatttttgcatgcgagtaagttaagagtcccacatacaaaaatacccttatttttgcgtgcagacatttcaagtgggccattggaaaaattaattgttacatatgtgtctgttaaggagccatatgggaaaataagggaaaatgagggtatgcagacacttatggcatgtcttcaacctattaaggtgctagccagaaaaatcatttttgtcatccatcccatctttctttctcatttataggagaagaaaattaaaaagacctgctcatactaagtcttacttagatgcaatgtggacgttctaatctgcttaaagaaagagatggagctgttcgctaattggtaacccatctcatctttcgccattgtagaataagaaaagaagaatagaaaaacttgtattacatagcgcgtgcatttcgttatgctgtacatcgtgatcaggtatatcgactgcaacttcaactttcacagttgcatgatctaccacgtgcaaaatgaattaaacggccaatcttaacgaagccttcattaccacacccaaatttgatacctagagtcgaaatagggaaatatagccaaaatcacgaagcctatggaccggtctagctaaccggtggtgtgtgcctggtcagacctgcagaatccaattcagaaacgttttcatcggttcaaaggtcttcttactcgggaaggcatgtttcaggttttcattagtttatattccgagttggacgtggacgaggacttataggaggctaagaccaaccttttagaaaagccaaggttcggttctagacccccatccccaattcaaaaacagtatggtcgtacacgataattgaattaaaggaattcagcgtctgcttggttcaatttcacataaatttcatttgaaacagccacatccactacacattgacacattgatggttttcagaagcagccacatgcgccgggaagctttcccgtcacccgaatcctctctgccttctccctcaccttcctctctgcgctcctccgcttctcctccgccgtcagccttgatgctgcggccaccttgttgatccttgtaatctcgtcgttgtactcctccagcgccttctctcgcttccgctctgaattatcgccctgacacagcagatttatcaatttaagcagcatacatagagagctcacgatttttttacatgtgaattttgtgcggcgaattatagatactatagtcgtgtgcagaaattaacctctttcaactccatctggcgtttggccttggccttcttctcggcctcccattcgacgatggtatccattgtcatgttgtacctgcagatcaaattgacagctcaatgtagaatgaactgcagcaattttgatgagaaaattcagtgttttttgttgacaggtttacttactgcttcttgatttttgccatcttttccttctcccacgtatctgccattgcttcagcctcactagaatatgaactcgtcggcgcggaagccaaagatggcatttgatttgccttgtcttgctcaaacttcttgctctctttcttctctcgggaaaatgaagctgttggcctaacatctggtggcacccttgggattgcctggtcttgatcaaatttcttgctctctttcttctctcggggaaataaagctgtcggcctaacattcggtggcaccgttgggattgcctgctcttgctcaaatttcatgctccccttcttttctggtaaaggcttggcgaagctcggagcctttcttatgcttgggacagaatcaagaaccttccctaccatattttgacctgaaattccaccttctggtatcttttgtgccgttctcaccggcctcctcaccgatacattagctaaaattcaacaaaagttttttagtacataatggtatagctggttgcaggttgtgctacagtaatatatcattgttgcccaagtaagttgttttgaatcttgtaccttctagtccgtcgtcttcttcatcgggtacaatctccttaccactaaaccgccttgtgattctgctcccctcggtttgcctaggccttttcaagattccttgtctgttgggtggtagtttgagagttggtgtggtcgaaggctcatcgttcgcgacaggcttcttttcagatgttaacttctttttcacacgggtctcttctgttgcctgtttctcctcctcttttgctgcaatagcatacgctaccgcagccactgtggctgcatatgcagcatcgtattctactccattgctcatttcctctgaaatgtcaattcagtcagtggttaattcagttcttcaaacttagaaaagcgcattgatgtagggttcaccaaaccgttttgggtggggttaccaaaccgttttgggtggggttaccgtcaccccatggtttgacggttaccacgaggtatactgtggtttcaaaaactgagaaggttactgtgccataactgcacggtttgtaaaccctgatttgatgacttacctcttccaaaaaatctaccttgttgaggttgcattcttatagtctggttaccaccttgatcttcctgttcctgtaccaggaaatcggaccctgccaagagatatcaattgaaaaataataccatcctatttagagaatttggcattgtttggaaagtaaataactattgtgcaatgctaataaactccttgggtcagatcatctgttctaaaactccggaacatttgagaagaacaatggaaaaaaatgacgatgagatatggaggaattagtaagaacataagttgtaacaatctggatggcaaaacgaacagaacagatttatgaagtccaaaagagccaaaggccctttatttccttactttcaatcttattcctgggcctgtggcactcaacgttcaagattaacttgtaagttaagcattgctccatgaattggatgcaactatatatagagatgggtttagatggacatggagagggatgtagaagggggcaagaaagcagtttgcatgtcttggaggcaagcaattagcaagggaagggaagaggaatcgctttgccctattgaagtctctgagaatcctagccttttgcttgcagtgtggttgctaccaacctgaattttctgagcagtttatcctctgaactagccttggcttgccattcagattacaagtccaacaccattgctttaccttataatattcaagctaatatctgtcggcaacctgatatctagcttgctgcattagaattattcatgctggtgtttgtgagagatgtagaacaaaccgtatccattgtacaaatatatgctgtagattgtattctagcgacatatgtatatatttgtgcctctgaaatcatggactcatgtactactttcatttggatgtatatatacatgacaatgcattgatatcatgtcatttttttctaattcaaaattttgtaattaccagtgtgagatcagtatttcatactcctactactccctccgtcccataaaaaacgaatctaaaactggatgtgacacattctagtacagcgaatatccagtattatgttggttttttatgggacggaggaagtatttcctagaaactactctctctgtacacttttatatggcgtattttgattttaaaaagtcaaacttcctgtaatcaatccagtctgtagaaaggccttggatcttccggctagccagaagaagtgggctagctgacctcacccctcttaataaatttcgatacaagagtctcttctctcatatcctgcgttttttaaacatccaaactggaatatggagagggcacgtagcttggaatgtggaggttattatttctttttttttatgtaatttgtctgtaatgggaacatctgggctgcaggtgtgaacttgttgagaacgatgcaatcttaaataagttgaacgaggacagcaaaactgttttatatttgtcttttttaaatgcaatttaaactcactgcatcaagagatttagaatcaaggtctggctttttttccgtgtaaaatggaagcatgttaaatcagggtcatcaggaggtgctcttctcatgtctctgaatatagtatcatcaggttagttcgggaggcccgtcaggggtttgttcatgcggccaaaataaaatggttctaataagagaaaaaggaaggaataagttcatctaaggtcccttaacttatcaacgaatccgattttcgtccttcaatcaaagaaaaccagatatcatggatccctcaactatcaaaaccggtgaagatgaggaccctcgacggtttagatggtggttttggctgacgtggcgcctactggctaatttgactcagtcttcatctgacgtggcattaacgtggcgcttacatggcaatttgattcagaaagataataaaaccagtgggacccacgtgtcagtttcacacacaaaattttaaaaatggtgggacccacgtgggccccacctgtcattctcacccctcctttcttgctctcttcccatctcctcctcatttctatcccctttcctctctcatctctctccagcgtcaccaccaccgactccgccgccgctcccgcctcccgccaccgccacatccctcgcgccgctgccgctaccaactccgcctccaccaccaccctcgccacctccgccgccgccgcctgcgcctccaccatcaactcctagctcctctcttgccttcagtggcgtctccgtcatggaagccgtggcgggcggcagcgggaggccgtctccgccgcggccgcctcgacgccgaggagctccgggcggcacgccagcgctgcacggcctgcctatggagatgacgacgggggagatggaggccgccatcgtcgccctccctacgaagaaggaggccccttcctcttcccctcgccagtcgccgctgcagccgcgtgccgccgtcgagccgactcgatccacacgcagaactggagggaggaggacgccgctgcctccgcgcaactgattgcgccgtgtgcctcggcatgttcgtcgccgccgctgccgcgagatcaagaccgattggaccaccgttgagattgtgttgccgttccttctcaaccgccgccgccgcctcggccggcgacacctccacccgcgcgtgcctcggccgcttccgcatgaatgacgcgccgccgcccaacgaagtgcgccgccccccgcatctcctctcctcccgccggccggcgcccgcgcgttctgcggcttgtcgttgatgacgaactcaccgcggccggtgtactcgacgtggtcgagtggccccttgacgtcgatgtaggcgcccacggggagcaagtccaggtactgcgtcatgagcccgccattggggaacttggggtgctcgttcttgaagtacaccttgatgaagaggtcgaagtggccgacctcgtcgaccatgctcgtcggcgtgtacgctcgcatgcacagcttcccttcgatgctggcgcagatcaagatgtgcttgccgacggggaggccgagcacctggtcaaaggacggcagcgcgaagcggaagaggcggacgtcgcgggagagctccttcttgtcgatgagttggcaggggaccttgtcgcccgggctggagagcgcgatgggcgccggggccttgatggcctcgcggatgggggcgagctgggagaggttggacgcgccgtggacggagttgtcggagctgtacccggagccggtggtgatgagctcgccgatgcggtaggtgtcgaggagcgccttggccttgtcggagtggatggcgtcgaactcctcgtgccgccgtcgagcactcgagccaactcgatccgcgcgcggaagtgcagaactagaggacgaagaggatagagataagaggggagaaagaggatgacaggtggggtccatgtgggtcccaccattgttttttattattttgtatgtgaaactgacatgtgggtcccacgagttttattattttttcggatcaagttaccaggtaagcgtcatgtcaatgccacgtcagacgaagattgagtcaaattagccacgcaggcgtcacgtcagccaaaaccaccatctaaaccaccgagggacctcatctacaccggttttaatagttgaggaccagggtatcttttcgattgaaggacgaaaatcggattcgttgataagggacctagatgaacttattccaaaaaggaatcaccacatgacatagctatgggccaaatggcccaaatcatctgttttttttcgttgtatttatgagttatgactcgggtaaggccttcagaaatcacaaagataaatcgtaacatgacaacaagcacattttaaaaagtacaagacaagttgcaaatgttgaagcgtgtcaattgaacaagacaagtatcaagcggaagaaatgagaagggactctgaagaaaaccagttaaacagtctgaaatagtctccagtatagacctcaagcttgacccgccaacatcacagatccacagagaacgaacattacgcagtttattcagttctactggatatgcattcatcacacgaaattcacgagcttctcagtcattaccgtctatgatgcatgcaggtcacgacgatcccaaataactaaacatagagaaaagatgcatgcaggtcacgacgatcccaaataactaaacatagagaaaagaaacataagatccctaagcatagattacacatatctccccactgttcaaaatgttacacataagatggcgcgaataagcaatcagtggggagaccaagcaatacatttcttgcatttagcaacctactgcaagaccagactaaattatcaagcccatagagctacaagcttctaaacacacaaatgctaattaaatacacaggcagctaaacccagttccttcagttcatctctcacgaagtcggattataacgaaggcactgctcgtagtagctaataagctggaaaaaaaacatgagagcattttggcgttagatgtttccctcatcatcaagtaataggagaagacaatgggatgtaccagcaagggattatttgctttcaattctttgtcgtccaccatgacttcctgcccatcagacctgtcgaaacacttggttagaaaaacagttcaaacatatcaaactaacaatatgaataactacataaaaatggtcataaaaaaatgcagaatatattatttgattagtgaagagaccagaggattctttttgcgacatctctaaatgagtgaaacataaagcactcaatttgtagccaaataataattcattgctagatatagtcactttcctttttgtaataaaagtagtcagaaagggagcaatatcagctagcaaaaaaaacatgtctgagatttagaaattttaggcctataactacgaaaagaaattacagaaaatacctgagtgctttgaatgtaattgaaacttgctgcacatcgttgttcacagctgctgcaaatcgcactggcttgatgatcttggtgatatgaactcggttaggacagccctctgtctttttcttatcgccagtttctccttcagtggaaccaacatcctcagccaccactaatgctccacattctccttgtccttgtgttggtttattctgctcaaacctcctcacatttccagatttacgcttcttggcaccagttacctggccaccctgagatggaggtaccttcactaagttctcagaattagacgaaccattcacaaggtgatgctcgttttgttggtccgtcaacctaattgagagcggtagctcctgacatggtgtccttgaaatcacactggaactaccctcctgtacaatgttctgtgcaagctggttcctcaccacactccctgacgcatcaagccctgcaactgtcttactactacaattagtcgctctcctacaacttgtccgacagggcagttgcttaggttctggtgcaggagctcgagtgtgggacttagcatccaagcgagggcggccccgtttaccatgagatgggtttgagcctgctactggagtagttgttatcttccgcttacgcttccgaccgggccttggagattgtaacctgaattgcatacaaccacaaggacaaatcaatcttatttacttattatcttctgaaaatgtgaatagaactacagacggaagtgtgacaagtacataccgcatctcgaaagcatcaataatgtcagagcaggcactcaggttttctaggggctcccatgtgttagcactttccggccatccacgcctagcaaatcatataaaattgttaggaacacaagaattatcaccaaatctaaacgagtaaaacaagaagcttccacgtgagccaaaaacgtttaaactgcaatagacaagccagcgaataaaaatcatataagaaacaataaaatacaagcatcagctgcgttcagaatatatctaagctctaaggtagtgtttggttcatcaatttgagggtgtaatcaaattgcagtacgatctggtctcacagatgtttttttacagggtaccctgtaaacagaacacagctcagaacatgacacattaccaagttgaccagtacctgccgtactgctgcttcttctgaacgcaatcctgttcttggtcttcatagctctaaaggcagttaatacatccatcatctccagtgaggtaagttggttgcagtattggcagctaggatgaagaaaacacaacagttgcaatgtgcagtgtgcactagggagcatgtgtaaaacggaaatgccagtttcttgctcctgctgccaaataaccaatggagaggtgggtagtggatctagattgatttctagccactactgcctctaaatctggaagcttacgaactcgtagaggtgtattgtcccaaatatggcaatatgagtgtccacagccattctcaacctgggcacttttaccacatggtccacatcaacacgcacttgctaccgacaaacaccatcatactattaacgcatcaacaaattaaaagctgttcctgctactcagccttgccttgagcattatacaagggcatgctataaaagtcacccaagatgttatgtggaggtggctgtcctacacagctacaaccaagcgcgggaagcagccaaagatttgtttgttataacttagcttgagattcattaggagtttgttaagtgagactcctataaaaggaacaatggaaagattaattactttaggcaaacaataagttatttcctcttggtctttccagtcctctgttcttatccttcctgacagctccggggctgcgaggtcccatgccccaccctcccattgagaacccctatgctgttcaccaccttgggacgccactagcacataacactaacatttagcttgtaaggtggtccttggtgattcagatggattccacattctccaaaccactaagctcagagtgtaagctagtgatgctttcaactacaggagtccatcagcagcactcaaccgcttcacctagaagcacaatgtgctctctcacaaccctgtttgcacagtttatgctgctccaatttggttcattgctattacaagaatcacttttggcagtataggaatattaaaaggaaagggatggagttttcttgttttggtgtagtaggggaggctggtgttacaggctatcagctcagcagccatgcccctgaaattgcatctatgccttggctgtgggatggaagtatattggatatatccaatccgcctccaaatctgtttggaaaaggatatggtgaaaggttttttatatatataatcggatgatacggattcagacaatagttgtaggtgcagatatgctattccaaaatccagcagatacggattaacagacattttttagcagataacccgacaaggatctatttagataatccgataaactagggtactagaccaacttcccacggcttcaaagttaatctagtctactgtctgctgcttggcttctgggatagtgggtactacctgcagctcctgcacgatgctttcattgtgctgtttagcacctgctgctggctgatgctactttgttgcacagtagcactactagctgatgctcttattgtgctgcttgggctgatagttgcttctcaattggtacattcctagccactaatgtagtaatgttcttctttactttttcttgtatatcaccatgtacacactaccagagagctttggtctatttgcaacctaactacgttccatatccgtgccatttatagcatcccaaacaatccgttcaatatcagcatccatagatcatcagagccgaatctgaatccaacaaaaaaagtatggtaatacgataaagtacaactattatctgtctaaatctgacccgttttcgtccctagctgtgaaggctctctaactacatggttggctacttagcgcaatctggtcatcagagcctaaaccaaaatgtggatcatccaaggcacattagcaaatcaaacagtacctaaaccccaaaagctacggatgctgagcacacaaacccaatccatgaatccagcattacgaccttcaccttctaccgagtgctagagcccgtgcagggactacgagaatcccaatccaagaatccagcattacaccttcacactgttgcaagaaccgtgcagggattacgagtggggatcggaaaacccaatcctagaatccagcattacgcctttcaacttcgaccgtgctagaaagcgcgcatggattcgcgagaaaacggaagggcgtgagagagaggaagcgaaagcgatctcaccatttgacaaggtactggagcttccccttgcggaggcggcggcggcggatgtcctcgatctcgtagtacccctccgccagcttcggcggggagccatccaccaca

SEQ ID NO: 14777 - DNA, 571 bp, Oryza sativa
ataaactacactcttaagattttgtgcttagatagtcatccggggtacaaagtaccagcaataccccctcgtaaatagaactgacaaaacagtagataatcaagcaataagaagtctaacacaacagcaatactacatgaaaatgctctccccttagccatgcccctcctcatccaaaatccatgtaatcaacttcacctcccacagaattctgttgatctccacctttccaagagggaggagacatatgcatcatatgggtctgcttcttgtgtgagggtgcggtcaacaaaccccttgtcgctttaggctaccctctatacctgcagccagcaaaataaaaaatcctggctcaatgacaactaaatagtagctctcatttctatcatttccctctaatagaattccatagcgaaacaatcaacctaggtgatgtgctatttccatgaaagcacaagccatgatgcagtttttgtttccaccatctgtttgttaggtaatgtattgtagccaattaggacgtaatgttgaggcttatgtcgatgacttggttgtaaagacgcgcaaccag

SEQ ID NO: 14778 - DNA, 731 bp, Oryza sativa
ccgctcttgattgtcgagctcggtacccgttgctgatgtgataaaaaatgcagatgttgtactgtcgactttgactggtgcatcttccaaaaagctagatggtattacatttgatttggtcattattgatgaagctgctcaggcacttgagatggcatgttggatagccttattgaaggttaatactaacttatgactagttttttttttcatgttgctgcacgttttgagaatgatgattgctgtaaacagtcatcaaaggttctcgtattatttatgcttttttgaatagcacaataaagatagcatgtactgtttcacaaactcccacccacgcgcgcctgtgatggcggcggcggcgaggagcccacgatctgcggcgttggcgaggggaacacgcccacgcgcttgctgtggcggcgaggaagaagagcccgcgaccaccggtggcggcaaggggcacgtgagattagcgtgcacgcgctgctgccgccattgcagcggcaggcgatctccggtgttcggtgcggcgggcttccgcaagtcacacgtgtcccggggtttacccatgtgctgctgcgggccgaacgcggccgagtggccggcgttcatggcgttagcggcgtgtttgcgtaacacaaggtggctgccgttccgggcgccggccgtgtgctgttgcttgagcacagggcaactagggaacggggtgactgcgctggaccactaccggt

SEQ ID NO: 14779 - DNA, 1236 bp, Oryza sativa
gcccatgattacactcgcacccaagctgaaattttattgtctctaataggtttctatggagaaatttcttaagcggaaagcaccagattgtacaagcaatgtggggagttcatatcccttcgactagatgatgccagttgggaaaagacgatcgaatatgatccaggctcaaggaaaggaattgatgattatcatcccaaccaaagagccaaggtgagaagaaagtactcagagaatgggccttgccaacctggtgatcatgcttttcccatatcagttatttctaacaaagatagaaaattcaatccggcatggtttgatgagtttggtggatggcttgagtacaacaagtccaaagatagagcatattatttcttttgcttcttggttagggaccggaataaaaagatagagcatattatttcttttgcttcttgtttagggaccggaataaaaaggaggaaggatacaaagcatttgttaacgttggttggaatggctattatagaaaggataggcttaaagagcatgtacgtggagttggtagcttgcacaataaccagcattgttaggaacttatgatggttgcttggtgggctcttacgacaaaaaaaaatatttcgcacactacatcgttggactaggttatgactatttgtatttggtctagtgacaagcaccttattttcattagtaataacacccacccctattggacaatataaacccgaatggcatattgacgaatagttttaatgtattaagaaattcgtcacaaaaatccgagcctttcagattccgaccctgatttattattcacggttttttttgtggtttcccagagtcatggaactaaccactatgggggtttgggtgaagcctccttgaagattgggaaaaaaggggaagggtgctttttatttattttcccaacaacaaagcaggggtgcttggaaaatttttgttttttgaggcagccacacaacttcttgtcacaaaggttcaggggcaaatttcgggggtccccttttcctccttggaactcaaaaattttgaccgggctgttcctctcccctaaaaattcggaaaaacccccccctttgtggggcttttgcaggttaccaatatgcccctgttctttataactcgttaaaaaaaaatagtctggtttggcagccccacaagccatatatttttgccggcccaaaatgggctttatccacaatatgtgtgtgg

SEQ ID NO: 14780 - DNA, 576 bp, Oryza sativa
tgaccctccctttctttttcacttaaacattatagtgtaccgttgaatgagaaactaagagaaactatcatgtccatccatgatcattcagaatgaaacgccaataccacaatgccatagttgaaataaggaaaacaaatgcaaactgtttgaagccagttacatgcatactgcaagtacagaaattactgtgtacacaatgaacatgagctgtaactaacataggaaatcaggttatcttgagcttcaacaaaatgaagaaaatgttgaggggaaatagggcaatttagatagagagagactcacgtagcgatggaacatctccacagccttctcagcctcctcaacggtgctcatggtgacaaatccaaatccacgactccgatctgtttctctgttgtagatgacctgaacacgcgaaaatagaggttcatttctgatcaaaagaacaaaaccatgcatatcctaatattttgtctaactgcctctatacggttcacataataaataaatgaataccctaaagacgggaaggtaaatatcaaaggcatctttcataacacaagtaggatgccc

SEQ ID NO: 14781 - DNA, 571 bp, Oryza sativa
tgctgccgtcgccgtatacgaggaggcgacggtccccatgtggccgttctcctcgagactagaatttacagtcaggatcctcaagtttgatgaacctcccagcatgcatttccaatatgtgattcagctaccaacacagggaaggatgacgttcttatcaaaggttgcagccagtcggagatctctatcagtaaaggatgcagacaagtgaagtgctgcatctcatggataacttggccaaccagatgttcatacaaggaatatcaacagatctgcaattagcaacaaggtcaaaattacgaactcttaaataaaggtgacccagtaggcaagcacacactccattgaactatacatagaaatccttatgttctattatgagctgacagtcaccacaaacaagccattctgaacagaacttagtttggccagcaaccggtaaccggacagaataattctaaatttacatatgtaaaaattaatatattttttatttaaatccatatcattctggccagttactaccccgtaacctgtccccggctccagaccataacaagctagtaactgc

SEQ ID NO: 14782 - DNA, 10512 bp, Oryza sativa
cctgcaagtccttctttgctgcttactggtgtcatttttcttgagccataattgttaccactactgtctaggacacgagtagaccagcaactaagggcaagtgacttgggatttttattcagcattactatatgtcattggattgtgtaccactcatatacatatatttggccttcctagctccacatattacttctggacagtacgtacaggttcttgatccctacaatcgctgactacgccttctaggtatcctttgctttgctggtaagaaccttataagagcttggttaggaactccatattgctgagaatcgttgagaggcaccactacacctgcgtagtagattattagggataaccttcaccgttttgtttctgttttggtgtttcaatgtcaggtaacaaaggtgagaagagtccccaggattttgctgattgtgtcagccaagagcaactacgaacactccaacaaaatactcaaaaggacatcacggaggccgttgcaaagtctgtccaagataccttcactaaaatcggcttcctgaaccacatggagaggttggacaagcggatatccacgctaactgatcgggtcgccgcgttggagacaccttccaatgaggaagtggtgagtggtgacaacgatgctcatcctgaagacacggtgtatgattccaatggctatattgacgcaccggctacaaggcaagcacggctatgacgtcgcctacgcacaaaccacacaggtatgggtggcactcgccaccaacaaggtaataataataatcgtgtgcccgatgatccttatgctaaggttaagtttaaaataccatctttttcgggatattatgatgctgagaaataccttgattgggagatgacagtagaacaaaagtttaatgcccaccttgtacccgagcaatatagagttagacaagccagtagtgagttcaaggattttgctattatgtggtgggctaggttatctgatgagggggtactacctactacttgggaagaacttaaggtagctatgcacgataggtttgttcctccatcttatcatagagatttacgcaagaaactgatgcgtttggaacaaggggataaatctgtacaggattactatgtgagctacaaaagggtgtgagacgctgtggcatagtggagggggtcgaggattctatttgtcgtttttattctggtttgagggagaaaattcagaacattgttgattataaggaatttaactctgtcaaccagttgtttcggtttgctatgcttgcagagaaggaattacaggggcgtgagcatcaaggcaagagcaaggcgagcacatacactccgcacacgatgccatctgcgggactgcccaaggccgtctcttttcgggcgtcctcccagccagtgggcaagcaaccagctgcatccggagcttctgcggcaccaaaaccatctccaccaccacgaccagcagagtcaggtaaaggttcctcgtaggtacccgccaagagtgcctcatctgtcgcctcgacgggacgcattcagtgctaccattgccaagggtttgggcatgtgtagaaagattgccctagtcaacgggcctatgttgctacagaagatggctacatcaccacctccgacgtggaagaggaagagggggaagaagaagaagttgaggatgaggatggcgaagtttttggtcgtgatgacacaacggactacaggaccatcattgtgcagcgggtgctcagcgcgcaggtacagcagcatgacaggttgcaatgccataatttgtttgagattttcttcgtcatcaacaaccgtcgtgcacgtgtgatcattgatggaggaagctgcaacaacttggtgagttctgatttggtcaagaagcttggcttgactacacgtacgcatccacacccttaccatattcagtggttaaacgattccggaagagcaaaggtaacacaggtttgtagggtttcgttttccattggctcatatgcagattctgttgattgcgatgtggtttctatgcaagcttgttcacttttactgggccgtctttgggaacatgataatgatgctacacaccatggtaggagtaataaatacacttttgtgcataatgggaagaaaattactttgctacctttgacccctgctgaaattgtagaagctgataaagagcgagctgctagtttgaaacttgatgaatctgaaaatcaacaagtggctaaatctgtttttccacctaaaaaggataagctttcacctagttctaaggctgagggaattaagttgaagggtggtgttatgcttgcaacgaaatgtgacattgctgaaatttcagatgatgatatgtgctatttcttgatatgcaaacaagccttggtttctttagatgatattgctagttcgatacctttcggaagatcgggaaccctagtacacatcatatagttatgaatatcttttaatgtgtaaaaatatatacacatatacaaagtttatatacgatgtatacaaagcttatataggacatatatgaactttgtatatgatgtatatgaactttgtatctcatatacatacgtatttaaaaaataaaaaaaaagaaattgcatcacatatacaaagtttgcatacgcatatacaaactttgcatatgtacgaatacaaactttgtattcatatatctaaaaaaacccaaaaaaacagaagagaaaccaaaaaaaaaggaaaaccaatcttaacagaaacaaaaaaaaaggaaaaaaaacagccaaccgaacagaaacagaaaacacggaaaagcaaaataaaaaaaaagaagggaaaagtctgtctcccgcgcggcgcgtccgccgccccctctccgcgccatagtataaaaactcggaccggagcttgacccggcggacctttcggttcaccggtccgccggtctgaccgatgaaccggcggttcaaccgcgattttttacgtataggtatagtgcatgtttgctagtagtcacaagtgatatacaacctcaacccccagacctgaggtcgattcccaagtatgcacccatttttgccaaaaagttcgaggtaccaatatgatatggaccatactgggcctctcattggcccattacaaaccttcactggtccaaccgtaggcggtttaatctccggttcaacacaaaaccgcccggttcagccggttcacagcggttcgaatgcatgtcggttccggttttttggttcaaccgccggaccggtccggttttttccactatgctccgcgcgcgacacgtgtccagtcgtgcggggaggaacgtgcgctgatcacccaatagccttctcgcagcaatggatcggaggctcggagcggcggaggcaacggcgtcggttgggttgggtgttcgcagatcccgactagcagtaaaattcagcgttccatggtgtatagcgcgtttcacaggggttccccttgggaacttccactgccgctcgatcaggcctttacggcccagatctcgcactcacacatggtaatccgcttccgcaggttcggagttcacggttcacgatgatcattgggaaatgggaagtttatgagcgctcacaatcctgcttagtttatactactatgactctcgcaggcttctatttgggctatcttctgatcttgattttctcctaacttgaaagagaaacaatgtgtagtaaactaaccagtgattgctagtatatggatcatgcggcttatggaaatccgagtgttttttactccatttctctgtttcctccgaaagatattcagttagtcctacacacgcggatcggattgtgtaaagaaaagaaaaaaaaaagaaagaaataaagaactagagctaatccgagtcagatacgctgtgcaagtatacaacatgtatatgcaactgaatacttaaatgatggtgatgtggaggggagaagagaagagagagaagcagtcatcacacctcatacaagactacaagaggcaacatccacacaaactctaagaaataaaaaaaaagaaaagaagaggggttgattggtggcaagtgtattagaccctgtttagatgggactaaaacttttaagtccctatcacatcggatgtttggacactaattataaatattaaatgtagactattaataaaacccatccataatcttggactaattcgcgagacgaatccattgagcctaattaatccataattagcctatgtgatgctacagtaaacattctctaattatgaattaattaggcttaaaaattttgtctcgtaaattagccaatgtgatactacagtatattaaatgcaatgcatttatataaattagttttaattttatggatggatgatgtaggtaaaattggggttaccatcccccattaaacttgccctaactagccggcctatatatagccaatggtcggtgaagccagacgtacgtaggcgtggcacagccatgccctcatttccgaggcaggtatgcagacggcacggcagcaacagcatcatcacggcggcggctctgtattctctgccccctgtcctgtgaagtggtcagtggagtacagtaaatttcttcctccctcgcccgcccacactattcggtcaatcgctcgactcgattgccgatttccatccattgcatgcattggccgcgcgcgtatcgtcttatccactcgatcgtcgcgcgcggcgcgggagacccggcattttgcaggccggccggcagttcatttacaactatggaagcttttatttgtggccatcgttctgtcggttcatttacaactcacttcttctccacctccaaacgagaacaactcgttagcagcagatcaacacaagtgcatacaactgctgctgcactgtacgcaccacagttgtagaaaagaaagaatgaccttgcctgggagaaaacggacgagacacttgacaatatgtactcctatgtgccagtagttggctgctacctccgtttcatattaagtttatttttatcacctcccatttagcttaaataagttcttttaagtaatcattgcgtcagattttataaaaatagagaataattatattgggagtagataaagtgagtagtaattgcattagagcaagtttaacattatagcccactatcagctccaaatcatttatagccaatgtaatagctaatttatacaatagttgtttactatattattaatatatggtcccacatgtcatacacacattacgtcttggagttcgtgctgcagctggctacagatctatagcccgctgctcttctccctcttcctttatctctttaaaatatgtttatagctggcttatagcctgctattgtacctactcttaggattggataaagtagagatattctagtcttttagtgtttgtattggtatgtgtaggagtattttggaatggaggtagtagctaattgttgaggttttattacatctgcagtggtgaatgcagcgcagtagtagacgagctctactcctatctaaaaaaaattgattgtatagccaactttttttataatgtcgaagataccattatagaacatacaagattgataaagtatatccagttaagatccaaaagattatgaaaaaatgtgtttaggtcttctttatttagacttataagccgaaaagtttaagcttaaacaaacaagcggttttttgtttggcttttttaagccataaaccactcttacactattaagctattaagccaaaagctaggttagagaaactattttggcttatttaagatagatatatgactttacctttaaatttagggctttaaatccactagcttataaatcatataagtcaaaaatctgacttaaaaggcaaagcctaatcaaagaggcccttagcctcctaactttgcgtgccagttttaagatttgttttttatgcttttagggtgtatttgagagggaaggttggaacttctctcacgcgcacgcaaaataggtgactcgttagtgcatgctataaaaaaatttaaaaatagattgatatgctttttaaaatcaacttttttatagattttttttttcaaaaaacacattgtttaacagttcagaagaagctcgcacgcacgaaaaatgagggagtggaagtatttcctgaggtatttttgtgtagttcatgagagaggaatcacttaaaaaagataaaggggaaatattcaatgaaaacccatgaaaatcatacctaaaagttctctaaattcatgaaaagttactggatagaagtataggcatgaaatacatttataccaaatctcaaatccaaactcaactttatctgagagaaacaaaaaggacaaatttgaggtaatagtatcatgttactattcacatgaagctttcattttttacttcaaaataaagttgagtttgaacttgaatatattttaagtccacatctatctctggtaatttgttttcataaatttaaaaactttttggcccgattttcacgagttttcactgaatatctccctaaagataatagcacaaaaatatttggtgtatcatatgaaagattacttacataaataaaaacaataacacaatttatgtaccatataatatgtaagttttattttcaaaagttagttaataatgcagaaatatagaaacttacacaatctactatgatgtgctaggaggatagacaaaatttttcataattctcttaatcttctgacaagataaatcaattgtcagccttatatttccttaggcattttgggaattctttacaaagtatatggcccaatggcatattgtatagacaattgataaaaatagtggtatatttgttaacaacgaaaatttgcatcagattcggagaaggaagaaaatcgaagcggatttggtgttgaatcgagttggattcagaatcagactacggatcggctggataccgcatcggctggaaacagaggttgaagactgaacaagttgagaagattgatggccgatacagctgatatggcatgacttaggctcagcatgggcttagattgggataaccgtcattgccaattagagatggagctcaattaaggcaattatatctattaattaggatattgagtcggtttttattagatttggtaagagaccgccgtatatggtcttatttttatcttaactttagaaaggtttgagtcgtgtccacaacggactaatatgtacttggggtataaatatgaaccccatagcattgtaatacgggagccaatccaatacaacttcggtgcatcgccacccttttacttttctcgtttccggcgagttcttcacaagaggtaacccgtctcaatggccagcgctatcggggctaacatgtcgctttagacatgttaggctcgatattgcgagtcattgctatcatatgtctttgctaatctattcttagcttttcaatttagttttatcggttgctgctcgctttagggtttatgctggtttcggttaaattgtcttgctagattagattagctaaggcatctatcatcttgaagtgtctaattgcttgattgtctagattgcatgtttcttttcatactttgagatgcatcatccctagtcgtgcttagaaccatgcaaactagcttgcaatcgaacataataaggataatatcagggtttcaaccgatcttacctaatatgcatgtttcaatacatgtttcatgtatattcgacacttatatagatagatcgttttatgtaagcatatcaagctttagtcagtatcggctagattcccgcaccttcatacctgatttctgtttgatatgtttatatggatcaatctgtttatataggtttgtactaaagtattagctagtacgttatctttcctgctataaatactgtcacatcggctactttcataatattgtcttaaactaatctattaaactcgataaacagtattacagccgattaggcgtgtttagggtttattattctttgatatatccagtccatagccggtttggttgaagcatctaggcccccgttgataattttggtaattaatgacaagcactaattgtggactaaccattctattgagttatatattttaagttaggttcacataatgtgtgctcatggatgattatcatgagctaaaattgatggcgcaaagcaaaaggaaaagaagacggtaaactagtgttttaatgttaaattgatcgagaagatgggcgatcaaaatttgctagtttatttttagcttcgccgtactattaagaggggtaatgacctagacaaagagatgatcaaaatgccacattaggtcatttgcatttggacttgttttagattcaatttgatttgattgtctgtccagggccggtctgaccgatggcctcaagccggtatgaccggcatgccttggctagtctgaccgtcgggttaaccccggtctgactggcctcctggatgccggtggctgtgctctgggatggtgatctagagccgccagagtcgcagccggtctgaccacccacactactgcggtctgaccagccctccttgtgtcagtgcattaaatgcactgcaacaacaactagttttctagccgttgcatagtagttcggtctgactggctacacaacggcggtctgatcggcagtgcactgagttgggggattttgaccccccaacggctagttttggttggtgggagtataaatacatccccaccagcagcaagggacctctcttggtactttcttcacttgcatacaccccttgcatatctcccacacccacttgagctttgtgtttatccatttagtgtgtttgcgggattgttgagccaagagtcaagtgcattgcttcattgtagagctagtgcggcacttgatcatctccgagctgtgtcattgcttgttactcttggaggttgccgcctcatagacggcttgtggaggtgttgcccggtgacctctccgaggagattgtggaggagacccagcgctggtttgtgagtggtttggagttcaccactttcggagtgaaggaataactaccatagtgatcgaggcttgggtagtcctctccgtgggccggctcccaccttgcccaccccttgacgaagggggcgtgcggtggcttcgtggttgagcggtggagttgggctcgcctcaacggggattaggaaaccggcgagtttccggacctcagtgaaaaatttcttgtctcttgtctcatttatttgttgcatttacatttgtgtaatttacattcatagagacatatttgaccccatatcaccctaggattgcaaaacttaacttatgtgtgtgatttactttcctagagatacatttgagcccatatcaccctaggtttgcaaaacttaacttagttgcttagttaaccttgtacatctccctgcctagcaacttaggttagttttgattaagtgccatttagttttaaatagactattcaccccccatctagtcgacatctcgatcctatattggtctaactccatcggctgagaccatcaacgatacgctatcggtctatcgtccgatcggctatgggtcgactaattttgcttttattctttcttgctaattgcaggatcaaatcagctggcacgcccttgacacactcaagtctagccttggacctgcactggagttaagcagatctcccaggccaccatgttttcacatcaacaatattatagaaaggataagatcaattgcaaattgttgaatcagtataaacatagtggcatggattctcacattttaataaatctcactaggaacatgcactttacatcattttttgattcataaaattcaaattcatatggttttttttctacatgtccatttaattcatagggaagaaaggaaactatccataggattatattcctatgcttcacatttcatatgaaaaataacaagatgttgtgtgacctttttgttattttttttgtctttctcatggcactatcaaaggactcttattgtatttcttctggtttttattcttgttgtatttgagaaacatactatttcaatttgtggtttttcctatcccatgaatcaaaggaatcctagtgtgcagcccaaatccactaatcgtgggccaccaagatcacattgagtctactccaccacaggcccaattggagctacatctttagatcctgtgtctacataacctaaaagacaagtttgatagatgagaaatatctccaccttttaagtcgtactctcccatcatcaattaccgatataagaataaacctaacaacaatgttgttcaacaataacgaaggaattgaccatttaccatttgaaggcatcatatacagtgtcttccatagagttataacaaaaatgataataaaaacaaaacagaccgcttcctcaccccatttacaatggggattg

SEQ ID NO: 14783 - DNA, 36598 bp, Oryza sativa
actgcatcagaaaaacctccgaaggcgttaaccatagatgagaactgtaagattttgatatccttatatggtttgaatatatccaaaagctgaaaaaaaaatagcaacttcagaatatgatttttccataagataccaaaagataaagcagaccttgcaataggcaatggctgctactaggagtataggaatcctactctatgttccacagggtatgccgtttcctcttatctgaggtgtgtatatgtctcgatatacctttatgtttagtgatttttaatgacgggtgtgttcggatgtgattgctgcagcggctttcaactactgcggctgcagcagctgcagcagcaattgcagctgatcaaggcatgatacctcttgtctggtgacttgttggcttgtcgcacacatatttcttaataaaattggagtcttgtctcaaataaaatgttcatgtttgcgaacttcaaaattacagcattaattctgagtttgcatgatatgccttttgctccagttctcactttagcttgagtttcctttttctaaaaatcctataatctgggtactagtatagttccctcatgttgtgacaaataagtatcctctaatctaaatgttgtatatttgtatgcatgaccacatgagagataaattaggcatgcataatgtgcaaacaatgccatttaccgtttgttctgtgctattccttggtaagagaacaggcgcgcctttattggttctattagttgttgagcatctggtgctatgctcattgcagagctcaacctcaagaaatgattctttgacctatgcaagatgcaaaacaataattattagaaggcaaacccacctttcttactaccaaatattcatagtgaattgttaaaacaagtacaataataacattacctgtttaggcaatgatggattctcaagaaacgagtattctctaaaatcaatgtgtgggccaaactcctccttaggtaagtcctttagcataacatgtacctgtagaattaaatcatcgtagtaggaatgttagcttcatactggatccacctgtggacttctctggcctgtttattatgtagtgcaaaatacaagacaactttatttgtgttgctgaccagttggtatgaaacgccatcattaacactattctatctgcttataaatatctagcatttcaccaaagctttgttcacatatttgtccttttcaacttccctatgcaaatttcccacagtatccatgctcattttacccacaaaaaaccataagttgaccacacatcatttgttattcctgtgatggtaatccggtggtacttttgctatatttatgaaaaatattaatggcccgatatgtcaatttttatctgcacattgccacattctgagggtggttgcaaaataatgaataacgcatatcagtacagtaaccagatcagcaataatatgttgaaaagaagttttcagtacatagcactgtggtctggtctaaactccaaaccaccaaagcttggacaataaaaagcatggcaagcttcagccacctgccacctggatacatctaaaaaaaatgacatctaaaattctaaaactacagagaatttccaaaaatctaaggtatgctgacacatataacatgaaatcccagttatataatttactttaacttcactaaccatatatacttttgaaaaaaaaaatgtgatgaatttcctacaaaatatgattcatacaactaaggaaactatttctctaaccaactaatagtatgtcatataatatgaaaaatagtaaataatgttatgataacagaaatgaaaaaaattcccagtgtaatcacctcaaaaacatgatccattggacagaggaaaggttgtctggtcattgttccttccaaaactccaggatgtccaaaccacatcctatcaagcctgcaccataatggaggcattacctaaaagtacaaacagtagtcagaaattgggtgtccacaagtttgagcacaatacatcgaacagcgtaattctgctctcaaacacctccagaagttatctaagataaaaacttatcctcaaaaaagcaagcatgaagcacctaccatacattactactcaacacctcaatactcactaattagctgcagcttactcatttaaggataaatgcacttttgcaagttgtaaattttgtatcaaattaagatggtgcacacatcatcagtaaagacaaaattaacatctaaaagataagaacatattaataatcatttcaaccttttaacatatagaaagtttatggaaagagatcacattcaagaaatcgaattgcaggttaaatcaatctcaactaaatgtttacacttaatgatctgcatgtccactacctcacaatcacgaatagtaagtgtgtagtattcacactaccatcatggagttcaaatcaaactagaaaaagaatagaaattccactgaccagggtcctctttaatagggaagcaatagcgagtgcagttcttatttgcttcaactgaaaattttcaagcacatgactaatcaggaaaaagaaaaggaataaccatcaataacagaagtgcagccacaaatttgcagaaatatatgtgtagctgcagatacctggtaattgaccaatgcaaaatgagatttaacagtatgagcgccatctaacagcaagcttttaggaatgttgggtctaaatgataggaaacctcctgcatcataataccaggtaaattatggacatgatgaaaaaaagtagtaagtaaagattgtaggattcaaatccgaataatgttatatgcatgaaaataatttcatgtgaccatcttttcattcttggatcatatatggctacagcctacatggtttgtttaacagtgctccattggtaattctgagataacccatacagacgaaacattttaacactagggtacatcatggtcttcaaacataaaatcagaaggcatttgtacactagaacacatcatgatctttaaacatgaagtcatgaacctctgtcccaaagaagttccgtcatgatagggtcagagaataaacatacctggtgagtcatagtatgatggctgatcaaagaaaagcattgcttcacgcaatctatgacgctttcccacagtacctgcatactggaaagtagtatgcacagcatatggttctagccgaagctgctgatacatgccctggcaactcaagaaaaaaatacatttcaggtataaacaacccaagaaaattacagagaattttagacgaaagggacagtataaacaagatgcacaaagtgtgtgaaacaaaagaacaagaaccaaacatatgcaggacaacaaagataaaaaatgcaattgctaactaactgaaaatttactcaccaaagaaaaattttgacatgcaagatatttaatttgccaatttcaaacaaataagagcaactacctgcacaaaatatgtatgaccactacagaatatacttgctggtaggactccaagcttcagtttcccatcataagaatatacaagttcatcttctccaacaaccgggtatccaaattttttgtgtataaggtcattaaaagcattctggtcccacaacgtatcatcagataagagtaagtctttccaatcttttgccagcctcttagctggttcagtgggtcgccaatggaaaataccgatattgtatgcaccagtaactgtgcataagaaagggggggggaaggcaatatgttaggttcaaatagtaactgcaattgatggtaaacagaacaaaaaatcttattatacaggtaaacagggaaaaaaaatattatacaggcaaacagaaaatattggagcagattttttaaaacatcagaaaaatacagtaacaagaacattagttcacatcaggttctaattctctaggatttgctattgctgatacatattggaagctatattctacagcaattgtcttcaccaacagaagtccaattccagagtcattccactgtaaatatttaaaaattagttctattctcataagttgaactaaaattaattccaaactttcagaatttagtatcaaaaggtcaagaaaattcatctcagtattgtgcagttctgatttcctgatcttacagcagggcaatgattattgtagatagattagcactgggaaatatcgaaaaatagagaatgcatcacaccatctatctcgtcacaacatatgacttagataaggtgcattattgcaaagtgtagataattcaccttccctccagttctccaggctgtcatcggtgaccgtgggaatgacctggtcgctggacgtgaggagatccgcgtcagggtagcgggcgaggtagggcagcgggttcttgagccacaccatgtccgtgtcgcacatgagcagctcgtagccgaagggcaggagcgcgttgatgagcagcaccttctccctgcccatcttgtggaaggtgggcgagccccagacggcgtcctcggtggccatcctgctgcccatgtcgaagacggggacgcccctgaggtagagctcccggagcagcttggtgtccatggcgccgacgaggaggctgtcgacgccgaggtccgtgaggtggcgcacccaggtgaggatgaagtcgaggaaggcgtggttgccgaaggtgacgacaatggcgccgccgcgggcgcgggcgcccaccatctcgcgggtgaggcggaacgcgcgcggcgcgggcatccgctccctccgcggcgggggcttccagatgggccgattgtacatggtctccggctgcgccacaccggagactgcgcccgagaggttggcggcggcggcggacgcgggagggatggggagcgggggcgcggcgagcgaggagaaggaggagaggaggaagaagagcgcggagacggcgaacccgccgatgacggcgccgtagatcccgacgaagaccggcttggtcgagtcggcggggcaccacggcgccatctcgccggccggcggcggcggatcgtggtcgccggagaggcaaggtcagcggctcaccgctgccattgtcgggaaaggggactaggggaggtggggtttgagacgagacgggagtgggcggcgccggcgggtcggggggcccacctggcggtggctgcacggtaagaccttactaccgatgatcccgttacggtgaaggaatcacgatggaaaaagcacgctcccgtttcgctcgccactgtcgtgcggggcccacttgacagtgaaagcaagtagggagtggatttgtgtcttcatttccacatgttcatccgttgtagtagagtatgactgtcaactcaatcaagtacactgtacgagtggtgtgtttatgtagggcaaatggcaatgtccaagcgtacgaaaagggaaagataaatggatattcatctatgggtgtgtttggaagagatttttttggcagcagctgcggctgcagtagtttaaaacggctgtaatctgtagcagcaaaaatggctgtcaaacgaggtctatttctctgtgcagctatgcttcaaacgtcaaatagggtaattttaagcttgtctaatcatcacggtttgcgcattgaacgattgagaaattcttttctttttagaaatataatacaaacgcagacatccacaatgcgcgtacactcacccctatgagcacgcgcgtataacctacctctaagcacttctggaagattggattagcatatcttgagattaacaaagtcaccacgaaccggcgcctcattgtcgcctattactgaaagaacaattagccataaatacgagcacccgtgttaaatctaaattttaactctggtgagctagtttcaccacaagaaacctaaccagttaagatacgctcacttcgtgaaaacctagataaatttggtgcgtcgtggaatatagttttcacctaaaatattgttttctttgagcggaattttgttcatatttcagtactagtatcttctgtgggccaattattagagcttattaatatctttacgttaaaaatactcttgaaaataagttctagtttttaaagtccttttgaagtaaataactatatttataataattaaaaaaacagccctacaaaaattccccatgtcatctaaaactaatctaaattcaagccaaagttgaaaaatgcacgatattgaaacttaaaagttgaatattgtctggtttagagttaattttagtgttattacatttttttaaaacaaatatttaggattgtaaatgaacttaattttgtcatttatgtcttacctggtatacattgagatatacaccaaaatattcgtgttattagagggaggggaaatttgccaagattgatatggactcacttcattcacaaattatcatcatataaatttttcagtgttattcagaaatgatcagtatatttggtacttcctacatgtgactttttgttttcctgtgcagtataaaataatcagttgcatgtattgttcaatgtactaactaattgtaattgtggtgcatgactgcatgcatgcaagcaatatcattggcgcatattgcccttgaagcatatatataggacacaagaaatggtgttgcatgttaatcgatgtcaatttaagtgacatgtgtaagtgtgatggtatcgatacacaaaccatatatgctgatcatttgtgaatagtggaagtacaatttatcaaggatttgtccttttgccaccacattaaaaaaaaacagaaagttctaactagctaggtactacatctcttttctaactagataccaagggagctgccagagatttctgtcgggataaggtagtagcactttgtaaatgaccaccatcgagccattcagacacgcatagatgaagaagattttagcaatatcgtacaaacagattggaacagtctattccttagacagctctagttttttgtctcccatttctcattctgtttgatgtggaaaatttgcaacaagtcttgtggctttgttcatccgcagatgatgcaaaccggaattttaattaaattatctgaaaagctacaaatttttttttgaattttatttgtgcaatttaagaaattctaaacaaacatggatggaccgtgtcattgtagattactagttatcgtgcacatgtaaggcatgttttggtattatgtacaataaaaaaaatagaataataaatgtaccttttttatatagagcactccatacaaattctaaaggtaaaaaaagagtatcatagaccctagtaaaaagcatgtgttatgtgtactcctggagtgccaagctgtgcaccatgtaaattactacgggagaagcaaagcagcaaaccttgtgtccaagattgtggatctaattctagacaattcattcaacataggaataaatgttttttcaagaaggtcctcagacctaccccgtagcttatattgaaagccacaacgacaggttcgctgggattacaaggtttacatgagctcagagcaaaagggaagtctcacatggtcacacatcccgaccagctagggtcacttaaaggatagacaaactaaacaaaaaggggtaagaactcccatagcagaaattgacaactcttactttaacacggacttcaaactttttttggtaggaaaaacatcatccaactcttgatcttggtcgcagccttgctattgccccttcagacgtgccaccagagcctccatctgcttctccttggggaaggagaggtttccactacatcagttgagaaataatttgaaaaagttaaattagaagggagtaagcaatgttatctctaaacaccatatcattcctcgttagccaccaggttcacacaattgcagctaatcagcaaagacacaacaaattttgtacaaatttaagggaaagaaaattgttcaccagtttgttttattcgttattgtcccccaaaaaaattgtaatagatctctgatagaagaaatagaggcttatatcattttattttggtcttaacccaattgttaaaaaaattacagttagcatgattgaaaacgacattcttgtatgttttttcagaaatgaatcttagcaggatacccaattaaagctcactaatcccatgccttgaactgcatatggtaacatgcatgctccatgtcccatgcaacacgctgcatctggctgactatacaaaaggacaatatgaaatttgttaaaaaagtgttttttaaatagcacaaatagaagaggcacaatcatctgttgttactctgcagttgctgctaaatagcccttctgattcctgtacatagcttcagatccattaagcttcattttttattcagtacaaaaacgattttgaaagaacactttagatagaaacattggtttatcccatgcggcctctcgccaaagctgagtcgtgtagccaaaaagattgaccgtacagaaaaacatggtcacaaaggtgatgttttgcggcaaagggaaatttaaaatgtttaaagaagatagtgtcaccagagatatgttgcatcataaagtaaatcagagaaaaaaaacttacagcaattcacacaaaatgaatacaatttcctcttttagactccaaaaattcttaatgctttttctgcacttcacgtttgctcaatctttcaacacacaagctctttgaacatggctctgaagctgaagcactcacttcgctgtgcaaaacaggagaaagtgctttagcaaatcactgggcaacagtacatccacataggaggccattagagcaactttgcacataagggatcaatagatgtgtatattcctaagcattgttgttggcacccagcttgaaccaactattgtgctaatttagccaaaaaaggattgatccttgggaatcaaaaagtctatcaggcttgataggtttgtctgaattagtcgagggtgcagactgcaagttacatgatgttatgatgttgaggtgagatcgatttaaattaataatgagacacaacctgtcctgagtcaactgcttctgaaattcatcctccgtcactgcagagaagggcagtaccacctgaatagttggagttggcaaatcacctgcatatacacttatttttttattagccaaataaaatcttaattgacaacaagcacagtaccattagaatcagaaatgccataatcatgccttggctgctccttcgatgtgaataaatcaaactttgagaacaacatgaatataatatggttacctaccttttttcgaggccaagttatactggccgccgcagctgccgttctccttcttaggaaggttgaacccagtatcacactgcaaaccactcaattcccctaatcaaacaccatacgccaccaacatcagataaaaatctttagagaaggggaggaacatcacctgaactcctgaacatgacaaggtcatccatcgtgtagatgcgctagatccggcaacatcgccatatactgcaagtaccaagtagagagggcggggccatggcggtgtccaagcaatgtgccatcaccaccgaccttgcattcacacgcaagcaccacctcctctacctgacgtggcggcgtgcactgtgggagtcgaactcatgaggtgcctgaggtgttgagggatggccttggttcctcctccacctgacgtgacgtggtaccgtaggcggtgggacagctgtagcagtgcatatacactggatctcctcttctccactgcccgacgacggcagtgaggcgaagactttgatccaaggacgacggctctcgatccaaatccaacagcgcctgcgtgcagggaaggggagctggcgacggacgccgctgcgggatacgggtggtggaaggcgacaacggcgggggaagggcgagggcatgaggggctgaggggatgatatacttgccttggcagttattgcgacgatgcggggattgcgccatcaaggaggcgagattgacgatggcgatggggatgagaatggggatggggctttgggtggatgatgcagcgatggatttctggccgatgatttcaccgagccgattgacggatggagaagtggtggatcgaggcggagcgagtagaagcggcgcgtgttggcggcggcggcggcgacgccggaaggggacgaccctccgaaggcggcgaacggggaatgcgaggaggaagagggcggaggaggaggagcgccggcgggagcagcggtggggcgaggagaatcggcgcgtgatggcagcggcagcaaaagcgctggggaggagcgcgagtcccgcgtgttcagcgcacgctcatcgcgcgaggaggaggaagcggacggataggagagatggcggacggacgatctggatcaggagagacgcagatgaacggtagtgattgattcggatgatttcaccagtaggattggagggggcaactcctcttttttatattagtatagatatagaagtatagatgtgcaatactgtgatcacttagctaccgtggagagaaatggatattttgttaaaaagtaagagaagttctacacatgattaagcattaatcattataaacttgaaaaaagagattaatttgatttgttcaaacatcttctatataaaactttttttactagaaaaaacacaccatttagtagtttaaaagtgtgctaatgaaaaacaagtaagttaaagtttggattcgaaggaaaaaattcgaaattaatcttttttttaagtttataacgattaatgattaattaataatatgttaatgagttttatccttttatgcgtacgatgaatctttcttcaaactcgctagaagaaagcagtcttactacaacatactctatatatcgaacatattattttcaaaattttctaaagcacacaaaatataatctgaaaggggttgtaaaaccagctctctcattgtgagatatttgtacgcaaaaggccagatattttagcggcgaaggagatctttcccgctacagggcaaaagctaaagcgcctaacaatgtacttgagcctcgcgttctcttgtcccatagcgaagaaaacagaggcggctggcaagaaaaatgaaaaaataacaaaaaaaaagagggaaaaaaatcaaggcagaagaatactcatccaatccaaccacacgccccggccagctcgtcgtcgccacctcaccaccacacacgcgcagccaagcccctcacctcacctcacctctccatccacgataatatcatgatccatccttatatatgcctccttcgcaaactcacttcggattctcttctctttctttcatcagctatcacaattcacaagtgtagactgtaggatggccacgctctcttcctgcagccgcctgagcaccggcggcggcgccgtccagcgccgtccccggcggccggcaagcgctgcgaccatcacctgccaccggagctcctcctcctcctcgtcggccagggtagtccgcacaggcgccgccgcggcgcctgccgcggccacggcgcccgccgtgccgcagaccaacgagtgagtaactcacaaactgagctctcccctttaatttgtggctgatgaaaaagttgtgttgatttaaaaaaaaaaattggttgttgcaggtgctcgcttccgacatgggcggagttcgagctgggcaaggcgccggtctactggaagaccatgaacggtcttcctccatcggctgtaagtttaatttcttcacaaaaagaaatactttcactcatcatacatgtaacaactactccttctgatttatattataaatcattttgatttttttttcctaatcatttttttaaaaaaatttgactatgtttttttaaaataattaccaacatgtacaccgaattagtttcattaaaattaacatttgatatattttgataatatgtttgttttgggttaagaattttgttatattttcaaactttaaaaaataataagaaaaagaaagtcaaaagcaacttataatatggaacagcggtagtactagcaacctggcagattcatcatggaaatagtagctaattaagctgccgctgtgttcttaccagggagagggcctgatccttttctacaacccggcagcgaccaagatgacccccaacgctcagtttggcatcgcgtttaatggtaattgagcaccctcttaattctccttttcacccacccagtgtccgggaaaaattcaggctacaaattggtttgatctgaatctgattcaggagttgataactgagactttatttgctgcaggtggttttaaccagccgatcatgtgcggtggtgagccgaggcagatgacgctgcaagagaggggatcagctgatcctcccatatacaccatcaggatacgtgtgccgcagcatggtcagcagctgattgttttgtttcgttgaagatatgaatgattcgcctgcaatttctcattaacttaaattaagcttttgcatcatgctgacaccatatgttcaagtgatcgttactagtactgtatgtatgtaatagcatgttgtcatctgagtggccatggattcgttactagtactgtatgtatgtaatagcatgttgtcatcggagtgagattttgtctggttggttttgcactcgcagccatgaccctcgtcttctccttcacaaacggggtggattgggatggaccgtacaccctcaagttcagggtccccaagccatggctcaacaagcccttgagcttcttcaacgaggtaaaattttgctccgagttcgtgttgttttcaatcaaacaagcttgatttgtaccttgaatccaattttattgttaattaccatttcttgatagcttatgcactggaaaagttgaaactcctctttggatcagtgttaacttttagaatgcaccttttgtgctaataaagagagttattttaaaaattatctgtgacgacgatgcagggtctagcagacgaactgaacagagaaggggcatgcgacagagccatcttcccagacgaaaacgttgtcatcacaagctgcgagatgggcagctactacgaagagggggtaaaacttttaacctttatctcaaattcatgattaatcctagccagttctgaaccgttgctgcatcccctggcactggcagggagatcgctgcaagctggacattgtgtcagggtgcatggatccaaactcgcacatgtttgatccactcgccaccgtggatgacggatcatgcccaatggattccgattccgaggaatgaactgaactacagtctcagcgagttttattagcaaggagaagctgtaattagtggccactgttgttcaatgtaaaaagaaagaagcgacacggtatgatgtacaagaaagcacagatgtgtgatagaatggtattagggaatgatgtgtgctgcatttggtgaaaagaatacacaactgtaggcctcatacaaatgtggttgttaatttgtgacagaactactctgaatttaatagagatcaacctatacaaataccatcaaagaaagtgtcggcacgtgaccaaaagttccaaaaacacgggataactcctgattaaacaaggagaaaaaaaaattattttctgatttatctatatagccttcagttcagagtttgatacttatactggaaaagtggaaatggacccagaacacgaatcaaccggaatttaagttcagttccagcacaattccaggcatccgcccgtttgtctgatgtctacgtactgcaaaaatgtcgctcatgtctgctagacgactaccaaattaggccaagaaaaaaaaaaccaagcattaagccttgaacattcacaggacaaagtctgcaaatggtccaagcaaactgatgcaaccatgcaaatttcagtcacagttacactgcggaaagaaggcatacatgtcaaggcaacatggcatgccatcatcacgccagttcactgatacagcatccagtcataatggagttgcacagaccatattactacaagggcaaagtcaacttgcagcacattgctgttcgttttgagtagcctcagtcacagcttagccgcctccaacctggcgtttccaggagtcctccacaataagctcgtcaacgccccagtcctcatagctatatttgaacacacagtaaactattataatgaggttacaaaatcaggaaacacataaatgtcttttattcaaatctcaccttccgtcaggtaagtaccgcctaattgtgaatgggatcttgcgtgctctcagctctttcatggcaatctaatttgcacaaagacaatagtttagcatagcaagtaatttgaaagatagaataaaatcaactgacaatttctgacagaaagagagaagaaatctaagtagtatttataatgagttgttgataagtgcagtcaacattcatctcatcttggttttgtgggagtactctaccaaaatatttcagttaccatgcctaaaacataccaaaataattttttatccgggaaaagcaatctaagacccttgtggaattctaaaaacatgtgaaaatttttcatgacatggaggaagagggacacgtgtaaacatacaaaattttaagattgagaacaatatgggagtcaacaaaaattgtattcatattccggaagaattgatttcttctatctcttccttttctctgtccatcatgataacaaagtttggcatgaacaaagaaaacccggcacctgccttttccttttcctagaatttttaaaacctccggttaactcttccgatttagatataataaaccttctagaagttggaataaggatggaactaatgcgtatgaaagtcccacttcagggatagcagtggcatatttaccagccagcagccatataatatatcaagtgttacaacaaaaccaatctttggtattggactatcaaacactaaaacataatacagaattaatcaattgccacttgttctccacataaactagatcaatttcatgatatttgaaatgccatgaaaaacaatgtataagagccctgactaataacttctgtctgggtagaagaactaattcaaatagacaagtcagggtgcttgtcaacatttgtcctatctgtttttatattgtggaaacaaatcacagaatcacaaggctaccaaataatagtatctagagccttgatgaaagaaatatgtgtacaaatacaaccttgtgcatactagtataattgcagacgaaaacttattgtcagtcacatatttagatttcaagctgactcggcgtggcagccctccatgacgaaaaaaagacattctattgattgaattgctggcctatgtctatacacaattacatacagctatcaaacatgtgtactttgttgaattatatattcaaacgttaattttattaattagttggcagtcaggtgttgtatgcctaaacaagaaaattccattgttcattttcattcttcatgatggaaacagatgtttattgtaaaaggttatttaagttgtacaatataagcttggtatatggaactggcaaaaatcaaaataatgaatatgtagaggttatcgcttgtttgaacaaatacctattgcatgtatagtttggaaaaatagaatttacctcaagaggatcagtttctccctcaagctcaaccataactggagcattcatgctataaaacaacagcaagggttattaatactgtatggtaaactattagccatcaaattggcaatactgtgcaatatgatatatagaaacataccttatctgtaatgcacgtgtacccaggatgcgggcacgctcatactttgtcatatactttgacgttttgcgtgggcgctgagttttttcttgttccttatcttcagcctctgcccctacaacctcatcagggccatcctcgttattctcaggttcctcttcagccccttcctattattgaacagaactccatcagttcttttccattaacagataacatcactgcatgaggatagcaatgtgtgtacctcaatctcaggttctggtggctcatcctcatacctgcagaggaaaatacaatgccattccaaaatcaatatccaacaaaacaatcctttaaaatgacatataacaatcagtgcttcagcaatcatatagttgtgcaaggataatggtagatatctcactaggatgaaatgtaaaagaaattcaaaattttcacttctaccaacactaatgaacataactttggtctgtgtaatttagtaattacactaaaattgaatattcctgagaaaatggacatataactaactaattcatatgttttaaccgccaagccaccacagtaaattaagcagaaaagaatgaaaccacacattcttgttccaattagaagcaagatgttagagatcctctaagtttttagctagcgtgacaaagttaggattccatattagtacaatgaccatctatcttaatatgtaatagattttttccatttttatctttcatttttctccttgttttccttatatgcatatatatttttcccctttctttatactgctgcataaatgatttgcaccaagcctcctattacatcaattgcatagctcccctgacctatatcggtctagccaatcccttcatgtccatgtcaccatagaaaggagcaagcaggaggtacgcatgagaaccccccatccccgactgcgttcaatgttcttttctctcaaacaaagcggtatagaatcatcaatgaaaattcccataattggtgagcgggattgtcgcattaacccaattgattcatccaagcaaacctaaatttcaaagaacctgctaaacctaaccataaccaaacaagcagggaaacagaatatcactctttacagtatccccttctgttgctgacaaactaatctcagacaacttctaagagccattactcgactcaacgaacgaaacatgccctaagaataatactcgactcaacgatcaaaacatgccccaagaataaactccaaagacaccttttacccgtgaagaccagtacgcatccaacattaacacctctcgttttccaaaaaccaatcgagtgaatcgcggcaatcgccataactagcttcgactcgaatcaacgaacccaccaccccaaatgctccccatggcgatgaggagcgccaacgaatcacccagcacagactcctaccggcgcaacatgttacacagagagctggttcgaccggtctgggattagaaatttattagaacaggcgatgcctatcgaaaccctagattggattcccatgatcatacggaaaaaggactagagagagtgagatagtagagagtaaggcaaaccccatgtccatgtcgttgtagtcgtcgtccgccatggcttccgccgcctctgattccggccgctacaatcgctagggtttcgccgcacggcggccaagcggtgctcgacagggagaaagggggcaaatgggactctgggagagcgcaacggacggcccaccagcccgggaaaaagaacggggacaatccccggagaatcgtagaaggatctggaccgtatgatccgtatctgcagaaatttcaaaatatggcattcaatgcgccctgcagaatttatcagtctatccgttgttttcagactatgacattaggaatttaggatacgaatttttttcgttctacgccactttgtccgccagcgtcggttgcgtcgtcctagtccaccaaccgcgctcgcgtaagccacaagtcattgttcgtctgttcaccactcgtatcagtcgagtcaccctctgtccgctggcgtcatcgttgtcgacatccatcatctgcatcgccatccatctgtggcaccgtcatcgtctgtttgccaccatcactgtgtcgctatagtccatccatctgtggcaccgtcatcgtctgtttgccaccatcactgtgtcgctatagtcctctgcaacgccagttgtgccaggacaccatcgtcctcttcctgctacattgcgggcctacctcgaaccaaaacctacgtgcgcttttgccgtcgtttgcctatgatggattttggcatccatccggacctggattggttgattcatcaactgatgacgtcatcttacatgcttagtttgcttggattgcttctctttcttatctcgcccctttatatttccctctttaactttttccttgctaatcaaatttggacaacgccggcagcaccgacggatgaacgacggcaacaccgggcggattaacaaggatggggcaacctatgctggtagatggagtggcacataatgaagaaaattcgcagcctagtgttgtattctaaaagaaaagtaaattgggtggcaaattctaaaagaagtgtgtattggtgatgaattctaaaactttgtttgttggatttaagctcagttctagtgagcagtactcccctttctccgaaatatagatatttctagataattttggagggattaaggagtgaaggcgaaaaaatcatagcacccttcagagttgttcggagaatcaacatgctgcagcgctgcacctacaactacagccaggggcggatctatagtactaggaccggtgtcaggcgacaccgacgattttcggcaaaacctatagcaaaactgcttattcatatgttataacactgtgatctaaatataattagtatactatgacaccgatagacacgttatgacaccaatgaatcgattttctggatccgctactaactacagcggctacaggaggatgggctgttccctgctgcaacaaaatagttgggctttgcaacacagcccaaaccgctacatcatgggatactaaacaaccccttcattgatgcacgtaggacttatagtctacagaaaatagggtggttgatgggttaaaagagagctataaatagttatatatggggtaaatttgaatcctaaaaattagttatatattaagatggagggagtagcagttacctttaatttccacttgcatgtaaaatgaggtaagccattagcttatgattaattgaatattgattactacaaacttaaaaattgtgtttatttgaatttttttaaaaaaactattatatagaaaagatttatttgaaaatgtgcttaaaaaagagaaagttacaactgctaaacaagaaaacaaacaacgcgttagggtttttagttaatttgtagtgatttagaattttatattttcacaaacaaaataattcattcaaattaatattatgaatgtaaacacaaatctagatatagatttataaatctaagaatatccaacttcaataatattggctagagctgtttcaaatagggacaatgtgggtagaattttgttcgtcaattcgttccattaaaaaaataaaaaaaattctttgttaatttcctctaggtttgctaaatgattccttaccgttgtctatttaattagtgttttttactggctctgttattttagcattttaatctctattttatttcctgaacgtatttatatccgaatctaatgtgcaaacatactcgaacacattcaaatcgggctcggctttaatttttagtgtaaaacgatttacgtatgaaaacttggtatatattaacttttcctaaaaagacgattctagaccacgcttgcacaaacagcccatttcaatttggttctaacatttacatgaaaatttaaacaaatgtgggttaaaaaatacggtttgctgagatgaaaaacgcgcctagctaggttggtacatgggttgatttgagtttcaaaattattatggcacgtgacgcatgggttgattttgagtccaactccatatctatacatagttacaagcctacaacgtgttcacaggcctattcagaagtcttcctggataacagtacgtgagctggttgcgtatttgtagacagctaacgagcatgtattagacgtaccttttttttttttcttgaatacccaaaagatccgtttatcattatattaaaataagagagggtataaccccgagtacaaaacaagatacacccttattaaattataacaaccatatgtgccacaagctcgacaatgaacacaactaaaaaacggccacaaccacaaacccgactataaaactaaccacccggctctcgagcaagctataagaatagctccaaggcccagccaaacaacacagccattcttttgccttggcaacaaagaccacctgctaagttagcagcaaccccctaaatgacacattaatttcaccaaaatgactacaaattgagcccgtattgcactgggtcattagttgcctcattggtcttgtttcataactcctccctttttcaccatcaggccattagaatgactatagacgtaccacatttacacattttctcctcttttagtatgacaggcattttccttgacaataggtgctattctcaaacatcgtaaagatatggctcctagttagggtggacaatggatgaaactaaatattatttgagggcacaaataaataaattaaatattaaaaagttgaaaaatgtcccataataaacgtcgatgaaaaaattttttgtgaaaactgtaaagctaggaacttgggaagtgtggcggtatgccaaccatctgttagctcacaagaacggggcctctgttgccggatttggattttaccatagctactagtcctgcttagaatgattctaaacttgaatttaatatttgaaattcaaatttgtatttaaactcacatccttcttccccgttaactaggagtactgatttttggaaactgaatattgtaccagtataagcagtagtgcattattacagtttttggcaggatttcttatatatttatttaacaaagttcgataaaaaaaattaaatgaaagcacacctctaacaaatttgccaagagtggtacggtttgaaatgacattgatcttaacaaccccgtatttcttactaggtgattctccgtattttgctgtggaaattactaagtaatttttagagtgaagtgcatggatagtcactaaacttgagcaggtatgtcacttaggtccctatttttgagtccctcaacttgtcttaggtgccatataggtccaaacgagctctaacccacttcgtgagatgacgtggcatgccatggtgacacttacgtgtcagtgcgatccacatgtcagtcacatagaaaaaataaaatttaaaaagagaggagagagagtgagagagagagagagagaggagaaaataatgtttttaattttgaaaaataaatgaaaaaggagaggagaaaaaatatgttcttaatttttttctatatgtgattgatatatggtttctactgacacgtaggcaccaccatagcatatgccacgtcaccaccatggcatgccacgtcagtacacggagcgggttggagcccgtttggacctatatgacacatgagataagttgagggacacaaaaatgtattttgagagttctaggacctagatgacacacccacagaagtttatggacctccaatgcactttactcaataatcgagctaagagtgaaacggatattagtttgccaaactgaaagtgcatctaggacccctcatttgttttggtgttaatgacaacacaattagaggataactaatgctttttgttgagatgtatgcaaggatgaaaaaggagtggaacttaagcatagaaagctttgtggcaatttgtgtggtaatcacctctctaaaccttgtgtatcatgtgttcttgagtattgggatgccatactattaagagggataccacatgcatataattggtagaacactagtgctcaaaatcctttctttgaagtgttcctgttttattcctgtcggactatccgatcttgatcagactatccgatgctcagactatccgaaatttcacagaactttgccctctgtctttggtcttagtgttggtcataaaatatcggactatccgatataaggtcggactatccgatacatcggactatctgaaatttctcagaacttcactctcggttttgaattgctttttattcctcttgagtgaatttcaaatcagactatccgatgtgatcggagtatccgatgacccagagactccaaaactcaatggaacttgagtctatgtgagaggatgaaattcatgactcaaaaataacggaatatccgatatgacatcggactatccgatcgatcggattgtccgaaattctccagaatttcgttctctgtctttggcttgctggggggggtcaaaaacatcggattatccgatgtcacctcggactttccgaggtgggatgaaaagattcccttcccaacggccacattttgggggatctataaataccccccacctaacccttttctagggttacccaactcattcattcacattcactttagggttgagcttggtgctaaggtgctttggatctttgaactcttcctccctcactcaaatccctccttgttctttgtgtggtggatcttggtggttgtggatttggtgtttgagggcctagtgtgtgtttcactcgatcttgagcactagggtttgaccaagagttgtgtggtgtttgttattcttggaggttgaggactcctagacggctaggtgtcactcccgagccaccgatctacgtgtggttggccgggagaagtttgtgaaggttggatctcacctccacaaggaaagagataccccttagtggaagaaggagtgcttagtgcaacctcttgaggaaagggttagcaaagacccggctcttagtgagctcctcaacggagagtaatatcccctcaaagatttgaactccgggaacaactccgtgaacttcattgttggtgatatctcttcatcttctctttagctttgcttaattgtgctgctatagatctattcgctgtttgcgctatactcttgtttgtgtgctagatctgcttgttgtgactctttagtggatcagacagtctgatccaacatcagactatctgatattttcggatagtctgactgtggatcagactttccgaccctaactcagttttagcttccgtataaagttttaaattagcctattcaccccctctctaggcctaattgaccctttcacaaactatgttcaaagagaaataaatttaagaccgataggagattacagatgaaatatgatatctcgcgctttgattatatggataaatatatgttaagtattataaaaatcattcatatttatgttgaaaatattgtgaaaataatatgaaaaggtgattatttgatatgcttaaatattgatttgtagaattcgatgaattgtagatgatgttgcatgcatgagctttgtttataattattgctagtagatgatgaagtagaattattgcttgtagatgatgaagtagcatatttacatcttaaattttagacctattaagttacaactatatagaaaatagaaagtatagatttgctcgtgcaaaagaaaaatctaggaatatatcacgcttagttatctggatgtatattattccaatttttaaatttatgctagtgtgcggatgacggttcacccatataggagtatattcttttcgaaacttttcctatatatattttttacaatgtactgtacacttgcataatacagctcgtattacaatatccgtatgtggcaacagttttgagttactgataaagaagcagacagaacaaggatatgcatatatataaacaaattacataacatttattgcaaaataaacggagaaaaacaaaactagtaacctcagctatgttcctctacaatttaacctcggaattatatatacatccttgctggtgccaattggcgccaacaagtctggtaaaatgtcctacgaactactcctttctgccggttcttatgtttcctccttcctaagaaattatttcagccctatcttcctcaagtccacgaactagcaagctgttcaatgatccaatggagagataactcatatatctatttatccagttttagattatcgcagagatggccaagttcaggcctggcctccatccatgatgcaaatgttggctcacgcaaagatgaacagtagaggtaggatcggaaggtgatcaggaagaagtaccgcctgcagttaaacagttgaaatcataatattaataatttggaaacatattgggaagagattgaccatctggaactggaaacatatactcctaggacacagcctataggatactgtaaacatgtaggaccgaccgtctaggatactgctacacccaaacacaatgctatacatatagcttgtatttattcagctcagaaaaacccaacatatttcttcaaagaaaatgtctcttagattttttgttacattccacaggacaagtgctttccccttaattttgtgcagtgtcattctttttgatcaagcaactgtttagcatttaactaaaccgagcaacctcctgaagtgactatatcttgggtgcccaaaaactaacactattttgatctaaatatgaatacttgtgcaatttgttttctagtttttaaattttagaaactatgctatatttgtagacatccactgcacgcatgcagagtgcttagtgttgaagaaatacacttaaagaaagtggtggtttttgatcagccaagtcgagattcctttttcaatccctgaatatgagttctctaatgcattcaaactgcatatgaataaagtatcgtgatcaattttttatgcgtgattgttcatataactgttatgctatctacatacgaactatgaaaattgcagtaaatacagtaagtactttgcatgatgcatagaagattctcatgaaatggagtgtgcactccgaataaattgccgaagcaggacaaactctatccattaacaaatttgcatagtcaattactcaatacaaatgtaaatgcaaggggcgtgcacatttaaactactgtggcttttctaagcatgaagagaaagcagtgtaatcgagaaaatcctatatgaaaattacctcaaagctttagtgcccatatccattagatatgaccatgtctcatcatcatcaagtgaacaatcttgcagtgcctttctgtaatgcataatatcctcccgcaaatgcccagcaccaacacaccttcatgagagattggttttcagaatatgcatagcaataatcacacgagtaacatctatgactaaactaatataagttccccgttagttcataactatgattcattgattaatttacataaatgcctgaatgaagtaaaaacctgcacaatacctgtcaataacagtgtcaacctcttctttgcattttgggccatgtaccagtacccttgtaaggtttaatatgtcacggtagtcaccttgcttgagagctatatcagctgatgttttgatagacacactttttgtaagagaagttgatatgaagtgtgtttctgctgtttgttccatgatgaacttttcatctgctcccagtcccaggcatgtaatggccattgcataagcaacaccaccatatcctgtgtgtgaaataaagaggtagtacctagcattcctgtagagaagcaaatcattcttatagcctgcaactgagtaacacaatttgtcaagctatatcaagttgtggattagggcacatactcatcaaccgacgattgtattgcatctacatcagaagctaatgcttctctttccctggtgagaggtattcttttgtagtcgatacagtacccctgatttctcagtacactatatacttcagccggtgtcatcacatcctccgtacctatatgttcccaaaaacctacaacactactttggcctgttgacgagttaaattcttcttggtgcagaagtagccgaccaccttgttgtttaacttcggagagtatatcctcctttagtcttgcctctatgttttcaacctgcatagaagatcatttaaggtttgccatgaaaataatatttacattattggaggaaactcaccattggcccacttatgccaacatgcttaagagtatcaacaggctgatctagttctctcaaaacaaaaggtgttcccttgatgtaaacaaccacttcctccctaagatccgtgacaaccaccttttgaggaatgcttctcccagtatctttagagcccaaatatgacagaacttcttttgctccatcaacagttggtgtcgccatgctatacacagggtatccatcaacctgaaaggaatattaaaaaatataataaggtacatgactaagtaatcctttattataaaatcagttttctaaaagtgaaacttccatttagtacatgcactacctctgttgccagaagaaatgcaactactaattttctttacaactagtataagtagcacacagaagtgagaaatagtataggttttcacacccactgcacgtaaatgaaatgaatgtttaatccagaatttcatgatgtggctctgacatcaaacatcttgaaatgcaaacattaccaatcttttggctaacatcatcgctctttattgagataatgtaatagccatctgttcacaagtatttctttgaaactggataataaaaacaaatctcagtgggattaggttggaattggtagcatttattttattagaagtgattttcttacttcatcacaagaaccattgaaatgagccatgacagttatagcagttcaactgtggtgttgcatgatgttaactaggatcagcctcacattctagtgggagcattgcataggcactagcttgatgcaagttcatttagcaaacagtagccaatagggatggacatagaagaatgcaagcaaatcgcatgatcctggcctgacccatgctgtggctttggaattggatggtgcaaaggcaaggtggtgcaggagggacaaattacgacgagcatgatgctgtaaaaaccaccagggcaaaattcatcccgttccttttcgcaaacaaaagtttgcactttggctctagactctagagtcatctagaaatggaattgtacaactcatacatcacccatgattgggatggtaagctgacctttacagctgggaggattcggtgaaaagtaatggaacaagaacgatattgtccataaattaacacttaaacactggaagcatgaagagcgaaaattcccagaatttggactttgaagtgcaggtgctaccaaactaatcttttgtctacatcactaagacatgaaagctctactaaagtcatgtgtcatataagatataacatgagtaaattacgctggcgatatctgaatttgtgaggtgggggtaagtacacaaacttataaagtgttcattttggtgtaagaagtgtagtgcatgcaaaccaactaaccaaggccaaaacggcataccgtagctaatcttgatgaaatgggtgatgattagggcgccatgtcatggcccacgtgcacatgtaaggaccgtgtgttacatgttatatcaaataactccttgtttttggcttttttgtccttcatctattcctatccatacattcttcaattatttctatacaatgtactattttattgtacaaccatcatgcattatcatacggttgattgaacatgtatgttcctatgactcttcctcatttatacatctgcatggcatcctaatcactgtccaactccacaaaattaaccatggtgtgcagcttggctttattcgcatggactacataagttcatgtactagaatgggcattttgcaagtctgtaaactaaattgcaaatcaaatggtcgaatgatagaagatcataaagaaggccaaacaaacaaataaactattgcaatagcatgcttccaccaaagctgatgctccatcaaaacatactaaaaatatctttgccactgttagtgttaagcaggaggcacaacatcaaagctccaaaatttggaaatcctgtttgttactgaggcagaaatattgatgactcaattatgtttttgcagaaataactgcaccatggagtgtagacagaaatatttgttcgctactaccaattacctatgatgggtcagaaagttcgaatggcagagtttaattggcagaattgatcaataacatgaataactagattaaaaaatgcatatgcattgaataggcaactattaaatgcaaatttttgttacaaataaaaataccttgaaaacttgtggtgcaccacagaagttaatagtgcttgaccttttctgtccaggaaagaagtacattttgagtattgatccctttcccaaaacagaaccattacgagctttgacaatggcttccatcattacgtcaccttgtgaaggctgaaaagatgctttggattcatcctacaaatagtaaattataactaatggtgccatttcctcaaaggtgcaaaaatgatatttttggttagaagagatgaggatatttacattaacagtgaaaaaacgcccaggtcgtaaccgtatgctccatttcatgctttggatctctggcctctggtgtatccatgctttaaatgacatctttgcctctccttgcccgcagaaaccatcaaatgcttcactccaaagatatgctgagaatgcaactaatttcaagtacctctccaaatattcagcaccacgatttaatgcaaccctcttaactctttgctccacatgctgttggttaattacttttgtgtactgcaaaacagcctggcgaatattctgtaaagccgagcatttgtcaataacattatccaaagtttgtctacactcgattccgttgtcaaataatcttgtaatcttccgcaaaacaagtatgtcatcaattccaaatctaggatgttgttctgtcacagtatgaggtcttggtgaacttgaattaaggtgaccattgtgatccgttgtttcttctccacttgagtaacccaattcatttggatcttcatggttatattcacaagctggcaatctaataggtctgccatgatcaattcgcaatctcagcagacaagcaatcacagtacctgtagttgttcttcccctgcccatctacaaaaatcagtaagttaaactcaacctttgtagcctttcatataattcaagagttgcctaacatagaattctggactaataaaacaaatgaagtgcagtacctggcaattaaaaacaaatgcagtatccttgtgagcagctgccacatttaaggttattgtgtcaaaatctgaacttttgggggctttgccatcagtgattggcactcgagcatacttgattggaagaccttcagactccagaagtttgtacacctccaatggagtcaggacagcttcattatttacattttcccatgcatcaaatatctcaccattgtcagtttcatgaataaccattatggccccactatagcgttccgcttcccgtaaaatatcctccttcaaacgagcttccattcgttccaccctatcacgatcaattccctggtgttggtgcattgtgtatcatttagaccaacagaacagttttgggaataagctcaacagagcacatgcttcaagtattagtttattaagcacaacgaaacacaatagtagacaagtatacaaattccaaaaactgaacaaagaactaaagttttcataaaaccagaattagaacaagtcctttggacagttacttcagattaaaagttaagtagttaaaagaaacaaatatagttagcttagctatggatattaatattcaaaataacttatgagagttttcccattggtgcactctgatacatcaggaaggaaaaaaattacaagtctatgttagatcaggtgcaaaattaacctagggttagagcaaataatcttgagcatccactatgttacaaatctgtcaaagcaaccagacatgatgcataccgtgtactccagcatattcttgtatggtctttccacttcacgtagtacaaatggcttcccatttatataaataactggttcttctctcatattatgccacagaattggtcgccctcccttgcttgtactaatacgctgaataacagctcgaatgccatcaacagtagggtttgcaacaccataaaccggaaattcaggaatttccctaaaattaggtgcaccctccactctttcgggtaaatgaaggttgtgacaacctgggcagtggtcactttttaacacagtttggcgtccaagaacttctccatttctcatggcagcaacaatatccatctcatgagggcgtccatcagcatattcaacaatttttgcaagagagggtttcgaacttgaataaccaagagcgcccattggatctctcctcaacagcctgaaattatcaaaatgtaaaaatatgagtttactggttatgccaaaagacaaaaagttactgatgctcttactaaaatggataattttatacggtgtccttgaatatgcatcatcatacacactttccagtgttttaaaagcatgcagagtgtatggtggaaatagagtaatataacctttctgctctttaccctttgacattgtatgattataacatgaaatttgcatcaggactccacatgcaatgcatggctcatatggaatcatgaaatgcctttgtactcatgtgctgctacacgctatagtggctaaagcaggtttccgtgaagcaacaaccatatgaaacaaagctatagaagccagtacatgtagccacaccaccttgtcctctatgaaaacaatgaccttttaaactttaagtaagatttcagtttacagttaaataggtgcatatgcactatgtgcataaaatccatttcccaatatttatatggtatattcatgcctagaagatccttgtgatgaatggtaaaatgcaaaatgcctaagttggagaagggatctgttttatccttcatttcctcccttatttttgaaggacagatatgggaacacatcaaagaacgaagatgagagcacttctctagtgtcatgtatacaaaaaaccgttttaatattagggttcgcacagtaaattgactgattacatttaattaaaacaaacgcggtaattcttcaaatacacacagtaaatacgctgtaatattgagctataaatccataccacttattgatctccaatataaatttcacaaattactcctggattttgttttcttttaatgtggtaatcctgtgcatgctatagactaactcctgaaccacaaacttcaccaatgttgtgatttctcatgtggtgcaaggaatgggttgtcaaattaaggttgaggccttgtgacagctcttgctgttatgaagagctcaataaatacaaagtgtgagaagcaaagataaacatggtctctggttactgtagtgattttcatatatcaatcatatcatatcatataacttggatgagatacggcagaagttatgatgatgactcagaaagagagcatagtacactcatcaagacaactgttaaaatcgaaagtgtgcaaagtatgacctttttatccatgcttaaattatctcttcataaagttgaatttgtaatgaattaaccaattttcaaaaagttagtcatgtcaatattcatattttcaatgccatatagactcgataataaaactaccattgttgtttaagtaaaattgtttgttccaacttgcatgttgatcaagagctaaaagattagctcatcttttactatttacttccagttctccaagccataaagaggtgagttcaaattaatttggataaaaccatgatggtaatgcttatcgaagattacaaaaacacacacaatactttgagaaagatattagagaagggaaaaggaataggcaatgagcctagctccatgaaatagccaacgactactttttcaatccatggttttgacaccaggatgacctgattcaagaaatgtcagtgactaatatttcttggacacaaaggctgcctagtattaatgcctgtgtaccctagtaattagtccaaacaaaatattgaagaagcattgagatcttatctaaaacaagatctaaaatgaaagtccagaatgtgttacaaggaaagtaagtacatattggtacactgaatataagaattccaccttacttgtgaatagtatagtgatataaaacaaaatggacatgttaatttttaagagctcatctcatgtataaaaaacagaaccatgtttagcctgcatacactcttacaagctgtacatggtactatttttatagtaaggtgccacggctcacgttcgaagaatgctgtacagttcaggccttgctctcatccaatcagaaaaaactaacttcttctgaaaagtttgattgttgagcagagcacactgaatgaacatagacagcaaagcatatgaggaagtaataacgttccaagtactcaacaaagaaggaaagtgatgcctcccgtttcatctcatcaggttgtcgaagaatactattgcggtatgtagcaatagcctctcttaagttctgccatagtcacaacaagtcataacaacaaatatattaatatagctgtattaagttagtatcatgaagagcataaaatggtatacctgcatcgtgtcacatttatcaataactttgtcaacttgcctttttccttcaacaccaccctgaacaaatgaaatcaaaaaatgaccacactaagtgtctaatgtaaaagggatatgaattaacagatccaggatattacctccagaactcgtaccaagctcctaatgacagaatattctcctctgaggatagcttcttctgagctaggcatatagtcatctacatcatttccagaatggaagactttcccgattgaacttgtcctagggatacctgcagccaatagcacccggcacaactcaatataagaaaattcaaacacgaacctacaggcacaaaatgtaagaatataatgcaaaagatatctatgatgtgcatttagtagatttgtactcagtaaatacaaaatcaccacatgatggttcaaaataggcaacagtctgtatggagaattctgtttatcaatcaattgtacatataggtagaagaagcaacaatatcaccaatcaaattacagtctgtacttacctgatgatcctatccggttcagataaatcaatgttgctataaccataccagtggttgtccttcccctccccatttgacaattaaatatgatttcagtttctatatcaacttgggagattcggcgtacctgttagaaacagtggagttcaatgttatgcaactatcatatgaaccaaatttcagtataccatattaatcacaaggagtctatagatgattgaaccctggtaaatgtggatcctatcaactgtgcaaattagtttaaaccttttccaactaaacataaaagctcgcacatagggaaacaacagtaacatgcagaactaacagttcaaaaaaagcatacagaactaaccagattgtcaaaatctccttcttttggggccttttcatcagtaataggaacacgctcataatctacaaggtatccttgatgctgcaactcctcatatacctatacaaaggaaacaaattctcaaagggactaaaaataataaaacaatataaccaaaccttgaatctattcttacctcaagaggggtcttgactgtatcagttaccactgactcccactggtccaccatctgaccatttggcagctcatcagtgacgaggatcttattaccatatctgctccatcaaatattcaggtaaaacaaacaaacaaacctcttaagagtaaatacgggtagaaaacaatattggcagccgacgtaccgtgaagcttcctgaagaatatcttctttcaggcgaaactccatctgttccactctttcccggttaattccctacagtagtagtacatataccaaaaaaaaaagttaaaatggaaaaataaaatgataatagaacaatagtaacttcatgtggaatcaaagttgttttgaagggataggccttctcaatatggttcatgtttctatagccttgaaaacatatctagaattacccaaatcaaaatgagatttaacaggaaaagcattccaagtctgcaatagcactaatgcatcatcattcctttaagaaacagagctatatattttcctgggtctcaggacatctgtatcataacttctgctgtggatgtttagcaagaaaaaatatttttggtttaacaccttcatggacttctcatacaaaaacaagaaacatagagacatactgcatacacactctaggcatgactagaaaaattcaagacaaacatcaaagaataccgtatattcaaggtttgagaagggcctttcaacatctcgcagaacaaaagggcgaccattgatgtagataacctgtacaacattggtggaaattacaacttactaagttccttttttgtcaaacataaaataaaaaagatataaggtactactctatcctattatagggagaagtagtatttgttgtaacaaggaaagggtgtaacctgttcaaaggacacttactgcaagctaagcaaactggtccagaactcacttgaaatttgaaatttacatactgttaaggcatgcatgtcaagttatgtaatttccataagtacatattacttagaaaccttttcatatatttttttaagaaaaatacacaccctcttctctatgtttttttatttatttatgcctacctactgagaattggaaacggatgttctagacagttcaaaatccattgttcattccaagtttccaaccttttgtagttttgaagtggtgagcataatttaatgttcttatgctagagatgcttaattttctatcagtgaccagtgttcttaccggctcctcgcgaagactatgccatagaacctgggtttgttttcctttcttttgtgctccaatgtgatttaacacatttacaattcccttcattgtcggcattgcaacaccatgaactcgtaaagaacccgcctgaaaaacagttggcaacagtgagtaaatgacagaaaattatagatgattgagaacccaggctgttgctgaatctttactggataaaaaggacacaagaaaattacaaattggagaacacattttgtaggactattcattcaagagtttataataaacacgtcagatggattgtttagttcatacaaagttccatgcggccttcacattgtttttctttaaatgttatatcttctatcatcgaagactatgatgccttagcagaaacagcccagatagatatgcattggaagtgttaatgctcatgttcatcagtgtgatcaacaaaaatcatcaagaaatccaaatgcaatttgcatagcattaagtgttaacattcttgtactaatttattttgagatttacatttactattctgaaaacaagtaaaggcacttccggaaagaacaccaaaattatcataggatgcgcacataagaatcggtcatgctgcacaaggttaccgataaagcagacaatcagcgcacaaaacatgtaagagacataaacaggcaaggcaggtttcttccgtggtcgtgaagattggagccaaaaattgctgcagattcccgtcgcgaacgcatggaatgggggggccagggaaaccaaggaattcgcggcgcgcggcggactgatccggaaaccatccagattattactagattaggaacgaggagcaacgcacctggcgataattgggcgcgccgtcgatttgcggcgagaggcgcttgttctggcagccggggaagtggtcgctcttgaggatggtcttcttcccgagcaccgagcctcccctcgtgctgatgacctgctccggcgccacctgctcctccaccgcctccatccgccactcctctcaattccacgcgcacccctctccgtcagcccctgcgccgcggcgcatgcaaccagcacaacaagataagcgtaggcggcggcggcggcggcgagaagcgtaggcggcggcggaggaggaggcggaaggcgataacgcggcgagatgggaggatgcggggagcgggcggccaataggcgaggcgagacgaggcgaggagatgaaacgcggaggcgaaaggggacggttggggtagcgaggccttgccttataggagtactacgagttggccgcaggccgcagctgcaggagaggcatgtggcgatggggatggatagataggctaggcagcagtgcagtgcagtacaggctctctctgtccctatctctatcttcttcttctctctccctggctgcttgccatgtgttgcagtacaagtttagtactgctactgctgatgctgctactccagtttccggatttgcgatt

SEQ ID NO: 14784 - DNA, 525 bp, Oryza sativa
  unsure (1)..(525): unsure at all n locations
attganacctgtacatcngtgctcggtaccctattattgattttgttgagattggcaggagttgatacatgaaaagctcatgcatgtttcttaatttaccggacactgattcaaagaaatttgtattttacttcaccattgctaatgcccacttatgtttttcttctctagtttggaacacacgatgtggttgctctgaagccaaataaggcagatgctggatctgctgctcttgggcaaggtgtagtttatcgcttgaaggtacctaactatcatctaagggctgttgactatttaaagtctttgcttctgaattaggagaaatgactgtaatttgaacaaacaggattcttccattactgttgcctttgatgacattcctgaagatggattaaatagccctctccgccttgaaaagcttgcaaatgaggtatattttccatgctgttttcattactatttgcaaatgacattccattactgttttcttctctactatattttccatgctctctcttacaactt

SEQ ID NO: 14785 - DNA, 612 bp, Oryza sativa
  unsure (1)..(612): unsure at all n locations
tgtgtggntcantatacgagctcggtaccccggggcccggcatcttcatctggaggtaggcgtagtggaccgccgccatgaacttcaccaacgcgggcctccccaggaccgcgttgtagggcagactgaggtccgccacatcgaagttcacccgctctgtgcggaaattggcgggtccaccgaaggtgaccgggaggtcgatatgacctagcggccaagtgtgccccggcgtcacgccgatgattggctgggacggccggagcatcatccccggggccttgatggcatcaaaggctgcgggggaaaggatgttgagggctgctcctccatcaatgaggacacgccccaacttcacgttgcaaacggtgggagaaaccaccatcgcaatctgccctcccctggcaacgcacggcgggtggtcggtctggtcaaaagtgagggcaacttccgaccaccgcgcccggcgcgtcgcctcatgagtaggggccgcggccagaagctctcgcttcatagccttgaggctccggcgagaaacgtgagcacacgctcctccatcgacggtggcaatggtggccccaggctcttgggaaacccagtcatcatcgccatcac

SEQ ID NO: 14786 - DNA, 1416 bp, Oryza sativa
  unsure (1)..(1416): unsure at all n locations
tctagcgccantatncgagctcggtaccctgatgtttatcacagctgcaccaagtttgggtagtgtacggcgtacctatatcgatattaatcaacagtggtgtggttctataaaagcttgaataattatgttcggctatttgaacttttcacgtccctttctcgctttagattaatcatgcttcttaagtactctttacaatgtgaaataatgaatccccttttcatccaatacaggggaattgcaaggcactgcaattatcttggggatatactgctagctctttcatttagcttaccctgtggaaccaggtgatgatgatcgttcgacacaactctcttattcaatttgattctcataaaccctaaatcataaacccttttggtgcagttcggtgatcccatacttctacccaacatacctgttcattttgctgatatggagggaacgaagggacgaagcaaggtgctcagagaagtacaaggagatctgggtagaatattgcaagcttgtgccttggaggatctttccttacgtgtattaaatccaaatattttgcctagcagttgcatcgttgtagaaccaagagcgttgttgtgctatttgaacatgtaaaattcaccaagattcctgttgtttatttgtagctgacatccgtgttgaatatcaattaacatagattttgttgaaaaagaaaggaactatgtcttgctagctagtttgatctttctttttccctaccagtctagctggtgaatactgaccgcattgagggcggtgagtgaacctgcaaagagctgaggcaatggcggcgactgtaatattcacgttggtttggaaaaaagtgcttgttttttacatctccgcacccgtacgacggattcagaaatctccggttgatcattctgttattcaaaatatacttatatagttattattaattttactgagatttaatttatcattaaagttttatttaaatatattttttatatttatatatttttttaataaaataaatgatcaaacgtttatgaaaagttaatagcatcatagaattcagagcttttgtgttcttagagagtttttttattgctgggaaaagacagaggcagcagctctgccgtttgttttatcctctcttcacttatatttagagacgaagggagtactgcgtatcatatataagaacccttaattgactatagctctagtccaactttggtccgttgattatgaaaccatttattttttccccaactcttaaagtcgttaattttgatccttgatgtcaaactaagatgttttctgagatgatgtggtgccatgtagcatcttagttagcaatttaaaatgatcaatttctaggattaagcagaggcagaggaaaaaaattagtttcatgtaggttgtagg

SEQ ID NO: 14787 - DNA, 665 bp, Oryza sativa
cgagctcggtacccattgtcaccacccgtcacctaaaatctactcagcgtcggcaaaggagccatgggttctagcaactaacttacctgttgaaattcgaacacccaaacaacttgttaatatctattcgaagcgaatgcagattgaagaaaccttccgagacttgaaaagtcctgcctacggactaggcctacgccatagccgaacgagcagctcagagcgttttgatatcatgctgctaatcgccctgatgcttcaactaacatgttggcttgcgggcgttcatgctcagaaacaaggttgggacaagcacttccaggctaacacagtcagaaatcgaaacgtactctcaacagttcgcttaggcatggaagttttgcggcattctggctacacaataacaagggaagacttactcgtggctgcaaccctactagctcaaaatttattcacacatggttacgctttggggaaattatgaggggatctctcagcacaaagtacgtacgcgagcgacgtgtacgcgcctggacagtgcacggctgtcaccctcgtgtgccatatttaatttcgcttttctttcgatttttgatcttatcgacgttgattggtacggaatacctcccaaaaccgaaaattatacagggagatttttttttttcttg

SEQ ID NO: 14788 - DNA, 537 bp, Oryza sativa
cgttgcaaagagctcttccgcttctgctatcatgccagataatttgcagtcgacctatccagtgattgttccagcttatttctcgccctttttgcaattctcggttcctttctggcaaaatcagaaagatgaagatggtcctgtgcaagaaacacatgagattgtcaagcctgttccagttcattcaaagagcccaatcaacgttgatgagcttgttggcatgtcgaagctcagcataggagagtccaatcaagagacagtgtctacttctctttcattaaatctggtaggaggtcaaaatagacaatcagctttccatgcaaatccaccaacaagggcacaggcatgatctccttctgcacacaactgcatttagatgaatcccaggcaaaataagctttgcctccttgtttttttgtttttattttaagattaaccgttctccgtagtctgtatcatgtgctgtaagttatgctatgtatgaatgtatctgttgtttgtctggcacacatgataaatcactctatgttaacaaaa

SEQ ID NO: 14789 - DNA, 671 bp, Oryza sativa
cttcccttgttattgtgtagccagaatgccgcaaaacttccatgcctaagcgaactgttgagagtacgtttcgatttctgactgtgttagcctggaagtgcttgtcccaaccttgtttctgagcatgaacgcccgcaagccaacatgttagttgaagcatcagggcgattagcagcatgatatcaaaacgctctgagctgctcgttcggctatggcgtaggcctagtccgtaggcaggacttttcaagtctcggaaggtttcttcaatctgcattcgcttcgaatagatattaacaagttgtttgggtgttcgaatttcaacaggtaagttagttgctagaatccatggctcctttgccgacgctgagtagattttaggtgacgggtggtgacaatgagtccgtgtcgagcgctgattttttcggcctttagagcgagatttatacaatagaatttggcatgagattggattgcttttagtcagcctcttatagcctaaagtctttgagtgactagatgacatatcatgtaagttgctgataggtttccagttttccgctcctaggtctgcatattgtacttttcctcttactcgacttaaccagtaccaacccagcttctcaacggatttataccatggcactttaaagccagcatcactgacaatgagc

SEQ ID NO: 14790 - DNA, 3624 bp, Oryza sativa
  unsure (1)..(3624): unsure at all n locations
gtgggaattccgtaagaacagnaccttccnnccngcntgaggtcgactctagaggatccccggtataaacaaccaagactaaaaatagatctttagtcctggttgtttataccaaccgggaccaaaataaactgccgagcgcgcgctgaatttatctcctcggtatcccctccccttttttctctccttcattaaaaaacgccgagactaagcctcggtatccaccagtccgcctcctccccttcctccctgtcggtgacatgggaccgggagtatcatgactagaggcttgggcagctgcggtcacccacgtggcctgaccccctcggggggtcgggcccgagggagacgtgcccaccccctcctctgtctccccgaggggtcgggccgctcctgtttcggccccgagggctggggcgccccgaccccctgtggtattggcgccacgtgtgtgggttaggtgggcacagcggcgctcaccaaaccacatttattgcggaatggacaagcgcgccacgccgcatttaatgcagcacggcgcacgcatatccggtccgtgaccggtcgcagtgtgtgaccggtcacagaccggtcagatcgcgggttaggtggcagcaggcggcctgtcacacgcctcgccccgtcccgtcgaaatgatgagagcctcttggcactcgtccctagctggagccggcgtggtaactcctggagttagcacgtcagtcccggctcgattcatgccaggcttcatcgcaaccattgcaaggaagtcactgtatgaagaagggcagatgtgcggcatgctaaactgacgcgtggtggagaagaatgaccggtctgtgactggactgacgccggtcacgtcatcggcagacaaccgtgctcccacgttgcatctgcttccggcggagtggaggtaggtatgacccatcccatcggagggtcattcagacagcggccattgcagatctcctcccattaatgaagaaatgacagggtgatcccctgtgtccgacgagtgacggcgctgggcatcactcaaggacaagcggtgatttagcttccaggcggaggcgcgagtcaagatttggtcaagatagggtgggtccccacccaaaagaagagtatgtagaagaagtgcatgtggtatccccttgagatataaaaggaggaccttgcccacttaaaagagagggggagattgagagagaaaaggaacgagaagagaaggaaaaagaggggttatagagcttgaactctcttgctctccatttgctctgtaactccttcacacacagatccaccagaacacaggagtatggtattacgcttctcagcggcccgaacctgtatacatcgcctgtgtcttgtgcatttgctctctcgtgaacattccacagatcgagggtgaagaacctcactcagcgcccccggccgaaccggcaaaggggggcctgccctgtctcccggtgaggagccccacgctccgtcactcccccttcccctttttttcgatcccccatccatgcctcctccttctccttcccctctttgctgcggttgcgcggcggcgacggaacgagccggccgcgcggcaggcggtcgtacggtggaggatggcggtgaccatgcggcaaccggtccggcggcggtggaactaggcggccggtggggccacgccccgtggccggtggggccactggtggtggccggcgacagcggcaacccgtgtttttttatctgtgattcacttagatgtattttgtatggataattttgtgattcattgcacatttgtatggatctgtgatatatttgatatgtttataatttttataggatttgggatgttactttgatttggggatttggggtttgatttgggatatatattccactcgattcgggagaaaaaaaagaaaaaaaaagaaaaggggaccatctcgctgccgctaccgtctttttagtcaccaaccgggactaaagatctcctctctttaccggttggtaacaccaaccgggactaaagatagcgatctttagtcccggtcagcggggttacgaaccgggactaaaaagcacttctccacaagtgtaggtggagtacgtattggcggatgtacagtactactaggaactgctataaaaaatgatatggacgatgtacttgccaacatgctctcctcattccaaaataaaccgacctaatactacgaattcatacatatagatgtttggctgtactacgaattcggacagagatttgtttgtccttattgagtacgactacgagtgtcaccaataacatatggttaggaaaataaataaataaataataataataataataataataataataataatagaagaagaagaagaagaagaagaagaagaagaagaagaagaagaagaagaagaagaagaagaagaagaagaagaagaagaagaagaagttgttgggcgagtgatcgcgaagacaaaagtcatgcaaaacgcccatggatggatgtaccgtccggacggcgtttgagttcccgcgcccacacacgcgttcgtcgccacgatctttttactttgtacgtagtacacgcatatatatgcatcgtcagttcgtcacccgttacatcactcgcgtgtgctcaggactactacgtactccctccattaaaaaaaaaacaaaccctgatttccgtgtctaacgtttgaccgtccatcttatttaaaaaaattatgaaaaaaattaaaaagataagccacgcataaagtattaatcatgttttatcatctaacaacaatggaaatactaattataaaaaaatttcatataagatgaacagttaaacgttggcatggcaacctatagtttgccttttgtttttgaaacagagggagtacttactaagcatcatgtgcactcatgcgaaatttccctattgacctaattagagaaatcacctaaatatgtactccttccatttcaaaatataaacattcatataaaaagtttgaactattaaatcgttgcacgctctcatcgcctagtttagaacccaccgtttcagtttcttttctccgccattcatctcctccctccccctgtttttattcatcttcgagtgtgagcatgcatgtgctgtagctcctacctttgctcatcatcaccatccgttatttttttaaaaaaaaaaattaaagatgccacatctgtttgaaacaatttagggcccccccaacaatttaaccaagtgaaaattaatgcttttttcgtcctgtgatccctagtgaaacaatttacccaagtgaaaaaaaatgcgcaacactttcctctatcataacacctgacgttttacaccgaatcgaaggcgtgatacgtcaattaagagatgtgcccatgatgcatggataaaaatcctagctagcttcgtactataagaggacgccacgtcatctgttaaaccagcgtgtttatatatatatatatatatatatatatatatatatatatatatatatatatatgaaagtcgaatttcttccaacataattaactgcattgatctcggtagctacggggtaccgagctcgaattcgccgtatagtcaatcgtatctccaccccacg

SEQ ID NO: 14791 - DNA, 10770 bp, Oryza sativa
  unsure (1)..(10770): unsure at all n locations
caaccccgttaattagctggagcccggcagccggttcaaggtctggactctgcataagatgcccggattaagaaatttgcctcagctttcgtgaggttgaagattcccagcttcccaggcttcgctctcgggatgcactactctgctaccttgtttgcagcgagcactagtcgcattcgctggctccagaacccttaaagatgcttattgactaatccagcttaccgtccctaggtttcttctggtacatgtcaacagtagaggtgaacagggcagtatgtatcacatgcatttctccttgacccttagagattcccttcctggccttaatttttctctgagaagtaaatactatgtatgggattgtttggttcattgccaatcctaaccataccaattgttttagcaatggcaagaattggttgtgaccatttgtttgttttggtaaagattggcatttggcaaccgtttttgtttcgtatgctaccacaaaggtgtattttggcttaggctcaattcaaccaaaccaaataaaccgtcatccttttttcatttttttttgctataaaccaaatagaatgacaaatattttggcatctccaaattttcggcttggtcgagattggatatgcgaaccaaacaagccctatattcccttcgctctaaaataagttaatttatggtcataaatctagacacataagtaaatttttggctataaacctggacagtggtgtctaggtttatcgacttattttggtacagggtgagtagtcgtattatcttcattcataaatatattattattgagtaagagtaccgctgctcttgtatcatggagtgtctttatttttatacgagccacgtacaaaacaaaaagaatctcaaggcagtgatcaagtacaactcacaaggtacttctagtgaagtagagaaggaaaacactactaaattactaaagtgctactagctaagctccagtaaattaatttgctaaaatctttactgaaatcaactactaatgtatagtagaatcatggatgcaatcattgacaagatcaggagggcaaaagaaaagaatgaatgtgcatatatgctctggctggatgtgctcatatactacgatctctctctctttaaatctgtttgtttctttgatggatgttctaattaattaactatagcacttgggcatcatgctcctagctagttaattggtcctccggcagttagccctgatctcgccggcggcgccggtcttgacgtcgacggcggcgagcttgttgagggcgtaggggaacatggaggagaagaagtcggtggtgccgaggaagttgaccatccaggcggtggcggcgtggtcgccgagcttctggtcgacggcgaggacgccgcggcggtggaggatctgggagtagtagctcttgtcgacggtgaggatgctggaggggtcgtccaggtagacgatgttgtcgaaggcctggctctttgggcacgcgaacgtcgtcaggatccacacgtatatcgggtccatcgacgggtccgcctcgccggtgccgttgaagttgtacagccggtcctttatcaccgagcagtgtgtcacccccaccgtgtgagcccctgcacatataatatcatgatgcaattttattttagaacagacgcatggttgtttgagccatgttacaatgcctgataataagccgtgaagaaatgaaccaagtaaccggaataagttatgggtaaaacgttattaccggtttaaaaagtaatgatgcaaaatggactatattaaatttaaaatctaaatttggttgtcactgatgaccaagaagctaatagcttgtctttgcagacacactataaacagagtatggtcatatcagatggggaattgacggccaagattttgtaaaggttgtaaccctaaacacagtggccactgtatcatcatttttatatataggtgtgtgtgtgtgtgtgataacggctgtggatctcactcttcccaattaccaatgtgtgccagctgatcaataaagcatagcttcagatctcgatcaacagaattctttaagtaattaaacaaattaacatgatcgatgaggaaactgagtatagtagtgctaattgagattgacggtagtaagtactcccacagataccatgaacccctttttaatgcgtagcaccggtatacgtgacattccatgtgtttagcccctcgattatatattctgatgcgctctgcccccggtcaaattacgccaaagtacttaaagtataaacacatgcacatggcctagttatctactagcttctttgattttgaaaaaaaaagaacagttaatcgatcacagttaagttcaatttgtactctgtttttctttttgtgaagaagtttaattagtactctgaagttgaattagtagtgagttagttacccatgaggatggccatgtcgaagctgttgaggcccttcttggcgaacatgtcgatggcggtggggatgtcgacgtcggggcccggcaggtccgccgccatccacgcctgcgacaccgtcccgtccagcctccccagctgcacctcgtaccgaggccctccacactgtttcgtcatcgcaaatttgcagaatgccaaaattttaatttggattttcgattcagaaatgacaaatatgaattggagtattggtttgagaaatgtgtgtgtaccatgccgacggcgtccctggtcgcggcgacgatgatgtcggcgcaggagacgacgccggggcaggccttctcgagcgtgtccttgatgtcgtcgatgaggtcgtagccgaagatgccgttgttctgcggcgccgtcttctccgtgtttggcccatccagcagtatcgacgcgtcacacccctgcaccacacacacatgtccagattgtagccaatttgttaaaatatagtacattactaattttgacaatttaataatattgttaagttttgacgaaatttcctgtgtatttatcagagtttagtaaaaaaactaaatggatgcacatatttaataactttaagaaaaataatatggtttgaaatgatatcaatccgaacaacccctatatacattcatcagttaatcataataagatcgaacacaaatttatccatcgattaattcagcgatgattcagatacagtattgattaattagctgatcgaactgatcttgattaagagagcagtgtgtatatggattgtacgtacggcgacgaagcagtcgtggaagatgaggtggaggaggccggcgaccatccgcttgtcccaggcgaggcgtgcctggacggcgtcgtggatgatgctctccacgtccaccgccacgctcgagttgccgccgccgccgttcacgcacttgccggcgtagtagccgctcgccagctgcgctcggcatcgccccgccgacgacgcggcgagcacgagcaccgccaccgccatggccagccgcggcacgccgccgccgccccgccgctgctgcattctcttgtgtaatccgctgtacgctatcgatttgtagctagctaccaacccttgattgatagatacacgcgcaagcaagcaagctcagctagctttctcttccggttaatatgatcttgtcgccggcgagcttgcgttgccgcactagcaatggctgtgctagtggctactactctactctaccttcctgcagctgactaagctaagctatacgcgcagcagctgcagctgcaggaggagctagctgctagctaggcagatggtgactttgctgcagcagaagcgaatataaatgtacaggctagctagcttccctgctgcttgatgtctcgaatcgaagcagcacacaggatggaagatatggaggttgggatcgaccggccagctatatatgtaggtaggggaggagaggagaggatcgggaacatgcatgattagaagaagaagaactgaagaagaagatgcagtggcagtgagattgcgtggggagtcgtgggggcgcgttcggatcctgtgctactgtcactggcactctgctctgcgctgccacacgtgcctgctttctttgctggagtacttagctcgccgacgccggccggacggtgcaaaacctcatagtaattcagtatacagtgtagctgtttgttactgttcgttacgagatgtacaagttgaatttgaacttacatgtttgtagagtattatatcacatgttaatacaccttctcaatttttttcataaccatttaagtgacatgcaaagaacgaggggttattctctcgagggattaaaatagtttcccttgttactataaacaaaattcagtatacaatactcatcctgtgtcatcccttaaaaaaaaagagaagagatcttatggagcacagaaatttgactgcattgtctgcaaaactcactctccatgtatgtaagccaagcgagctagcttaggtctctgtaatcgtgtgtcagcattgttcagttgatctgctcatcagcaactgctgggattccaggattctagtaaatttacgtcgttcctgaaattatgctaatagcgtgtataaacatacatcacatgaatccatatattcaccaccgactctcatctgtcttccatgtactatatgccatttttgaacagatagttatatagtagttccagctggatcaactcgtacggttttcaggaataatcaccttttacctgtactactagctaatgtacttactgaacaaaagcagaggcagtgaatctgtcttgatcgatggtagtaacatttctatccaactcctgttgcctctgctttagttttctgtggattgcggcaggcattgacccggccggtttcaatcctccaaatccattttactgacgcactacacaatcttcaattccctgatgcagtttttttttcaactgaacatgtacaccagctcaatacaatacaattcaatccaattatcatatgctttcctgctttacatatataaacctgattgatcacctcctaattatcacttgaccaatgtactcataagatccgcaaatgaaggaacaacgcggtcgatgataattctgcatgtgtgtgctctacctgcataattcaggccagctaggcaggcagatgagcaaattaaatcgtcatatcgatttcctaatatgttctgaacctagaatcatcatatcggtttcaagaacaatataaattgaagcacttctcaatattaacaatgtaattagctgctgcgcatgcatgcattccaggtgattttaaaaatgatgggagtcaacaatgaaatggttgcaccgaggagagggtagtaccgaagtaagcaaaacaagaagcttgagatgagcgtgcatgtgatcaactggtggctcagttggctggggcatgtgctctgattcgtaaacacaaacctcattactagtagtacattatgcctcccaaagagaagaggtcgccacctagctagtagcttaattatctgtaattaacttatgatgatatactaattgtatttctactactgcccagtttacagttgcagttagttgtccgaggtagatcaagctgcttgttattgcattcctagcattcattcattaatgcaccaagtagcttacttggtctgacagggagatggaaacaccggccttgcatttcttctttcaagtttcagctgacttctcacattttcagaaagcttagaccttccggccaatataatttcagctcgaacattaagggcttttgctgctttgttcaaggtcctgatctgatttcttttctgcaaccaactttcttatatagtgaagtatgtatataacttgtatacttcactcctattcacaagtcttctgtcatagactttgctagagatccacgcaaaaaacacttctctgatgatctattgtcgtagtaggcagtagccattagtatagtgttgtgagtcgaagctaccttaattattctcttcttctgttcatgcatgtgcattgcgcttagctagctagcaagatagttatagagtgatttggctagcgatataagctagggatatatctatattgtctctnnnntgatcagttaaaantgaancaaccaaacattcattcattcagtcgttggctcgcatatatacaacacaaacaggccgggcagatcagatcgatctgccacctaactatgaagaacatatgtactccggatcctacctgtatagatgctcatgcagtgatcctaccatgtgctcataactatatatatcctgaattaccgatgatgcatcatgcatatgcttggtgaataatcttgagcttttttgagcattacaccttcccctgtgatgttgatatcgacggatcgatgtagtgtagcaggatggccgatgctgttgaaacaaaagcccaacgactagattaaactactccctcctccattttaggttataaaacgtttttgactttagttaaagccaaactattttaaatttgatcaagtttatagaaaaaaatagtaacattttcaactcaagacaaatttattatgaaaatatattcaattattgatttgatgaaactaatttagtattataaatactactatatttgtctataaacttagtcaaacttaaaacagtttgactttgatcaaaatcaaaacgtcttataacctgaaacggaggaagtagctctctaggagtagctcacatgcaattccaatgaattcgccggcgacggcgaagagaagacgatgacgggaatggaatggagaggttccctcggtcgtttagcatctggcttggttctccttgcaggccaagcgggttcggagtttagttctccgaacaccccgttttctcaatttcttcattttttttcaagtcaataaggacagaaccataatgagaaattgcaaatggcttcaaattcaaagtttctacataaaatttctctctatctctctctctcttaccgtcatgctgtctcaacagtatattcaaataattacaaaccatctctgcgtcgaagcatctgaaatgaaatctgcaaagtcacctggtatacgctgaaaaccagactgaaattttttcctcacgcacctactccctccatctcaaaaaaaaaagtgaatttagtactggatgcgacatattttagtacaataaatctggacaactagaatatatcacatctagtggttggttttttatgggatggaaggagtatttgtttgggcttgaacaagatagtgacgtacgtgcggcccataccccaattctccctactactttgggctgaaacgggacaacaactatggagcccatatttatttcgctcatttctacgtacgtgcggcccataatagttcgggccggaaagggcttgcgagggaataaggcccattaatgcgtgggttgattctaatacccgccgccgccgccgtcttctccggcgagcaggagacccctcccgccgttcggagctcggacgctttctcgccgctgctcaccttccgttccctccccttccacgcgccgccgccgccgattctttgctccgtttggcggccgctgggccgtacgggagggggtgggactggatggagtcgtcggtgcggagggtgcagcagcgggtgaggaaggcgcgggaggagatggatcggtgggacgacctcaactcccgcctcctctctcagttcgcaaacgctgccgccatcgttgctcgtctcccggtatcctcttcctctcttctctgcaaaaaaagatatatccccttttggtggtttggagtacagttttactgtggttgtagagaaacaacactactcggtgtggcagcaattcttttctttttctttattttgacacggcagcaattcttttgttgacaaagaaatttaatggacatgtaacaagcatttagttttgtggtagcatcatgcattggggggcagatttcactaatgtaatgaaattacagattcagttagttttccccctcggataactgcagcaagttcagggctttcagctagtgctgacaggaccacttctagtattttccacctgcaagttttttcaagctagatggtcggttgctcatgaaaaacatatcaattgataatttggtagacacactgtaattctagtgagcagtaaatgcattgtgatattagctgcgtgacaaatcatatgttaaaaggtgctggaagaggttaagaactatggtgtcctacgatgtgtccctaacatcagagagaatcttttgggtaagcaaatggagagtttggagatcatcttcgtctctatgagggagacagtgtaagtggctttgctgctgttgcaatcccttttagtttcggtgtgacactagaagcagacggagaaaaaaaaattgatctgacgttgctgctgttgctattgttcagggaggaattcaatagcattgccagatctttacataaggctttgcgggatactaatcaaatggtgagaggtgggtctgcactcagtgcaaaacagatgcagttacaagtgggaattttgccaactatagcagactgcttggatgggctacggactttatgtgaaatgcaccaggccgagtaatgacctaaagaagacccccccccccccccctttttttttgctgttgtgaagctcattgtactgaacctcatccattatagttgaatcaaaattaaaccaaccttatggccgtcttacatatatgcaacaccccaagcactgttttccatttcaccaatactgacttcagttgcagcacttagtttgctatcatcatatattaagatgctctttattctgacgctgcacatattactttttttttctgtactgaagccactccgtgttgcggtcctctgaattgcctaaattccatttgacaggtatgcactaaaatcatcagtcatctcttcgctgacatggacgagcaggtaaaagttcaactatttgtttcaccaaacatctatattcctatctgtgtgctctgtatggagttctgtatctgcttttagtttatccctgaattatcaattcagacatgtttgtcagtcttcactaacttgaatgcccatggtgctctttctttgcagttccagtgacattgccgcgatgcgtcaactcttagtagaccagccaaacataccaaaagatgaaggtaaggaatgaaagaagagagaactaaagttgtcaattaaggtttctagctatccaatttatgaggctgacagttacattccaatcttgttttgcagtgcaagctatttttgacattatattcgcagatgaaatctgttgatgtacttgcacgattgctattggaagcactatgccctggagtcctggacatgttgacatcattatgttttgatgtacttgcatgcccagatggccagatgaaccaaagatgctgatgcactgtaacaaagctggaattgctgtgtctggctgccagcaagagagtaggatgtaggagtagctttctaacatacactaaaatatcttccctttttttatccccaaattttcctagttctatgttaacagtcatgtcctggagactaaaatttatctttgactgaatgcacattttcatgtcctggagactataatttatctttgactgggtgtgtttagttcatgctaaaattgaaagtttgattgaaattggaacgatgtgacagaaaagttgaaagtttatgtgtgtagaaaagttttgatgtgatggaaaagttggaagtttgaagaaaaaagttgggaactaaaccaggcctgaatgcacattttatgtcatgaatctgtttcttgtgtgaaagacaaatcagacacatatgagcttctacgtctgtctcaaaatatagcaactagtatcggatagaaacttaggtaaatttcatttctgtgcatggtggttgcatatgaaatgatcctatgcttcaggttctcatgatcttggttgacctgcagagtccattagagccgttcatttttattttgtttttgaattggacggcccacgttgactggcggcgaccacatgcaagagtattttgtctgagtccgccgcctccgcccacagattacttcccttccccgcccgatgtccctccccgtcggctcgccgccgccgccgccgacatcgccgccgtacaccggcatcctcgccgccctccaccgcagcatcgcaggaggccacgcggccgccgcggtggccctcctcccggagctctcccgcgccggcctgcgcccgcccttcccgctcctctcctcgctcgcccgcctcctcctgctccgccgcgccacggcgccgtgcttcccctccctcgccggccgcctcctcctctacgtccgcctcgccggcctcaagaggctcgtgccttgctccacccagctcgccaaccacctcctgtcgctcaacttcctcctccgccgcccgcgcgatgcgcgccgcctgttcgccagaatgcccctccccgacgtctgctcctacaacgccatgctcgcggggtacgcccgcctcgcgctcgcggcccccgcggccgaggtgttcgccgccatgccacaccgcgacctcctctcctataatgctactctgctcgcgctcgccggcggtggtgagatgcagaaagccgtggcgctctactccgagctccgcggcacgtcgacttcacttgggtacagtgatcaaaccttcttggcactccttgtaggctgtgag

SEQ ID NO: 14792 - DNA, 696 bp, Oryza sativa
  unsure (1)..(696): unsure at all n locations
agtgcatgagatgcaatcgacngccnnnngnnnatntagaggatcccctggcnnnnnnnnnnnnnnnnnnnnnnnnnnnnnnnnnnnnnnnnnnnnnnnnnnnnnnnnnnnnnnnnncttgctgccgactgatggtgacgccgaaaactttatgaaatcgcatgttgagccgacgattcgcgatattccgtcacttctggcgctggccccctggtatggaaaaaagcaccgggacaatacgctcagtatgaaacgcttctccaacggtcgcgggttctggtgtctgggtggtaaagcggcgaaaaactatcgtgagaaatcggtcgatgtccccggttacgatgaactggcggcattcgatgaagatattgagaaagagggatccccgacgttcctgggtgataaacgtattgaggggtctgtctggcccaaatctattccggctcaacgccaaaaacaaaggggaccctgcagattgagcgtgcttccagcgagttcgggcatttcatgcgttttcatgttgcctgtccccactgtggtgaagagcagtaccttaaattccgcgacaaagagaccccgttcgggctgaaatggacaccgggcgaacccttcagcgtcttttacctgtgtgaacataatgcctgcgtcattaagcagcaggaagctgatttcacttgagctcgttacattctgcga

SEQ ID NO: 14793 - DNA, 5043 bp, Oryza sativa
  unsure (1)..(5043): unsure at all n locations
cctggagagagcaaggacggatggcctcttcctgttgaggaccgcgattttgtatgccccagcagtctcgttaccatcagcaggacgaagcatcagaatgttgggcatcgcacggaagctcaccaagtgctcaatgggctgatgggttggaccatcttctccaagaccaatagagtcatgggtcataacatagataactccggcttcacacaaggctgagatcctcatggcagctctcatgtaatcagtgaaaacaaagaaagtagcacagtatggaatgagtcctgggctgtgcagagcaatgccgttgcaaatggcgcccattccatgctccctgactccaaatcggacattgcgctcctcaggcgtatccttctggaagtcaccgaacatcttaagcaatgtcatgttggaggatgcaagatcagcacttcctccaagaagaccaggaacaactttagcaagtgcgtttaagcactgctgtgacagattcctggtggcatctgcagggctctctggagtgtatttctgtacaaatcaagtaatctaccattagaatgtcatcattcacataccagctcaaatgttatgagtagaaatggtaaaagacttacaggaagagcgtcagcccagccagcaggcaactcccctgagacaatgctcttcaaggtcgctgcatcttctgggtacttcttctcatactcggcgaacttagcattccagtcagcctcaaaagcagcaccttgaggcacatggcggctccagtggctgtaacagcccatgcaaataaaccataaggtgagtgctatgaaatttcaacatctcattcagataaccaaaacaacaatagacaaacctcttcacatcctcaggcacaaagaatggctcatagggccatccaaggttctctctggttgcttcaacctctttggtacccaaagcacttccgtggacgctgtatgagttggccttgttgggtgatccaaaaccgattgtggtggtcacctaaaaagagtacattttggctaaatatgataagctctataacaaaacacagcataacagaatgtacaggaatctaaccttgattagtgttggcttgtcagttaccgcctttgcttccttaatggcggcacgaatctcatcatagccatcgtttccattcttaacccagattgtatgccacccaagagcctcaaagcgagcactcacatcctcagtgaatgcaatcnnnnnnnnnnnnnnnnnnnnnnnnnnnnnnnnnnnnnnnnnnnnnnnnnnnnnnnnnnnnnnnnnnnnnnnnnnnnnnnnnnnnnnnnnnnnnnnnnnnnnnnnnnnnnnnnnnnnnnnnnnnnaaatacagtagctgcacaaaatccatgaatcatgttaccaaggttgcaccaccataactaaagtgaaaactaaaggtattcatgataaaaaaaaaattacgtgtagtgatcaacaatctcgctgtcgggcttgttgaaacgagcagccaggtgcttctcagcaagggccagcccaactgcatttgcaataccctgaccaagaggtcctacagaacgaaaccaaacaagaaaccgaaacattcagttctgtatgtattcaagcatagaaacttaaaggtgctatgagcttcagttgagatgacagaccagtggtaacttcaactccgggcgtctcgaagttctcgggatggcctggagtcttgcttccccattgcctgaattgcttcaagtcctcctcctgcagcaatatgcggccatagttacagcaagctcgatgaacaaatcagttgaaactgaagtcaaccatattaaacacttcaccgatcactccagaatttacagtgaacaattgctcgacttaatagcatcttccaactaatcttcctaggaagtattacataagattaaattccactaaacagatctctgacgactggaaaaggtgcacacttttactaggaaaaaaacgaagccgccacacaaaaatagcagtcaagatccacactttccactgcttcacctaacaagatccgaaacttgcacgaacctactcccgatttatccgccccaaaccaaccaactcgagaagcgaaagagagatgcaaggagcaaagggatatgggaagcgcttaccaagacggcgtcgtagccggcgaggtggagcagggcgtactggagcatgcagccgtggccggcggagaggatgaagcggtcgcggttgaaccagtaggggttcttggggttgtaccgcatgacctcgtcgtagaggatgtgccccatgggcgcgcaccccatgggcaggccggggtgccccgagttggccttctcgacggcgtcgatggcgaggaaccggatcgtgttcaccgacttctcgagcagcgcccccgtcgccgcctgcccctcgagcgtctcgaccgccgccgcgcgcacgcggttgttgtggcggcggcgcgacgcggacgccgatggcgcgccgcggcgaggcgggagcggggagcggaggccgcggccggcgagcgcgctgaggcggaacccgaggcgctccggcggcgcgggcgctggcgcggcggcacccgcgcgcgcggcgatggtggcgtgcgcggcggcgacggagtgcgcggccatggcgagaggagtggtgtggtggcgaggagaggcggagatggcgaggttgtggggtgggagatgggatgggttatgtatagacttgggggtgcgttttggggggactcgtagccaataaaaaggagggggctatggtgtggacgtggacatggtgcatggaccagcatcctaagccgccatggctggtgagattaggagcactttcttcgccgcaattattgaacctataatctttataaagtagttattgtacttatttgatctttaaattagtttttatattgtagttaacaaatgttactccctccttttatattataaatcctttaaaaaaattttatcaaactttttttaagtttaactaaatatgtagaaaaatatattagtattttcaacacaacaatcatattatcaaaatatatacaacttagatttaataaaactaatttaatatcttagatgttgttaattttttctataaattttgtcgaaattaacaatatttgattaggaaaaaaataaacgacttataatatgaagcagagggggtaacttggatgtttttagataatagataaaacctgacatttgttttaacagaagctatagctacttacttacatagtctatactgaaaagaaagtatagcattatcaacaaatgatgaaaatatgacacaataaaaaaaacttaacaaatgttaacctaggtaagtactccctccgtttcacaatgtaagtcattctagcatttcccacattcatattgatgttaatgaagctagacacgaatctagactgtctagattcgttaacatcaatataaatgtggaaaatgctagagtgacttacattgtgaaacggaggaagtatatgcaacatcttggataaaaaatttatgcatatttggcaaaggtgtgaaaatattcacatagaggagtgatcttactaatttctttatatattttgcttatgtttatagcacactaatctgatgagaattagttcgttttacatgaacattgacctgactgattttgtagctttcacaaaattctacagttaggtttaaaaaagatgctggaaatggtatcaattcttggaataataaagtgcaagtttgtagtatgtatatatgatagaattgttatatatattctgcagctatacatgtggttttgattagatttgcgtgtatggactgggtttatgtggggatgggtgtggtgaggtgggttggtggatgaggatatcagccatgaccgttgatatggcaaacaagatgatcctggccgttggaagagggtaggaaacgattggatattattaaagatattttcgcctatttgttagtggtctggtgagccttttgaaaaaaaaattgttatgggacatatttttttctaagagataaaaataatgtaaagattgtcctggctccttgtgtatgttggggtcgtcgccgtcacagttgttttctggcgtcattccatggttgattgtgatgtttatgttgaaaatttggggtcaaaaaaatcaactttttagatgcagaggtatatgatcctggcatgtaaaattgccattcttttcaaccaaatataaattgcaaaccgctcttttctgtgattcgccaagatggatgatgaaaccgagccacacgagaataaataacaagatagacccagatgggcatagaatctattcagcaggaatctacctttgtggaatattcttatttatatggtttgcttgtttttgtaacagttttgatgttgtttttgcttctgatttatataccttactacattagaagatgctcaagcttagttagttagtttaacctcgtcttttttttttaaaaaaaaaaaaaggagagcttaaattgtacgtacagatgtagattctgacatgggaaattaaaacagtttgaagagatcagtagtcatgtgaccatccctggggttaattgtgtttaattagtcattcactaagccaacatagatatattaggatgcattgatcctggctgctgccacattcaaaagaccaagagcagcacgccatcttgaatttgactctttggttcatgctgggtagcctttcaaagccccaaaagattgggtcgggtctctctttcggctctcgtcggtggctgcttcccacaaagaccgccatcagacgtgaatgaactgcaagtctgcaactacgactccagttgctatccccttaaattactttactactacctttattctaagggccggttcggataattgccaaaatcaatcgtaccaaattttaataatattaggatgaaataaatatgttgcgccaaaattttctactgttactgaaatttggtaacaaactaaacacaaccgtatatttatccattttaccaa

SEQ ID NO: 14794 - DNA, 509 bp, Oryza sativa
attcctgcaccccaaattcgggagtgatcggtgaagtgtttaatatggttgacttcagtttcaactgatttgttcatcgagcttgctgtaactatggccgcatattgctgcaggaggaggacttgaagcaattcaggcaatggggaagcaagactccaggccatcccgagaacttcgagacgcccggagttgaagttaccactggtctgtcatctcaactgaagctcatagcacctttaagttctatgcttgaatacatacagaactgaatgtttcggtttcttgtttggtttcgttctgtaggacctcttggtcagggtattgcaaatgcagttgggctggcccttgctgagaagcacctggctgctcgtttcaacaagcccgacagcgagattgttgatcactacacgtaattttttttttatcatgaatacctttagttttcactttagttatggtggtgcaaccttggtaacatgattcatggattttgtgcagctactgtattt

SEQ ID NO: 14795 - DNA, 602 bp, Oryza sativa
agcctgtcggtattgtactatgttgcagaagttgactttcacctgtatagcagaagtaaaactataagaatgacggaaatacgatattgttgtagaaaggtaggactacgagaacactgaaaataaggcaataaagaaacgtgaaataccttgttgccttcaatgtctgggtcctcagcaggatcactaccaatatcatgagaacactggggtgaaacactggctgaatcatcccgagggatgtcacagcggacacgctcagaactacattgagaggcggtattgattgaatcatctagaggggttcctgagctaaaatgctcagaactacactgataaacttgaatgttatttgatggcaagctagtatcttcaattaaatcaggggtaccagagtcttcaattgtgggactgggcaaagacccattaagtacttgttgcttaggtgtaaccttaggtgctctgaacttccgttttgcctcaagcgatgctaagccttctaaaagtcaaggattcatccaatggacagttgaagtattgtttacaaaacaagcaaaataccatgctaagaatcgcacatcaccttagacttcgtaaataag

SEQ ID NO: 14796 - DNA, 15317 bp, Oryza sativa
atatattttcgatggatagccttaatgtctgactactctcttcatcgcaacaaatctaatataatacaaatctgaataggagcttatataaatatatagtagtagaatatgtcataatattacagtggtattccatattggatttgttgattatagaacgacgaaagtatgcgttaacttacaaggttgtttacattatgacgaaatgaagagaaggaacgcacctactgcgaagagctcaacaactacttcctccaaatttccactcaccaactgatcaccaccaattcacttgtgcagtgccacctacccaatttcattccagtggcgtggtacgtaggttccgcatgtcagtgtgacaatcgtacggactgccatgtgtattgtgttcaggtaggtgcactggtcgtggtctcaccatctctcctccagtcgtacggcgccacgtaggcagtacacgtagacggccttcttcctcctccctcgagttgagttggttggtgagagtgagacaccgacggaacggaaggagaaccacgccgcttggatttttcttttttaccttttcaaattttaatttaaaaaataaaaccattttaaaaacttatcttcaaatacaaatcttttaaaaacactaacacgtgacacacagcgggcacgtcacccaaacgggcgtgacaatattgttttgccacaccaatccagctggtgtggacaaaatgttcatatattgaaaataaaatttaaaacaatttatattttttatctatatcattataaaaattgaagatgtttttaccggtattttgttactcatttgtgcatgagtcggtttttaagtttgttcgcttttggaaatacatatccgtatttgagtatgtttttaagttcgttcgttttttgaaatacaaaaggaatcgtaaaataaatctattttaaaaaactcgcatgctaacttgagacgatcgaactgctaattgcagctcataattttccaaaaaaaaatatatccaaacgagttcttatagtagatttcaccttaattaaaacatataaatgttcacccggtacaacgcacgagtatttttataagtaaaattaaaagtttaaaataaataaaaatcccgccaccacggcgcgatggtaaaagggggacgcttctaaacgggccgggcacgggacgatcggccccgaacccggcccatctaaccgctgtaggcccaccgcccaccaatccaactccgtactacgtgaagcgctggatccgcaacccgttaagcagtccacacgactcgactcgactcgcgcactcgccgtggtaggtggcaacccttcttcctcctctatttcttcttcttcctcccttctccgcctcaccacaccaaccgcaccaaccccaaccccgcgcgcgctctcccctctcccctcccaccaaccccaccccatcctcccgacctccacgccgccggcaatggcggcgaccatggcgtccaacgccgcggctgcggcggcggtgtccctggaccaggccgtggcggcgtcggcggcgttctcgtcgcggaagcagctgcggctgcccgccgcggcgcgcggggggatgcgggtgcgggtgcgggcgcgggggcggcgggaggcggtggtggtggcgtccgcgtcgtcgtcgtcggtggcagcgccggcggcgaaggcggaggagatcgtgctccagcccatcagggagatctccggggcggttcagctgccagggtccaagtcgctctccaacaggatcctcctcctctccgccctctccgaggtgagacgcggatcccttcctcttgcgtgaattccatttctggagatgagattttagggggtttattaggtgaggtggctgtgtttgtgaaatcctaggaattatctctcaagtcaatctaacgatgagatataactgaggttctggttttaatcacacactcatataaccaatttattgaaacattttggtttggcataagaaactgcttacgaaggtatgatatcctcctacatgtcaggctactaaattttcacgacggtatgatccactcaaaacaagtttcttaacgagtctggtgaggtctgttatgaaatttgtgtaaactaaggcaactttggaggtttcgcactgtaccaatgttatgtttgaacattttgcaagcagtgctttctcccaaaattatgcaattttgaggctcctctacatcattataattccccaatacattgctctttattcttaatagctttgatcgcgaaatttaacattttaattcttgagctgttattttgtagcatcagtttatcatgagccatgtttggtactaaatatacaatcccttgggtttatttgtttccaagcatgtcattaacttatcttaatgtggacaagaaactgatgcctgcttacattgctattatttcaagcgggtattgatcctttgacatgtgattgatcatttttttttctctggttattagggcacaacagtggtggacaacttgctgaacagtgaggatgttcactacatgcttgaggccctgaaagccctcgggctctctgtggaagcagataaagttgcaaaaagagctgtagtcgttggctgtggtggcaagtttcctgttgagaaggatgcgaaagaggaagtgcaactcttcttggggaacgctggaactgcaatgcgaccattgacagcagccgtgactgctgctggtggaaatgcaacgtatgtttttttttttaatgtttatgaaaatatgtatggaattcatggggtatgttttatgacctttttctttaccatcagttatgtgcttgatggagtgccacgaatgagggagagaccgattggtgacttggttgtcgggttgaaacaacttggtgcggatgtcgactgtttccttggcactgaatgcccacctgttcgtgtcaagggaattggaggacttcctggtggcaaggttagttactcctaaactgcatcctttgtacttctgtatgcacctcaattctttgtcaaccttctgcatttataaggaacattctatgatgcaattcgaccttacactgcacagtaacttgaaatgtttcatgcttaatcaatatgccatattcctgccaagctcaagcgagcaatatttgtttgaatttggtaccatatttttgtatatttgggcattcctttttggtcttgatgtcttcttttgaattagcatttaactgaattacactcaacaggttaagctctctggttccatcagcagtcagtacttgagtgccttgctgatggctgctcctttggcccttggggatgtggagatcgaaatcattgacaaactaatctccattccttacgttgaaatgacattgagattgatggagcgttttggtgtgaaggcagagcattctgatagttgggacagattctatattaagggagggcagaagtacaagtaagcttctacctgccttactgagctgaattattcgggtgtttatgattaactccctaaactaaccctttttcttttctttggcattgacagatctcctggaaatgcctatgttgaaggtgatgcctcaagcgcgagctatttcttggctggtgctgcaatcactggaggcactgtgacagttcaaggttgtggtacgaccagtttgcaggtataactgtagtgcctgttttgacattctaccgtttagtcaagtttagtcagtagtcacatattcagaatatagcacaatctgtattatgccactgttaatcaaatacgcttgacctagagagtgctatataccctagcttaatcttcaaactaaacagttctcttgtggcttgctgtgctgttatgttccctgacctacatgttaatattacagggtgatgtcaaatttgctgaggtacttgagatgatgggagcaaaggttacatggactgacaccagtgtaaccgtaactggtccaccacgtgagccttatgggaagaaacacctgaaagctgttgatgtcaacatgaacaaaatgcctgatgttgccatgacccttgccgttgttgcactcttcgctgatggtccaactgctatcagagatggtaaacattaaggcctattatacctgttctatcatactagcaattactgcttagcattgtgacaaaacaaataaccaaactttcttcaaaataacttagaaatataagaaaggttcgttttgtgtggtaaacagtactactgtagtttcagctatgaagtttgctgctggcaattttctgaacggtttcagctaaattgcatgtttgttcatcatacttatccattgtcttccacagtggcttcctggagagtaaaggaaaccgaaaggatggttgcaattcggaccgagctaacaaaggtaaattcattaggtcccgtgtcctttcattcttcaagtagtttgttcataagttgaattctccttcaatgatgtttaaattcatcatcttcttttttggtgttgtgccagctgggagcatcggttgaagaaggtcctgactactgcatcatcaccccaccggagaagctgaacatcacggcaatcgacacctacgatgatcacaggatggccatggccttctccctcgctgcctgcgccgacgtgcccgtgacgatcagggaccctggttgcacccgcaagaccttccccaactacttcgacgttctaagcactttcgtcaggaactgaactgagcttttaaaagagtgaggtctaggttctgttgtctgtctgtccatcatccatgtgttgactgttgagggaactcgtttcttcttttcttcacgagatgagtttttgtgtgcctgtaatactagtttgtagcaaaggctgcgttacataaggtgatgagaattgaggtaaaatgagatctgtacactaaattcattcagactgttttggcataaagaataatttggccttctgcgatttcagaagctataaattgccatctcactaaattctccttggtcctcatggcaatgcaacgacagtgtgaagcactgaagcccgtaatgctctatcaccaccatgtacaacagaaccatatatgtccatatgtacaactcgagtgttgtttgagtggccagcaaactggctgaccaagccacacgagagagaatactataaactcaatcatacataacaagcccaagcaacagaagacagaacacaacaacactcgagtctgggaacagcaacgccgatacactacagcatactgcaacgacacaaaggaattggtaaggaaatggcaccaaaatcttgtagatctttagcgagtcattcatttatagcatatgttggaacagacatgagtcacaagatttatgatagcttagataacagatggtcggaattaaccgccgagagcctatagatgaacaaaaactctgttccaccagtgttctcatgctaaaaactttctgaaataccctaccctgttcaccgaatttctccacctgttggatagcagcattttactggtcgctgatggtcacttcaacctccacacctggctcaatggtgattgaggtgatctgcttgacaacatctgcagagctgacaagatcaatcacccttttgtgcacccgcatctcaaaccgatcccaggtgttggtacctgaaacaatgtttacatcattaacatttccaaccgcccatgggagatgcagaacaaagagggcaactaaaaatattgcattgatgtttctatacaactagagtggaaacaaatacagtttcaacaggtaaataagagcaccacaacttgcaaaagagaaatgctccaactatagtgataaaataattgcaaacaaggggttcacattattacttcaaggctgagcatcagttttaaaaagctcgatttttagacatcaaataaatcagtacaaacataatatatcatcatctgctcaacatgtccagaaatatacaatcattaaaacattcaggtgcaggtttgccatgcaatgtggaaaaaaatagtagtgcatggtacaaagaagtactaagaagcaactaagtcattaacccaaaaaggtcagtatttggacaaataattaccaagcattggataggccaaccatcagttttaaaaagctcgattttgttagtcttcaaagaaagactcagcaaaaacatattttagcatcatttggccagcccatcatagaacaataaccacattaaaaacaatattaattcagacagaacaagcataaggtcctaaaagaagatttcatatcagcaattccataccaagtacaaaatcgtagcaatatactcaaacttatcagcatcgccagtaagtttagcagaaaccatgcaataaccataaaaccatccacactacacttgctattacaaggccaagcatcagttttaaaaagctcggttttagagacttcaacgatataacatctcagtagcatctccttgtaacatcacatgctcggcctacaactaacaactcagctctcatctaaaatgctttaatcaaggcaatgctaactcctaacaaacaacacaattgaagatgatgatgatatgctaagcatcagttttaaaaagctcgatttttttagacatcaaagatcaagatctcagtgatcaactagtatttaacatcatctgctcagcagatcatcatcaacatgacaaatcatagacaactgttctacacaacctaacaaaaccatcaacagacaagccagatcatctcgagaagaaatgtcaccttctccacaaggagacttcctggtggtgatgtggagcaccttggtgggcatccgcacggggcccttcaccttcaagctcttgtccttggctcccttcaccagatcaccgcagactgcccccacgcaacacacatccaatccaacaccaatcatcagatcaaatgtcgcacataaaccccatcaccacaaaacgagaaatcacaaagagggtttacctttctcgaggttcttgacgctcttggaggagagggtgatgcggatcctgtgctgcacctcctgcgagctctcgaagccgatcttgccggacttcatcggcggcgcgtacgccacgtcggcggccgccatggctggcgcggaaggggaggaggtcctcggctagggtttcgcctcgcggatggaggagggggagaggtggcggcgcgagatggggatctaggttttcgcggcgtcgacggaggcggagggtttatgtagaggcgggaggtaggaggtggggttcgagtggccgttggatcgaatggtcggagtgttttctggccgttggatgtgactcgttctgggagaggggaagcattggtgggtcgtgtctatgacagtgggcccagtttgtcttgcaagggatgacagtaggcccagttggaacccctcctcctagcacacacaacgaagcatgtaagtatattgcacgattaattaagcagtattaactatttttttaaaaaagattactataattttttaaaacaactttcgtatagatattttttttaaaaaaaaacacactgtttagcgatttaagaaacgtgcgcgtgaaaaacgaaatatgtggaaagataggataagaactcaagcctgtgtctgctgtttctctgactctctcctatggccgcgtttggatatcctagttgggaacttgacacatgattaattaaatactaatttaaaaaatatttgagaaattgattaatatgatttttaaaagcaactttagtttaaaaatgttttaaaaaaatacatcacttagtaatttgagaagcatatgtggagaaaacgagtattagaagtcgggaaagtaaagtatagaaagcagcctatgtttgcctccttacttgcgaatatggaattatgaacttgcacagcttgttattttacgccaataaaccagtctgaatgcaaattgcatctgaactattgaaatctgaatctgatggaccatacaacaacataaatcgtcagtcgtagccaattgtgtattgcaatatactcagttacaagattagtagtaactgcaaagatggaattggataaactggaggagccattgacccaatcaacattaagaacagcttactgaagcttcacaacaatgtctacctctccatttctcaaacgagcataacctaaacttgtttgcaaaattacatttctttcggcctttcagggcacaattcccatgaactgaagaagtagatcgctatacgcatgagcaaaattacaacagtgttctctatttttcaaatggtatcggtgctctccctggccatgtttcaattttctcgaagtacttcacaggaacaacgccatcgaaaccctctgtcagaatcaccttgttgtctgaaatgtacagcttcattccatctgagaaacagattcagctatcagaaaccagcccctagcaagttgataagagaataaatagattgcttgtggctataaacaaacagcatcataccttgcagtgccatactgacatccaaatatatcaagatgttaacactctgccgcatacctgaagaagatgagacgttagttcatgattgcagtagtggaagaaccaaaagactacatacaggaaagcaccattatcaataatagcttgtcatccacctaagcgggaataacagaaacacactagatttataacagaaactaagcaaacggccatagccttccagagaaaacaagctcaacaatggtgcattttgtacttgcgtaagggtaaagcattaccgctaataactcccccatctgtcggtaagccacttgagaaatgtacatgtaaccttgccattcgttttagcccctgatgcaagattgaatcgaggttcttcctgtatgttccatgcacacaaactgtggataaaagaatcagtacaaaccaaactattattctgtagagagtgcaaaggggaactcaaaaatcacataccagagacttcatctgctgatagaatgggtttcaacaagctctctgaagtaacagtctgcaagaggttttgcagggttgttataaagcagacaagatcaacaagttagatgcaattgagacatctatctaaccagtatatagagtctaacatcacaatttgtggacaatgggaagtctatggcacaaacttggggcgtttgccattgggccctaatgcaaaacaactcactttcaaatattgtttggtcatctttgattacaatggttagttgtaaacactaaaacaattcactcgataggaaaattaacctagccctctagtaaactagatgccttatgcataggagcagttgtgcattatgtaaatttcagctaagacctaaaagagaggcaaaacgtggtgacctcaaataccatgcataccataccattgcaatacacataactgaacatttaggttttttgacctttaaactatgccaaaaaatggcagagctatcagtaaaatcctgtaaaggtgtatgtggtatgctgatgaaacttgtcacttagcaaagctatgcaagcctctaaaccaaaaaaaagaagtgctacagaagagtatatgattacagaatacaagacgctcgatcagagtactagtgttaggcattataaacacacatgaattgtgactcccttttattttgtcctagttcgggtcaataagcaattgagcgacattgttctcgggtagcttgttagcaggggcgaagctatgttgtccgaagggggttcctaggaacccgggtaggaaagtgaaattagttattaataccccctaatgaccatgtgggcacccccctgggctcacgtatgtgtacccctagatcgataattaagctacggagacgtaaagcccactttttttcttaattaatttgatcttgcaaacaaaaaaagttatgttttgaatataggatttgattaatacgaatacaaagttattttctcatgatagatcgttggtgtttgaagtaaagttgtatacatattgttatccaataatgtcagtgctgtataggcgattttttttgggattttttttatatataacaagtggccaatagtagagtgcaaggaatatactaatatccaggctttgccttactgtttaacaaacattagaaaattagatgtagagtcataaatagtactagaaggtaatgtatctagtatttgacatgaatagttcataagtttttttacttcagagctaacatgaaggttggggcaatgtatttcggttttgctggtacaatgcattcacgcatattggttagtacttttaatcgttgtactcctcttttgatacgattaacatcacttattgaattttcttttttaataattgatgggaggcataattatttagtacaatatcacttaaaaattctatatggctttatggtatggacgcatgactaagtggggcacccccctccaattctccctagctccgccactgcttgttagcaacataaaaaatcaacagtaagttatgctacagtgggaaaagaaaaaaaaaactatcttgagcaaaacacaaaatatgtgttttccaacagctaaaacagtgccccatagaatgaaattgcacaaccacacatgcctgtattacttctcttttcgtaagtctgagcttgctggcgataacagaagcgatgcttagtcatcacaaacaatcataaacaagtgatagtgtattttataccagtataattgcatcagtgcagggggttttggtagagaacataccgttactgtgtggccctggttagctcgaatcagcagctcaccatcttcctccaacagaccaaacctctgcttgttatcccgtctaaccgcctaacacgccataattaaagcaacattcacttatattcacatactaataatcatcagttcatcactcacagcacactggtgaatccaaacacaagctggcaagctgaaacaaacacgaaccctaaaccgaagcatacggttgatataactgggtagattgagctagtattacctccttgatttcgtcgacggtgtgggacttgagagggatcttggcgaaggtctgcaggttgagcttgagcaggtcgcggacccgcacgtagccgtcggtcctcatctccaggttcagctccgacgccatgtgccgcaagatccgcgtcctggggagggaggaaggaatccaacaatcagcaagcaagcaaagcaactgcggaaaaggagaatcgcgggagcatgggcgcgttggccttgtatcttacaggaggcggccgagggcgtcgatgcggtcgctcccatcgccgccgcggcctcttccgccgccgcgtcgcccccctcggccgccgccgccgccgcgaggctgcggggaggcgaaggcggcggccttggagtggtaggaggcggcgccgcgggaggaggaggaggaggaggggttcatggggagcgcgagacgcggggacggcgaggaggagaggaagaggaggagggcggcgcggagcggggaggcggcggccttcatagccgtcggtcggaggtggacgacgatgacgacgacccacgcgtgcgggggacgagaccgtgcgcgttgggtgggccggttgggccggaattggcccacctcgaaggtccgtggacgtaccgcatggggaggtgggctgggcacgctggcccatggtgagttgatacatgtgaaagttcctattggctccctcaactaaaaccggatcaattctccgttttgagaatggttttcgctggcatgtcacgttgacgttgtccaccatgctaatgtggcaattacgtggcattctattaagaaaattttagaaagcgttggggcccccatctattttgctgacggccaatctatggagccttggtggactaatgagtgatgttggattaacatctagcgccctagccatcgtcttccatattttgatgatgacgactcaccacgatgacaacttccttagctaaccttagtgccaccaacacttaaattctagtaggctttgtcggattaaagtttcaagggtgagagcaatgaagacgactatagaaggatgggcggggtggtggaaaactggtggagattagcatgcgaggcgccatagacgcgaggatgcttggaggagggtggtaggtgggttaatgatagggagtggcgggtcttgtggttaggaggtggggttgaaggtagtggatccgatgactctctaatagcgtgatccgccaaggacgagggaggagatcacgacgctaggggaaagacgttgagcttgatgatggtgaaaataacaaacggtggatctatggtaggagcgaggtggtagagagggtggttgaccaggattgggcgagagcaaggtggagcaccgtggcggcggcgacaacgacaatttactcggacataggaggaaagataggggttaggattataaagggtacgaatctttaaagcaatcttgaccactaaagtgaatactattaatgggaagatcaatagatcgatgattgccacacacccaaaaatggatgcttatcatgccgttgatggcccgaattggaaagcataacaagaagtgatgcatgacctaggtgtgttaacttccctccgtttatgaatgtaagatggtttggttttgtccgaactcaaatttctctaagtttgacaatatttatagaaaaatcatactagtacaactaaaacatcaaattaattttattaaatccactcaaatatatttttataatatatttgtttagtattaaaaatgtgtttttacatttttaataaacttggttaaagcagcttgacttaggcttagttcaaattggctagtttggtcgagcttttccttggcatgcaaaatgacaaaagctattagcgcatgattaattgagtattagctattagaaacttgataaatggatttatttaatttttaaagaaacttttatataaaaagttttttttaaaaaaagacaccatttagctcatccggaaagcacttagaactcagccttgaagacaaaccaaaacatatcatattttgaaactgagaaagtgaggagcatacatgttgaagttactccaacctccaaattaagatagcaccttggtctattgtcactttatgagatgcaaattggggagattaattgtctacagcaagcagcccgcagcacatcaactcagtagcaactagagtatatatatagcagtagagtagccataatgatgtaatccaggtctgatccaaagttcagaaggcacctagctatcaggacacacaaccatgaatcatacaatatttcgatcaccatcaaaggacgttcaaggttgccatcctcagcacgtccttaagatagacacggccaaagccctcctctccaaactctatgccagcactattctgatacaccaggtactcttgcccctctcgtcgcccaaatccgaccaccaggacacaatgggaacgtgtgactccatcctcgtttttctccctcttgttaggctcgtaggagtaaatctcgcctggcttggtggtcctgaagttgctagatatcttgaatcctgcagccatgaccctagcttttatcccgatctcttcggcaatttccttgaatttaacatcctccttgttaatcatcttccagttatagattttatagcgcatgccctcaaggccaggatcttctgcagcaataccaatttcttgtagcactcttagtgccacatgcattcggctttgacctctacctccacctggttctgttccgagctctcctgcattaagcaatcaagacaagaagtatcttaatgctgcatgcatgcatttgctatttgtaacacagaaatttttgtatacccctaaacttttacctaatcccttctatgtcgctaaattttgctaatcctttttatgcccctgattttttatattatcctctatacttctattccgttaattagttggctgttaagtggccattatattgtttttctaaaataaccatattacctctagtgcactctctccatccaaaaataaaccaatctaggattggattggatatcacatagtacaataaatctggacatgtgttatgtccaaattcgttatactatgtgatgttccatctaattctaaattggtttattttaggatggaagtagtacatcataaagtggtaagcgtcctcactaaataaaatgtttgagtggctgatacatactaaaaataataattgcactgaattcgaaaaggaaactttagatattaaacatttttttgcatggactgacaatagtgaccaaaggtaagtattactactgcctcaaagaaaatgcattcctagcaaattttagacagattagcattcaacacaaattattgccaatctaatgttgtttctaatgattgaaacttactccttattcctaatccaccgtgcatgtacatattttatatatatatacatatatatatatatatatatatatatatatatatatatatatatatatatatatatatatatatatatatatatatatatatggtggtccaatttttcattatttcactaaacgagcatgtacatatcctatctcactataaagttgatgcatatatagtaacttgtaaagcttaacatgctagtatgtcacaccatcacctaatagcaattattatccacaatattttaaacaacatgcaaatgtgccactagcaattattatctagagtattttaaatatcatgcaaacatgatatatcaattacaattttgttgtatttttagaactcaatatgcaaccaatgtcaaatcattatctccacttcattttcacactatttaaacacatacatatatcatttttataatatatttatgcattcattcatatattccgcaacaaaatgcaggggaatcaactagttaaaaggggaaattcagccaatcagtcaatctctcaaattacatgcattaacaggatggcgagatgagggatggaaagatataggagggccggaggtaggatatattcatcaactaattagttagtagggtctcaccttgctagaaacacaacttatttaacaaatttgaaatggtagaaatacattctttttggaggaggtagtacatggttatggcaaaatccatacttttaaaaccgtatatttattcaagaattacttttcaaatttgatgtaaagttttacaattttttgaatttcaatgattttgctaatgtatc

SEQ ID NO: 14797 - DNA, 3454 bp, Oryza sativa
atgcattatttatcccaaaaaaatatttttagataatgaaataaaaaaaatacgtatttattttttaaaaaaaaggtcataaaaatgaggagcattcatataaagataggtataccaatgttcacaacatttttttttatgaatgctcctgataaaaaaatccattgtcctattaaaatttcaaataaaaattttaattttttacatttattttattttcaaaatttatgtcaaaattttctgcactaattatttagtctcattagttttataaaatgcacacgatgtgcactcaaacaaaattttcaattatttttgaagcttatatttaaacctaaagcatcaagggcaaaaaagacatttgcaaccaaacgtaacagtaaaatgatggaaaatgtaacggtaggggcatggaagggatcaaattgaaatttcaggggtacagaagggatcgggtaaattttaggggtatgaaagggattgagtgagttttcaggggtacacagggaatttactctactttgtttccttcgaattgtaaggattccagtaatacttgtctatcagagttacagttcatatccaaactaaatcagtcgttcaaaaaataatgccatatgccagtaacttagtaaagatgtagatcaaattgtgtttacactgcaacaaattctgttgcagataagtacctagcataatggatatccaagagctgatacaaaacatgactgccatcagtaaactagaacggtaaacgacaccaatggagtagcattgttcaaatggcatattgtattcgactctattaaaacatttacagttgtgttcctctaaaccgaggaagatcatgcaccttgaatgaagttgagctgctttattctttgaaacaaagttattcatcttatcatacaacctctcactagcctgccatttcaattagtgttagaaagcagagaccaaattgtacttaaaacaatcttaaacaacagtacaacacataactcacatcagctatgtgaatgtggcgaagctcaacccagagaggatcatgatcctccaataaagcctcctttctctcaggttctgatcccgctttcgacaccttccaacagaaattaaacataagaatagggcaagtgaacagatcatgttcattattataatacgatatcacatttacctcatatatgtatttttggccatccatttcaagtagatcatggcacattgcatcataggtccattcatgaataacaggtgctatctttgcagacatacggaaattattgtaagcagtaggaaagatactgaatttcttcaatatacttctacactgacaagttattgaaacataagttatccttcagcacctgatctataggcctgtcgacaatgagcagttcacatgtctccttctggggaaattcaggtattgttgatttatattttgacacaatatcccaaacagcagtcgctaaccattttggaaccatgtcaaattttggtgttgtcattggatctgtgccctttggggcacgataccgcacacaaggaaattcctgttataacttgaatcagattgtgtttgacaaaaaagaggaataatgatgctatatatatttcattgatagatttaaagactggaagaatacataagaacgatatgagatactcaaaactgctggtgtccagtagatcattgtatatgtataccttttaaaatatttagttcagaaatattcacaaggggaaggtatagtctgccacaacaacacacagccacaagagattgctaagacaatatcacccacttaagtcagttaccaggctattaatgaagttctgtgaagtgcattaacatgacatattctttgcatttttcaaggaatttaatatgtactttttacggcctggtgattcaaggaaggagatcttcagggttggcacttttggctggagaaatgggaatgaaaaactgacaagcaagaacatatgtcatcaaacattttggaaccatgtcgatcaggaaaaaatacatgctacacatgctgaattggaaagacagttaagaaatatttcggtaatgtgatgaaattagtactagtggacaggaaatagataataataataacaaatgaagtatgttaacatgccttcaacgaagcaaatgtggtagcaatgcgagtagccatagtgcttatagtgtcattgaactttttcgagttgtgctgagcactatataaatcagtgaatgccatgtcatggtcagttgtgaatccctgcagatatgccacatagagaaatcattacattaatcttgagaattcggatttctattttttttaaaaaaaaaagaacagaccaccctaatatcaaatgaaagaaccagccaacagcatgcgaatacatccacagtccatccaacatgtgtagcatggtagcaggcatcatttgctatgttttcaccttcggtaatatcacgaatatttcaaaactggaaatgaattcatttgattgatgcaaatgaaccgttttaattttccttcacggtgcaaatgcagttctaaattgtccaaacttcttatcaatcaatgctagttttatgtttgcgtccagttgcttcttataattgccatatgtttatcatacttgacagtaacaaactaaaatcagaactaaatagattcttagccagcaatgaagaaaaaatatgcataactagtagatcatatagatcgaaggctatgaatacctgcatgtcaattgcaaagaactccaaattcatctggaattaacaatatcggcattagaaaatccatctgtaaaaatcaaagaaataaaaggtacaaactacaggataattaacctctcttagtgcaccaatacgtggtatcacactgctgtcgttctttatgtaagagaccagctccttaggaatcggtgaactaaagaatatgtatgccctataaaatcaagtgagatattaacatgtgagtcaaaattttgttgcatttgaagcttttgtaattggcattccgggttacaaattgaaaattcggtttgacatacttcctgtacagtggacatctcccagacatgtcagatagaagcattatgacactgcaggttgcgaggctcacatatcagagaagattcaagacaatataacttcaaccgttgattatgcggcgttaattaattaactagcagaaaaatcgtctaaggaaaaaaggttgcaccaaaaggaaatgcagtgttacagctttggcttgagatgcatatatgccttcagtatcatactatagactacacactgactacaacctaaaagaaatatcataatcacaaaatgaatcaaagacgagatcattactccacgcatatggtacttgcgatcaattttgctgctgcagaatcataaaacgaaagcaagtggtcaatggcgatcgaataa

SEQ ID NO: 14798 - DNA, 4244 bp, Oryza sativa
cacaccgccaccgactacggcgtgctggacttctcgccggcgccggtgttcggcacggtgccgatgagggcggtggacatggcggagaaggtggcggcgggggaggccatggccaaggcgtccgtccacacgctcgagatcggcggcgagctctacatggcgtacatcttcttccacggcgacgacggcagccgcgtcgtcgaagtcggcgtctaccggatggacttccggaggcgcagggcggtgagggtgcgcagcgtcggcgaccgcgccatcatcgccggctccaacatcggcgggtggtgccccgccggcggcgagacggggctgcgacccaactgcgtctactggacgagcccgtacgataaatgcttgcacgtgtgtgatattggcgccaacgccaggaaattgcgagagccttttaaaggactcgcgaagctgccgcatagatcgttttggatcatccctgtgcataagtgaactattccctccgtctaaaaatataaagaattttagacagatgagacattttctaatactatgatacgaatctgaacagatgtctcatcagttcaaaatctcttatattttagaacggaaaaagtatatatgtataattagttttccttttatttcttttattaagataatataatctattccggcctacttgaaataaaccatagcaaattattacaatgatttgtggctcaaatgattgtgaattattaaatttcatagctcggttaaaaaaaaaactatacaaactcgacagatacgatacacattgaacttacatctataactagcctataaagtcgcacattcgcacctctataaccattttccacatcgccataaataactcgatttcacgacgaattatcggaatcgattgatccatgagtgtaatcgtcaccatgtcattgttgtagtgttcataaatatacaaatttgggcaaaacaactgtcgcaactgttctacgttttacatctgaaagaagaataaataatgtgggcaaaatatgttgtctacatacatgttttaagtacatttgacacttcttctcacttggtatatatactagactatgaaaaaatcgtgtaattattgtgagtagtccagtcattgatgacatccaacgtttctaactgttcgtagcaatgggtttctgcaatatgaagcagcatacatgtttgtgttaaaaggcactcgaattattattattattttgaaacaaagatactccaaattgaaccaacagagtggagaaaggaaattataagagtagacatgcagtacgagcaggtaccttaccaaaaggtgacaagtttgtttcatcggttgatttgcaaactaagtgcgaagtttagacgtcattggcaccacctgcagttagcatcttcagcttctgcatttttgaattcaaacaatgagtacaattggtcaaatatcgcctggcaattccacatttaaaactaatgtaacagtataatccaagaaacttctatttgccgcaacaggattgcatgataatggtaaaagaaagaaattcgaatacattattgtgttgtacaggatgggtttaccgaaataaattgtggagggtcatctatgctagaagatcccaggacaatttcgcgcttcagtttcatagtaagcttgtgcaccgtccgcagctgatccatttaagtgtaagaattgatgaccacataaacagaatgggatttgagttattaaatagtttgcagtaaatggcttacttccgatctagtggctccaccaatcatgaagacaaaaattcggttgcctagcctcttgaagtcattagatccatgtctcaagaccgaggagtcactgccaatccagtttgtgatgataagaaagcaggtaaaaggtatgaagctgatataacacttttactagaaaaacttttatatggataagtggttcaaatagaaaattatatttgttgaataccttgattgactatcatcagagtttcgagacttagcccaggttggtgtccgccgcgatctcctggacatgggttgtgcttgtgctggtttagtcgcggctgcactttgtgtagatccttgttcagtggaactgggttcactcatggatgggtattcattcaaaggtaatgcacctttgctcagtttctcaatcaactcctgttagagaatgaatgcaagtccttaatttaaacaacgaataagaaccattattttaagtacgatttgtatataaccactcaacaaaagtattatccaacaggcatcaccaaaaatcattgccactatgtttgttattatccagttcagtttattacgaaccggattttattaacagaatgtgaaccacattcttgaagttcccatatttagaaatttgctatatgttggtttcagaaaaggtgaataatagaatttcataagaaaatattcttaattgtactaagcacacagaaataaattagccaaggagatatttgatgcaggaagtttagaagtaaactagtagtaatagttataccacatgcctctataagtgggaaaaaacgtgataatgcccaggtttcatcgccatcctgccgttctgtcctcgcagcattttttttctggtatataagtcaagcacacatgttagttcaagggaagaaggtagaaataatttagctcaaatcatgacctcaccttttgtgcatcaaatttgagagagaagccgccaggccgtgatgccttttttgtatctgaaccaaccaagtatcttaaactatttatggcatccatctcatcatgtggcagttttgctagctgcataaatgaaagtttgttcaaaatgtcatatgtttatataatcaactgcatgcaattgtaccccccaaaaccaactaatagaaccctctgtgtcacattttctttagtaaacactccgaatagcactatagaagcactcaaggaaaccattgaacaatgataatagtcaacctggtaatctatacttccacgcttataacaagcaaaatccgaaactgtgtttatgtatgattatgtcatgggtaattgggctgagaggctgaggccagtggtcatcccaacaccctctgggtagcacgctactgtagtagttcgttaggtaagattagattgagtccattcttaggggttaagtcgtcccatctatataaggatggattgtatcctatgcaattatgaattaagtgataaatcagattaatccaatctaatccctctcaatgtcctaccaacctaaatctacctctcacccctagcagcagcagccgcttccacgcatctatccacccgacggtgtttatcccgtcatgtcctcgggttgtgacagattaatgtaataattgcactaataagtaatgtaaaacttgataggaaatacctgcatcaacttttcccctttgtcaccttcaaacttctctggatatacaattgcatatataataagcaaccacaatttgttttctgggctcatatcctgaacaatagaaagttcagtaagcattgaataaaaactgacaaataattagcagtaagactgctttcattctctctttcttaacaaacctgctttgacctgaggatactgatcacctccttggctgctgcatctccaaaaactagatcctgctccacctgcccaatgtcacggagaccatactctctgataaacttgttgatttttccagcaatctgaataaaagttcaatagtgagtattacattttttattattttgatgataagatagaagttgtaaaaaaaatcataaatcaaggatgaacatataagtatgtattaaggtgacaacagtcaacatgtttttctaaacaatagctgcttcttttcacatttacttgatagttcctagaaatcccgaacttatttgtaagggtaaacaaaataacataaagcacgcacaggaaatactatggaaataatcatctacctctatatggagggtcaatttctcaacttgttcaccgtattgtggcaaagcttgaacgatcttctgcagatcctttgtagaaatttcaccaccatctctaattgagaaagggaatcataagcatgcaatatgaaagaacttagaacaatgcactttctgtactttggctagcaaacaactgatcgatcaacatttgatgtaaccttgacatcaaactacaaaccacagcttactttgttgagaaaatcccttatata

SEQ ID NO: 14799 - DNA, 10075 bp, Oryza sativa
  unsure (1)..(10075): unsure at all n locations
gcccacaacatgggtaaggttgtttgtttggggggtgggtgtgtttttgtgtgtgtgtgtgtgtgtgtgtgttttcgtgtttgggggggngggggggggttctggctctgcatagcacattttagaaccattgtcaagtatgtagcctactgcaacttgcataggaccaaagggtgatgtttctgtgtagagaagttagatggcgatgagtcaatgacttgaattagaaatgctctaggtgaaagggaaaggaacagatctagaactacaattggaattaggccaatcaagtacagaccactgaaactgaagacttgaggggctaatctttgctaattaattattcagtcttagaatcatggctaggatcatatataacctaactaattaatctgaactagaaaacaagctgaactaactattcttaggtagctagtttgcttttgccaactctggacgcttgtgcggtttctcctgttgtcctgcatgatgctagactattgatcattgctgattgctcatacagtcgcactggtatattgctgtagtagaccacatatatattataatgtttcatgttcagttacctttcatgttatctccatgtgtgctcataactagttaactcctgtcacagcccaaagtcttcagcttgcaagtgtctacaaaggggaagcagaaaagattcttctggtgaagaaatcagaagcagaggcaaaaatacctttctggtgatggcattgctaaacagaggcaggctgatggcctgagacagtaccacagcaaaagaagtcatggacctaatcatggtcacgcagtactttgacaccataaaagaacttggggatggctcgaagaacacaacggtgttcatacctcaaggcccaggccatgtcaaggatatcagcgagcaaatccggaatggtatgatggaagcgtcaagcaacaatgtgtaaattgtagcgattcacagaacaaggttggggatggttcagatgggaggagcctgttgtttataatgaatatattaccttttgtttatagcctgttgtcaagcaacactagcaccttttgtttgcacacctacctggatgatagaatatgtagttttggaataacaaataatgtttggaaggtataaaaggaacaggatatatattaagttaaggaaactgcatcgatttatacacattaaaagcctgtgcttgattattttgagcatacgcttcttcggtaaagaggaatcaaacgattcaagtggaagtatcaataagattggcaaaatttctctaaacattaaagtatcaataagattggcacctatgtacgtgcaggaatcatccaatacgggcggcaccatgtaccatcagccgattcagcaacgcctttgaaaggatccctcacttcttccgtcctcttcccaagctcatacacgcgcagccgacgatcccccgggttcatccagtagatgctgttgggcagcaacccatggcggcgagccctgcaccacccagctgctcccatgtcgttcctcctgccgccgacgaggatggcgcggtcgccgatgctcccaatcctgacgtgcttccgcttctccaggtccaccctgtacacggccacgtcggcgacgacaccgccaccgctttcgaagatgaacaccaggtggagcttgccgtcgacgtcgacggagaagatggaggccacgaacatgtccgtcgtggtgaacgggctggccggcttcatccgcacggtggtgaacaccggctccggcgagagctcgagcacgccgtacgctgtcgacctgatgaagtggtacaacttgccgccgcacgacgtgatgcagtggatggaccgcttcatccgctgccggccttcgatgtccatcttccgtgtcccgatgtcgtactcgtgcctcacccatgccgccggcgacgacgacgaggagccgacgtggcagaacaatatgaagcagcttcccggcggctcgaccatgaccaccgtgaagccgccgccgccgtcgtcgtcggtgggcttgccggatagcgcgcagaaggagtcggccggcggcggcgtcgtcgtcgtctgcccgaacgacggcaggacgatcctgcggcggccggcggcgtgcgggttccacaggaaggtggcgagagtggtcgggtcccaggtgagcacccagccgtgcgaggtcacccagctccgcttgtcccgcagctcctcgaactcgcagggccggtgcacgccgtcggcgacactgtacagcgtcgtggggcgacgttgctcgccgccatcttcgccgtagtcgaagacgaggcacggcaacgcctccggctgctggcggcttgtcgacgccgccatgttgccaacggcgttttacttacgtacggacacaattcaacgcacggttgactttaaatagattgccgtcttggcggcctatgagagttggtctcggacaccgggccggtttgcatatgcgttacacacacctcaagatgttacccttaatcttaattaattgtaaaattcctattaggattcttgaaaactacccacctggctaatcatcatccgtttcgatctatccatcaagttatttcgtaagcatgtgtcactcaaaattttatagaattaaaacaatgccatcatcgtcatattttccatctccttctccatccgccagtggggcccacacgtcagattccttttttccttctttcttcccaggtagagtagagggaagagagtattggggtgccggtgctccggtggctaggaggaggcaacgcaagcagccgaatgtgttcccgagcttggctcactcgaagaaggtgccggccggtacagggagatggtcagaacggcgggtggaagggcttggccctggtggcaaagaaggtgatggtggtggcaggatggggtggctaaaagagaggggaaactaggggaatatgttctcgtcggcgaggcaaagccgtggtgcgaggggagccgttgagggagatcgaccaatggcaaggtggtggccggacttgaggagcgcgcgtggaaggagctcgtggcaggggcgaagcccagtagaagcccgtgggtgcagatgaacccccccaaaaaatatcttttagttattacctccatatctcggccctatatgcacccccctcagcccaatatagtgcacccacagcccaaacaacagttcagttaacatggtaagcccatgagcaggccagtagggtggaagccagatcgatgttttctcctctcgacttctcgtatcgtgtgccgcgccgccgccagtcttgatgactccgccttgcgtctgtttggcttccacaccgctgctctcaatcagccaatcccagtcagcacttgcccatctcggcatctcgccgtcgccggtcgccctcttctcagttggcgactggctgcacatgcgttgcgcaccgccgcggctagtctcactaatcgtccagccgcaggaaggcaggaagccgacagctaggcaaccaggagctagcgtcacaagccaacaacgacatcagtccatctccaccaactgatcagcacacaaccacactgtgcgttagtagagccaaggtaagaaacatgcttcatctatttctttttcaatcaatttaatttattagatacgaagccctaaaatttttattggttgttaatttttacattgtaggactaggaggccagtaggcttcaatttggggtccttcagaatcggagtaagattgcagattggaggaaaaaattgagaatttgaattgaaggtgcaatttggatgtaagtcatgtcaattttcattctatttctttagttgaatgaatgataaaatctctacacatttacatcttcatgaatcatcttttgctcatgggtcagtagccatttatcaattttattagtggttttcttcattttaaaaaaacaatgtttgccacttctttattttattgatgcatttatgtctttattgttgatgtcaaaaatttatcgatcagcggttgcattgaaaatttagcttgaagttatatatatattgatatacttgtggtacaattatgaaccccctccatttcgctatagcttcgcccctggctcgtggtagccgtcggaggtgttgggggacagcagcgtgtaggggagcctcgccgggcccgtgcaattcctgaggcgcgggtcccggttcatctccgcgatgcgcgccttgatcccgacaaggcggtcgccgaattgccggaatgcctccttcgctgtgtccaaagtccactccggcgtgtcgcgctggccgaggtacacctcgtcgtcggagtgcttggacagtatctcgatcagcgagatgccgcggagcgtgcgccgctggccggcgatggtgcggagctccacgtactcctccgtgtcatcatggtgctgcacgacttgagcagcgccgccacggtggtcatctccggccaccatgcccggtccttggtgtggaccactcgtcctccccagccgtcctcttcaccatgcattgacatgcggccggcacgggatggagcacgagggcacggccgcacgggatggctgtgcgcatgcattgcagagtgagatgcagagagggagacgggagaaaggaagaagatggaaagggaagttatggatggaaaaagtgacgatagtggcacaattctaattttataaaattctagtggcatcgttacgaataaatgaattgtaatggtatttttttaataggtaaatttgcaatggcatggatttaattaacccataatcaaaaggacgtgagtccagcaacactatattccgtacttgggatttgattgatgatcttatgattccacagctaattagggtttaatcgatggcggtttgatgaccttctgattcaatgtttatttgtttcgaaatagagatacaaactgaaggattattttctttttcacaaacatgcaaaagctttgcgtgtttaaggattattttgcttctggtagaaacattgttcagtttgttcattcaatgattcaatcatagatcgaactgatactctgacagaagtaatgtacgctttgactgaagaagtgttatcatcatctacgccttgctctgaccaccaactggcacagccatactactagtcgctttgattttttcttgtaaggtttgttcattcatcttatttaaaaagttaatgtagatataaaaacaaagaagtcatacttacaatattttttgataataaagcaaatcaaaaaaaataataattccataattttttgaataagacgaaagctcaaaagttgaaaaaaaaactcaaaacgataagtattctagaacggaggtattattattattattattattattattattattattattattattattattattattattattatcatcgccgccttcgtcgtcgtcatcatcttcttcttcttaaaatatcccaaagaagttttagatatcgaattaccttacctagtgatatttgacatgtattgtccttatcggttggttgaaccgacaaatgcagaaggtgaagacactaggtccaagtggtcaaggacatctcaattgataagcttcgcatttatttagtttacaacaacagatgaatcaaaattataccttattgggtacaacagaagattacatgtacaatttttttaagatggtgcataatatatttcttatattagtcttcttattggtgaccgacacaagtaatatgtccttatattttctttattattgcccttgtgccgaacagataacagtgatgagctatttaggtcaaaatcgtttttttttgggagaggggaggggggaggagggaatatttgttatcgacgacgacagcaacgccgacacccgggcgccactggccgcgacgacgacgaccttcgcgacgcggcgatggctccctcctctcctcctcgatggcgaccgacgcgctgccggctccctcctcgccgctggctggtctcggggaggggaggggaggggaggggaggggaggcaacgcgcgacgaccgacggcgccgacacaacgatgactgccgcgaggatgacgactgctgtgaccacgatgcgacgacgacgagacgatgcctgtgggggcggcgacggacgaaggaggaggccggcggtggcgatgcgtttttttaatttgctaaaatgctttttacaggcgggtgactctaccgtttgcgaagatgttgccccctgcgaaaatgatttttgcagacgatagcttaccgacggtccttttctccgcctgcgaaaactatttttgccgcctggaaaaatattttttctagtagagtcagctagcgtttgtacggtcttatcttttcgtttatacttatacttatcggccaaaatatgaatttttaaccttaaatttggagttgattttatggtttttggatcgttaagaatacgtatataaaagttttgtttacgaattattttttatttataaatatactgtttagcttattccacgaataaacgaaacgatgggaccgttatttgcaggccgtagcgtagaacaccagcctcatacgcataaagccttccatcatttacgtatgtggtgttgtacaggagggatcatccaaaacgcctgacacgatttacgatcaccagcaattcctttgcagggatcccttatttcttccgttggagcaccaggtggagctcgccgttgacgtcgacggggaagacggagtacaccagcaagtccgccgtcgcgaacaggtgggtcggcctcacccgcacggcggtgaacaccggccgatggtgatccggcgagaactcgagcacgccgtacgacgacccgcccggcttgatgaggtagtacagcttgccgccgcacggcgtgaagctgcagatcgtccgctgccctccgatgtcgtactcgtgcttcgcccacgacgccagcgaggcggcggcgacgccggcgtggcagcatgggcggagctaccatgattcccgggtattcccggaaatacccaacttttttatcgaaaaacaagtatatttctaatatatacatatgtacacatattagtgcacctaaatcctcaattattcgatccaaacatagccctatacacatgtacatatattagtacacctaaatcctcaattcttcgatccaaacacagcccaaccggcctatatgacccatcagacatcagttgatccacttagccaccactcttccagacggccccctctcgctctccctccatgacccatccctccctggctcggctccctcgcgccgctccccatttccaaaccctaggcggcggcgcggcgaggcggcaactggcggcgagaactggaccgcgctaccacggagggggaggctattgccgcggcgggcagcgggtggcgcccgccactccgccaagctcaggcagtcaggccggttgggtggccggcagccgcgaggggtagaagcggccaacggctcaacgcttagacgggaatacccaactttaaaatcctggctccgccactgcgtggcagtaccacagcacgttgctgcccctctcgaccatgaccaccgtgaacccgccggcgccggttggctcgccggttgatatcgcgcagcaggccttgatggccggcggcgcctgcccgaacgacggcagcgcgacgctcgtgacctcgccggcggcggcggcggcttgcgggttccacaggaaggtggcgagggttgccgggtcccaggtcagcacccagctgccatgcgaggtcgcccagctccgcttggtgcggagaagctcgtcgtcgacgtcgcaggggcggtgcacgccgttggcgacgttgtacagcgtcgtcgtgggtcgccctccatcggcgtcgtcgtacgagacgaggaacagagacggcgccgccggccgccggcttgtcgacggcgacatatatggtaggccgagatcactaaacacaattgtcaattgtggcggcggctgatcgacacgatccgattaagaggatcggaggttgatcgtgtcgatcttaagtaggatttcacaccatagtcgatgtcggacaacaaattaaatttgttatcgattcagattcgtgtacttagcagattcagagaggtgacagaacccatgctactctgaatatgtcacgagctggctgattcatctgaggctagtaataaccaccttttgataatttgaaaaaaaactggatttttcaattttctagcatttagtttagtttttttattctagattcttaaaagagagaatcgcttatatgccactgaaaatttgtctgataccttatatgccactgaaaattggctcttctcttatatgtcattagtctaaatttgcgcaccctctcatgccactcccgttagttgactgtgggttgaccattaactcagaaggacaaatacgtcttttttactttagagttaacggtcaacacacagtcaactaatggtagtggcatgaaagagtgcacaaatttggaccaatgaaatatagggaaagagccaaattttagtggcatataaggaatcagaccaattttcaatggcatataagggattctcttattcttaaaatctagataaaaggcttggggttcttccggcggcttacacgcacataaatgatccaaaatgatcctcgtggcagttttcacgaggactttgaaagactcccgcaatttcctcgtgttggtgccttggcggcgatatcacacacgtgcaagcactattgtcatacgggctcaattcgcctccccttcaaacgtaggcacatgtacgtggtactaggactacaaagcccgagtctgatttcctcgtcgccataaaatatataatttgattcatgacgagattattggaatccattaatccatgatcataaatagaaaactttgggcaaaattaaacaatgcgaatggagtggagaaatttttacccccaatggagagtgaggggatgcatctgagttgggtattaggagtggggtgctttcctgtacttggcttagtctttatcgaggtgggcccccctacacggcatgaccgagctgcagggggccctatatggcacgaccccgttgcgttcgaggtggtccagggattatacccgcccgtacagtatacaacggtagcataccatctatacaagaaatacaaatcccaatattctattaaagcaagacagattgaacaatacaacacaaatcttcgtgaatgatccaacggtgatgcctgtaggggatgtccccttagaggacgataacactttcgccaactgcggtaactgttctatatatgttacattggtaagaagaataaataatattgtgggggaaaatatgttgtccacattcagtagatttgacacttctactcacttggtatataatataaattagactatgaaaaaaaggttgtaattaactaattattgtgagtactccagtcattgatgacaacattgtccaaagtttccaactgttcatagcaattttctctatttctttgggaatttttggttcatagcaaatggtgaaacgttaaactccgagtccgagtccgcgaccacgtacacgaacgtaacaagttttgcctacataagacaaaccccgatgcatatgcgtgtccatcgcgaatcatctctcatctgtcgcgcttctgatccgttttgaccgtgtcagatagctgtgtgcgtagcgtgcacatggcgacgtcgacaccgccgccgctgccgtgcctcgtcgtcgacaacggcgaaacggcggcgacgttgtacggcgtctccgacggcgagcaccggccgtgcgaggccgaggagctgcgccgcaaccggtgctgggccacctcgcacggctgggtgctgtgctgcgacccggcgaccctgtccaccttcctgtggaacccgaccggaggcgacgacgacggcggcggcggcggcggcaagatcgcgctgccgccgttcacgcagccgccgccgccgcccaattcccagtgcgcgctgtcacgcgagcccacggac

SEQ ID NO: 14800 - DNA, 13776 bp, Oryza sativa
tggggggggttttgcgtttttgcgggtggatggatgagcgctcggcggcggacggctttgatgatgttggtggcggtggaagcgacgggtgtacgcgtgggggagagacgtggcgggatggctggttgggctcgtggcaggactcaagacgtgttgggtcttgtggattttgtgctcgaagtaggcgatgccgcgagaaggaaagccatgacatgtcatggccggcacggttaagaatagctttggaattctcaagacagggtacagataagcagctagataagcttttggaatgcatctgaaattcactaaaccattttgggaattcactaaactattttgagtagaatatcacggtaaccgtatgattaccgtacagttaccgtaaattttactatggtttcaaaaactgaaaaagttatcgcacatgctgaaaaagttatcgcacatgctaattggctaggctgtgaacactgttgttatatggggttaaattgcgcaagcgcaactgggtttgccgatactggtttcttcaatgatgcacgcctggtttagagactacatcttcagacaaacacgtcaatatgatgcgctgcaatacggggcaggcaccgcgagcatcatcccgtgctgacaatcaactcaaaagtcaaaacacacagcatctgatcacatataggagaaagtattttacatggacccttcggggttccggacaaacacacaagtagagcgaaacgtaggcatttacaagaaccgtgttttcagttttccccatgagcaaaacagcaacgtggtgacagcgtatcatacattcgtgctgctacagatcgaaaggcagcacataccctcgacagcgtttttacagtttccggtacacaatacagattacaccatacagacacacgaggtcgtaggggacactcgggacattcaggaatcaggactattcacctgaacctaattaaattctctggacctgaatcttgctgctttcacaactagcagtttactgattcgatccgtagatgtataagagaaatcctttaggagattggtatgacacgtgatttcggtcgttccccgttccgtctttgatcacggccttgctctcttccaggaagagcccaaccccaagcggattgcctgccacgtccactggtgccacggttacctgtggtgcattcacaaccatgcattagtcgatcagaaaaaaaatgcagacaatgtcaaacgagcataatcatacagatttatttttgaggcaaaagcataatcatacagataggagactacttttgttggatagggaaaaacagcgacaaatgataaaatgtcagcaccacactaagattcaaatagaagagatttcagtttatcagcaagctggtctctagaaaaggttatcgacaagcttaagctggcatcatgttccatcaaactaaccttttgatgttattagctgctaaccacctagaataagcgaaaaagtaaaggttatgttcgcttgtgttcaggaaacccattcatatctatccagtcagaccaggttcgaatactcatcaatgcagaagagcagcaaaagaaacaacactttatcctctcatctggcatcacgaatttcatttaaccttctcaatcatctgaagagttagtatcaaactcagcaaatgttttagtcaacatgttttcatttgtcaagcttcaaatttctattagcaatttcaccaaattggtgaatatgctacttgctgaacactgcgcacaagtcagacgctaaagtttaaggctagattgaacaaacagttattaattcatgctggagatcttcccacaaaaagaggggaaaaacttgagcgctgagaagatcccgtgcaacaatggcagtaacaggtcctaacccattttgtaaaaagtgtgcaaagtacaacatgtctctctgtgttcatttgcatgcatcatgttagtatttgattatctgctaaactattagtacccagagacatttgcactacgactacagtttgagcagcgtacatcatttatccactatggcactatctatccacctattagaaatcaagttcaattaaagaggtgttcatatgaggacactcagtctagtttttctccttgacacatttcagcctaccctctcttgtctaatattcttagttatgctttgatttacactatgctgctccaccaatgaatttgcaatcattaggaaagttttatattagctagtcttcagaaaaacaggatgatatcattcttaacctaaagattgaatgtctgagaacaaacagctcattttttatacaagggcaattttgacccaccgtaagcaaagctaaaaaaaataataaaaaaaatcaagttttatcctaaaaagaaaatgtaatcataaaggttattacaaatctaaaccattcgttacctggttcattattattagatgtaccagcattttggttcaagccagccaagtgatgcctagcattccccttccatgattcctcgaacccagctagttcatctgtatcgcgtgcttgtgtgaaaaatatatccaaaatgcaatcacaatgaagcacccaaagctaaaaacaaaccttcatggagattgtgcaatatctgtgtagtgtccacattgccatccgatttcagcttccttgttagtgaatgtccctaaaatttcaagttcaaagaaaattagtgacggacctaaacaaaactataatgaacttagctttagataagaggaaatctttgatactattgtgctggttcaattaatgagattatagtttatacgatatatttcaacatggcaaggtatctaccttgtcatgaattcctcgagagattctatgagtagcctctttagtcgttgtatcagcttccttgctttcttccacagttatctgcagtaaacataattactgtcacttatgtgtaccaaacagtgaggagtacattagtaggtctctaggatatttgcttactccatcacttcctgtccttcgagtttttgaagcagtgtagtaagctccattgacaccaccataagtcacggaagagctctgatatgtgaatgtacgagcttgtggctgcccttcatttgccctgttgaaatccctccgtggctggagttggcccccttgcatctctataaataagaaaataacaaaaacgacataaacataccattgatacagaatcctagataaactataaaacagaactgattcaaacccaactcctaccatcatctggttcttgaacatacggctcacgatttgcttggcgttgcctccctgagttctctccttcctcctcatcaagctcagtaataataagcttcctgccattacctctgggaggagcttgctcaaggaatccatcattccttatgtctccaaatggtcctcccattggcccaaaaaggctaggaccgtgcatcccgcttccaaatggctgattaaagaacggatcatcgaaaggatccctgcctccaaagacaccagagatcaagctcctctggcgaccaaagccaccgaatccggcatacgggtccctcccaccatagaagtcatctcttccatttcgccctctatccattactaagtgattacgtaagctctgcagggttcagcaattacgctacctcgagtagccggtaacatatgatacagaaatcgttcaaaaattaagacaccattcatttcacaaattaatccgttcaaaggtacaggaaaacgatcgtgtgcacatggtcatatgcaatttcatatttcttacagagctcactgtatctccaattcatttcacaaattaatcccaccgaattccaccatatgatagcaccgcaaccgttgtagaaccaagacttcaatttaggccataggagaaaaacaacacatgaatttcccccaattcgcacttgcagaatgctcatctcaccgattccccccacgaaatacagatgctaccaccgaaaatcacctacaggctccaactacttctaggctacaagctctagcactctctcctcacgtcacgaatcaacgatcctaggaacaacagcaaaaaaaagaaatacaccgaacaagctgattaacatgcatgatttcctagtatttcctaaccgcgcaggcatcaatcaaccaaccttacctgaatctcctcgaggccggagcgcacgcaggatgggtggggggggggggaattgcgcgcgcgctggtggagggagacgggtggggatcagccgccgaggacggggaggaggaggatttgtcctggtttggtggtggtggggagcggcctttatccgtggcgttggcagcctgacgtgacgaggagggaggaagacgaagacaaacgaggcctctcgtctcgcctcgactcgccgggatttcccgaacattctggtggtcgaaggcccacgacgcgatgcgaggaagcgtccagaccagacagggctcacactgggcttggcccaacacagcccatcctggtggcggacgtgtccccgcaaattaaacggagttgataaaaactactcccgtccccccgcattgacctagcaaagtttcctttccccaatcaatcgccaatccccctcctcaatctctcctcctattttctcctctcgccgccgtttcgcctggcaaatctgcatgccaagccgcgatgccatgccatggcaaggccaggatgggtctgaatttgtcgtgtcatatccactcgagtcgcgagttggccggacgccgaggagagtagccgcggatctgactgcatgacgcggtcagcgggcctggattcctacgaaaggagccgcctttgatctataatcggtgagtttcttttggtgcatctagttccctatggtcggatttttgatctagtataaactttctgccttttagttatgcgtgtcctttcttgaataggaggaatatgaaggattaaataccttaacaactgccaaggcaccattgttctctacggtgcagaagcgagcctaaagtgccgctcattttggtttataatcggtgagatcttcacattctatgtccttaaggtttctcaacatgggatatttcatatgatgtgattttattatgttgaattaatctgcaaacttgctgctttgttccattttttgtcctcaacattaatccacaagattagagtttgttggtatgtggaaacaatagtaatgctattctcattttggttgctcacgatcctattaagtcggttctccatttttgcgtaatgcttgctattcaaagtgcactgataggaaacaaattgtattttaaattctttcacaaccctactgcgggcttccgtaggaacaattccttcatgtctaacttctagtgtaactctggggtgatggggtgcgactgcccttcaaacttctggtgtaactctggggtaatgtgggtaacttctggtgttatatgatcttcgattgacaacaaactcctgcggaaaaaggcattactcttagcaaacggtcgataggaagtcagtatgaagaaaacaatagagtaccttaccctttttactgtattaatgatcagatgtttctgtcggtgttagcaggtcttcagatgactgtttctgtcggtgttagcaggttttcagatgactacaaactcttgtggaaaaaaacattagtgttagtagctggctggcaagcactaagtagtcattacaaatacaacaatagagtaatagtaatttgcccgtgctaacgctacggtatatttagtatgtttccccaaaacaaaataattcaaaaatagtatgtttttaaatttttgccaaagggagtagtaaatctagatggagcaactaattgcatcttacagatatgcgcaaaaaaaaggtaaattgtgaatatttgcaaatgtatcaattttgtaacatgaattgtctcatttctttcccaaaaggaaagatctaataatttttttacccacaaattgcacacattacatcttgtcaatctcaaattcctatccataaattttacaatcagaacttcacgtttaacgacctacaaatctctgcccatgtctctctgtcccagatccgcgcataacccatcaacacattttcctagaggatgtggatcactcccacaactcatcacccaagaagtgcacctaggtgacacgcatattgttatcctaggattgttgcagcaacatatttgatagtaacatggtaaatttaatgttatgtgcaacctcatttaacagctcaacttttataatattaacaaaaatcaatattttacggtacattacttattgacatgtttactcatttgtaaaataaatttaaaagcattgtacaatacaatcatgcatttcatcattgcacataatattttaatcagaaaattgcaccagaaagcaacgtacatgacaaagcacaaaaagtcatattattcattattggaccatttgctcaggtgatcaacagcatactaattagctagaaacaacaatagagtaacttacttgtctgacataccatttggtgttaatggtcagatgttcatgatggtgttatatgatcttcgaatgacaacaaaatcctgtggaaaaaggcattaactttagcaaacgctcgataggaagtcagtatgaatacaacaatagagtaccttactgtatttaatgttactgggtattaatgatcaaatgtttctgtcggtgttagcatgtcttcagctgactacaaacttttgtggaaaaaagtattagcgttagtcgccggctggtaagtactaagtagtcagtacaaatacaacaatagagtactactccgtccatttcaggttataagacattttgactttggtcaaagtcaaactgtttcaagtttgactaagtttatagacatattaatatttatagtactaaattagtttcataaaatcaataattgaatatattttcataataaatttgtcttgggttgaaaatgttactatttttttctacaaacataatcaaacttaaaacagtttgacttcgaccaaagtcgaaatgtcttataacctgaaacggagggagtagtaatttgcccgtgctaacgctacggtgataattagtatgttccccaaaacaaaataattcaaaaattgtatgtttttaaatttttgccaaagggagcagtaaatctagatggagcaattaattgcaacttacagatatgcgcaaaaaaggtaaattgtgaatatttgcaaatgtaccaatattataacatgaattgtctcatttctttcccaaaaaggaacatctaataatttttttatccacaaattgcatacattacatctggtcaatctcaaatttctatccgtaaattttacaatcagaacttcacatttaacgacctacaaatctctgcccatgtctctctgtcccagatccccgcataacccatcaacacattttctagaggatgtggatcactcccagaactcatcacccaataagtgcacctaggtttcatgcatattgttatcctaggattgttagtgcacctagttttcacgcatattgttatcctaggattgttgcagcaacatagttgataataacacggtaaatttaatgttatatgcaacctcatttaacggctcaacttttataatattaacaaaaatcaatatttaacggtacattacttattgacatgtttactcatttgtaaaataaatttaaaagcattgtacaatacaatcatgcatttcatcattgcacagaatatcttaatcagaaaattgcaccagaaagcaacgtacatgacaaagcacaaaaaggcatattattcattattggactatttgctcaggtgatcaacagcatactaattagctagaaacaacaatagagtaacttatatgtctggcatagcattgggtgttaatggtcagatgttcatgatggtgttatatgatctttgactgacaaaactcctgcggaaaaagaatttaccttagcaaacggtcgataggaagtttactgggtattggatgaacagatgtttctgtcagtgttagcaggtcttcagctgactacaaactcttgtggaaaaaagtattagcgttagtagctggctgttaagtactaagtagtcagtacaaatacaacaatagagtatgtagagtacgttaccatatttggctgttagattgtgttagctatcaggtgttccaattggtgctagcagattagcgactgtttcctctagtgtctttttaacaggggaactgtgcttgtttgggtattttttagcttgaggtttggctttcttcgcttcactgttggctttcttcgcggccttgctagcctccattgcctttttcgcttgtagttgttgtgctcgaaggcgaagcagattcatcctctctaaattctgtttgcggtgttgtttagcatgtgccttttcttgtacagatggtacccaatcgtcgatcccgcactccttgcagtacacgtactttaatccgtctctgttgtcagccatcctgcagttctgcaatatgtcaaattattgttgcatatctgctggcttctcgtctcacaagtctttaatactcattaatattaagaagttgattacaggttgcaaagatattaggtgccagaatgcttaaggctgtgtttagttcacgccaaaattggaagtttggttgaaattggaatgatgtgatggaaaagttggaagtttatgtgtgtagaaaagttttaatgtgatggaaaagttaaaagtttgaagaaaaactttaaaactaaacacggcctaagtaagcagtccagcaatgcggtatgcgaaattattcacccaagtcataatatagaaagtgacagaatgataagcagttcagcaatgcagtatgtcaaattattatgtcatccaagtcattacaaagaggttacagaatgcagagaaagatagtactaggtgacagattgataagatgttggtggcatatgcgcttataagctagggaattcaggaagcgcataatcgataccacacgttgataggtctgtatcaaatcagatacaggcatcgctgcagcctagtttaatggcatgtaggtagattgtttttttttttttttgacagagaggccacggtggaaaacacatgcgacccttaacaaaagaacatctgggatgcgacaattaagctagggtttgacaattttctaacgaagttgtaataatcccaaagcacgggcaaaatcagatctccacgcgacgccgacgcgaccagaccacgctagagaggcggtggcagcagccgtcgtaatcgaagacgagaggaggttgaactggagaatcatggtgcgggtgcgtggatcaggcgagcgtcgaggcggtggagaagtagggcgcttcgtacgcctcgcggagccgggtctccacctcgtcaaccctttggccggcgagtgcgtcgctggcgctctctctacccgcgtccaatccaatccctcgacgtccgtgtcgagaccaagaccaagaccaaaggtttcttcggcgcccgttcccttctcgataacgctgtctttttgttcgttttttttaactagcaaaaatacccgtgcgttgcaacgggtaaaaaaattctaataataatatacgtttttcatgtataatcatgtcaatgacaatgtttctattttaacgagcggcttgtttttttataaacagtgttttttttcttgcgcgattttctcaaaccatttttcagaaaaggcgcatttctttctaatagttttttcctaccatgttttttttgctttttcacttacgaagaaaaccatatttttctcctttttttgcttttcttttctcgtgtgttttttcttgttttctcccacgtttgtttgcttgtttttttcgaaggatcttttttgcttttttcaaatacaggagaatatatgacaaaataaagccacatagtagatggcaaaaaatcgatggatcctatccgactcaagcgtccatcaatttagcttttttctgacagttttttcagaacgattttttttaatagacggtgtttttttcttgcacggttttttaaaacaattttttagaaatggcgtgttttttcgacagttttttccttgcatgttttttttaaaatattttaccgacaatggaaataatttttctcgcgcgtctttttattttttttattgatgatggagaacctttttagcgtgtttttgcgcttttttctgacttttgcctcacacgttattttaaccgtttttattttctcatgcattttctctttttaaatagttagattagagatagagaagagatatatactggttagaaatcagattttgtttcgccctttccattttttctctcttgcattttttattttatacgaaccagctttttattttttacgaaccattttttcaccattttcttaggaaatcgaacgaacttttttagatgtttttttgcctttataggaatcagacttttattctgtttttaaaggattcgaatctagtttttttttgtcaccactttttttttgccttttatatgaatccgatttttttccgtcggatctacagtttttttggccactcaggaaaaaaaacttttgttgttgttgtttttctttattttcttttttgtgcagcttttcttttttccttttatgcacctatctgtctttgttctctttctcttttattattttttttagcaaaaacaacctcaagtagcttgttgcaagattatagggactcaaatgtaaatataaaaaatacagggactcaaatataaaagtacaaatctaaaaattaaaatcatataaaaatggaatgctctctacatgtagattccgtttttgctaacagatcttcaatccggcacattaatttttttcaccaatctgagtcagacttttttttttttgcttttctttttctttttatgcacctttctgcctttgttctctttctcttttattttttttaacaaaaacgacctcaagtagcttgttgcaagattatagggactcaaatgcaaatataaaaattacagggactcaaatataaaagtacaaatccaaaaattaaaatcatataaaaatggaatgctcttgacatgtagagtccgtttttacaaacagatcttcaatccggcagatcaatttttttcaccaatctgagtcagactttttttttggttgatataggagttggacttatttttttttatcggacaaacatggttttttcgccttttttctgtggatcggactctgtccggttttttttggtttttttcgccttttttttctgtatcggactctgtccgcttttttttggtttttttcgcccttttttctggatcggacttctttttccgttctggttttttattggataaacctggtttctacccggtttttttcacccggtttttttgacggacgatggaagcacctcttattttttaagtagtagagatagagattatagggtagcccctatacgtgttactacgctagatcgatccactaggaaggttcaatcccgctggtgagggatttattagttatcttatctggcgatctgctcttccgattctagatcagtaaaggtttctcggacctgacaagatcccatcatactggatgctagctttggtttctggattctctattgttgaagtttttagctgatgctattttggcatgtttccttgtatatggtgcgtaatgcatggccgaatggtcactggcagcgtattgtgcatgacagattgacaggttactgattcctactttaggcccctgcgtgcttgatccatcgtgtaggttcaatcctagccaggttgtttgaaatatttgtgaagtatcggtgctagattgtcttttaagccttgttcgtttaatccctctcgtgagaattgagagggatttgaatgggatttattcttcaatccccaccaattcctctgtcttcgggattaaacgtacaaggtctgtcttcggattaaatgaacaagaacttaagggaagtggtacatctaatgagctttaagtctgttgatgtctccatgacagtaaaagactgttccgtacttattgtatataaaactaaccctgagaaattaggtttacgaaaaagcatcattgactacatgaatgacttatttgagcagtgaatgttggtttttcttttccccattttctgagagattgttttggtaggctgtccatggtagcccaattaatcacgcattgtaactatgtgattgtctagatctagtgcttttcaatgaagtgaaatattattttcattgatggaacttactgtcatttcttgctttttttcgttacttgatggaacttcaatcttcttttcttctgcaggattagtctttgttcagctgatctgcgcaatccaataccgagtcgtgaaggaacatgctgatgatgcattctatgaattgcagaatccccaacagcaaattcaggcctatgcctttgatggtaaactattaacattgagcaattaaatagttgcccatatcaaattattgactcaaagcttaatcactttcccctcgaacttagtggtcctggccctagttccaagaatgaatcttgatgacctttttgagtaaaagaatgatgtggtgaagactgtacttgaggagcttgaaaaggtaactcaagtgcctgtttttactgagtccagctctctaggattaagttgatcggctgattatgcaaactccagtaaggcaaatcattgtttttccttgtttgcatgtattgcattctgccatggtcccagggacgaagctagcatcaaaacaagggggtgcactaccattgaaaatctaaaaaatttcagtacaacactgtacattctagtgtttttaagtgagaaattagaaatttggggggttcatgtgcaccccccaagcatagtgtagcttcggcactgcatggtccatcattccatgtaccgttgtcatcctgtcaggattctaaatctagtcaaacacatttttgtgttagctgaagtattattctctctttttttttctcttgtgcacctatttgcatgttgaaagagttggaatctttgtttggtatacattttaagcatgttatttcgttacccacaattcatactattcttccaagattggtttacatgcttatgtggaattctagtcccagaatactgtttgatggaacttggctgtatcaaaaggaaatctggcattgggctgtctgcatcgcttatctttcgttggaaacttacgtgcttaccaaattttaaactctgtgattgcttcttcctcaagtgttggatattccattcatgataaccaatgctctctctgttcgttctaagttccattcctaatgtgtagttttgtcctcaaacatttttttatcttagtacttgttagtgataagcagtttattatttgtaccgttatatattatatgccatctttgtaaaaaaagactgttctgtagtctatacatcgaacatattcttatggttgatatcatccctgatacttctgtacgcagagcaatgaatgacataaatgcaggtattattccctttcaagtatatatggtacttctttcagtctgtgcaacctgcatgatgtttattagtctatttaatgttgtaatgttttctgaagtaataatctgtcagacttc

SEQ ID NO: 14801 - DNA, 12204 bp, Oryza sativa
gctagggtattctcccgactgacgcattgtgtttcagtttgcttttgcacttttacgacccaagcttgttcttgttcttgcaaatttgttctgttcccgatgcaaatgcaactgacccgcgcgttctttgtaccggttttctttcttctttcttctccttgtgtagcagttgatagtatttatctcttgtgtgtcgcctcagatggagaagaataagtacatcggagggggatatcttctttcagaagagggtaacttctcttttctttgagtaaagaaacattgcagtttgagtttttctttcagaagggacatgtagcaatttgagttgcatgctcaaaactcaaaagaggggaatgttgcagagttcttttgaatagcccaatgataggctctaactatacttcactgcgagtgacgatattgtgcatctcaagattccaactcctttcagctaaactaggaacaacagtggtgcttgatagctgttgttcatcaatgcagaagcgatttgaggaggacgagtggacaactatgttattgtatcttctgacaagagagtacaacatgtgaaaagtgatatagttgttaaggatgtgaaactgtgaaagaaagtttgggtttgctcagaggctctaggaggaagtcaattgatagatgaagcaaaagaaatggcaaggaagaaggatctagagctagaagcaggtacatctatttcagtttgctttgctctctacttctaatgatttcttattgtccgtgttagatgtttagaaattaagggtggcagtgggtctcagagtatgcaacctgtggaaatgatgaacatcattgagcaaacaagggtaaacttgtaaatgagtacagttaaacaaccccagcataagcatccctgcgactcagatcaagttgaccttggtactgaaatgtcacagaggagcttattgcagacaatgtagatgatgaaattcaccttgaggaagtaaatgatagtactttgaatgagagcagcttcccctggtaagcaagtaagaaaccaaggggggagggtcaccaggggtgggcccaaagttaaaaaggaaaggaaaaaacagaatataactcataatataccatgaacagtctacttgctacgataacattatgaacatgccaagcatttggggatctagagaaagtgtaaagagaaagaacaacagtaggtagggggttagaatttccattttgtccacaatgtactacacaatatctcttctttgttgcctccaatttgggcctacatggctactccccaccaaactcatgctctcttatattacaagacccatcatgtcccgaattcaaattatcattcttttccactcttgctgtttcctctgtattcttagtttcttactctgaacctgtggctgtctttccatggcttccagcactgccatgacaatttcttggagaactgacaggagaaacttgatcactggttagcagggaaccatagtacatgagttctcttcaactctgcttaaaatgtgaatggcaagatttgcttggcattgagatggtgagtttttgtgattttttttaatcattaaagaagacagtatattgagtgtaacttagtagttgtttatggagcagcttagtaaaatggaaatagaaaattccttactgagttagtccagatatgtaataatacgctgcatccgtagggagtaattttagtattgttagaagtgaagatgagcaaagcctggaagtttgttcagatggacttttcttttaaaattctgctgtagagcctaagattgattatagattggcttttaagtaggagacattttacaccgtctaatagcatttaaccattaggatccttgtatgtagcctgaataggattttgatgcgtcctgtctggaaatatcaattttcatttttagtagttacttcctccgtttcatattataagactttctagcattgcccacattcatatatatgttaatgaatctagacatatgtgtgcctagattcattagcatctatatgaacgtggacaatgctagaaaatcttataacctgaaacggaggtagtagatctttggaaagaaccctcttagatcatgcttcttcactaaattgacactataactcaactgcagttgaatccacattttaaatatgaactttcccaaaacacaattgttttgggaaagttttttatttgattttcagtttatgtcagcctgtctcagggaccagtaatatttgatcaatggcaggcacaactgagaaggcttaaataatgtgtttgtgtaaaaagttatattaatcggtttgaaggaaagtataatgaagtaaaacaaaatttgttaagacaaattgatgttttagacaaacattgtgatgttttagttttgtgtgtatcagtcaggaacagagaggttcatgttgagaaatgtttcgcacagctctcagagaagagagaaagaaagggacaaaatgatccaaagtgaaggtttcattgaggccggtaatacaacatatttacaaatagatgtacgtgggtaggatggaaaggggctggtctgaaacttacgaacctaattaatttgcgactttggggccaagagggcttatttcagtacatccttgaagctcccaaagttcagaaaataccatttccgtatgaactaaatagccacttcagataccatgtttctctggttagtaaccagacatttgtattctcttaaactataatctagttaggagaagtttgcagggcaatgagcattgtcagtattgtgggaatgttgaaatattcaaccatctattttcacaggccctctagcaagttcgtctgttcaatttcatttggcatccctaacttcccagcaaatgctcatgacctgggctggaaagtttttaaatcagaaagagaagagtttgcagtggttggggtggcagctgtattgctgtaatgtgtctctttgaaatgcagcctagcctgtagtggtataaaaaaggctcctgtttttctcagtagtcagtacaaaactgtctgatctcacctcagcaattttcatgtttgtcaatgacttgatttttgggcaattatgcagaatgctttgtcagtgctagcactagcaggatgctgctggtagaggttttcagtggtgaactggtacacatggatggagaattggcagtggctctaaacaatgtaaattatttcataattggcagtggcttcagaggtttgggcaataatatagcttcttctgtttcataatgcaggttctgtcctgggctgtgggcctgtgtccaaatcttattactgctgcattctcctgtttttgcatgtacaaaaaaaaaaaaaaaagaatgtgctatgcggttggccaggtggcagttggctgtatctaacatctttagcagacagattagtttctgttttccttttgttacatgctatgtaaaagtcatatggtttttataaagtgaatacctgtttctccatggctagaaatacaaaatgtgatctgcagtttgcttctctaaattttactagcttaccaattgaaattgtggatgaaggttttggtttgctcataagatctaggagggggtcaattgataaagggagcaacttaggacatacgaaagaccatattccttattgagttggtccagatctgcaataaaaataactaccctgtatctgtaggggtgattttagtattgttagaagtgaagatgaacaaagcacataagtttgttcagatagacttctatttttaaattctattatatagcataggattctttatggattggcttttaagtaggagaactttgtccgatcatttaacattaggatccttgtatgtaacctggagaggattttggtgagtccagtctggaaatgtcagtttttttttgtagtagttagatctttggaaataaccctcttggatcatgcttctttgcaaattgacacgagaactcaactacacttgaatccatgtttaaatatgaaaattgtgttttgagaaagttatgtatttgatttcagactggaatatagaggcccatgttgagaaatggttaacacaattctcgaagaagagagaaagtaaaggaacgaaatgatccaagtgaaggtttcattgaggccaataataacattatttacaaatagaaataaatgttcggaagggaaatagttttgcggtggtcggggtggcagctgtattgctgtgatgtgtctttttgaaaatgcagcctagcctgtagtgctaaaaaaaagctcctgttttttttctcagtaaagaaccgtctgatctcacctcagtaatttttcacatttgccattgattgatttttggcaattatgcagaatgatgtgtcaaggcgctggcactagcaggatgctgctggtgactttagaggttttcaatggtgtaactggtagtggtacacatggatgtaagttactatttcataattggcagtggcttcaaagttttgggctataatagtagctgcttctgtttcataatgcaggttgcctcctgggttgtggtcaaatctaattgctgttgtttcatgatgcagtttgctgtgtccaacatctttagcaaactgatcagtttctgttttccttttgtcgcattgctgtgtaaaaagtcatatggtttctataaagtgaagacctgtttggttcactaaattttactactagtgtatccgttattgttgtgggataagatgatcgtgtttgattcacgtgttacagaaatgcaccctgagctgacttcttacattcatgcacaatgtatgaaacactgacaagaagttccacagtttattacaagtatatcacaccagttaacaaagttctctgtctgttttctatgtaggtatcagtatattatggcctacctattttctaaactatcatgccactgaagaactactctggatatattttgctgtttcagcataaatcaaaatatgcatgatccttacagtcgaatgacttaactattatcaagttaaagaaaaatggatttaagactgttttaagaaatttatgtagaacttttttttttcaaaaatcacactgtttaggagctcagaagcgtgccatcatgccatactcatcagctcatgggatgtccaagaaaaaaaacatttcaaataaaacactacaccattacgaccatccattaagaaccaaagccacggtaggcagaaatggacgacgaggtgtaaggttatatgtcaacgcatacatgagaatttacattccgttactctattctaaaatttgaaactcaaaatttatgtttaaataaacttaagataggttaatagtgtagaaatgtaaagatgcagttccaactcatggcttgaaaactggatcaaaaatatcttctggttcatctgaatcatcaagaccctaatccaatcatgataacaattagtcaacaattgagaaattatatttaaatgcataaaatttaataaagaacacagcaaacctcaatcatccttcttatcctactcgccttcacttcctcttcctcatcctgtggaaatggaaattattgtcattcattaacaatgaaacacaaatttttgtttaactgattatcataaaaaagaaggaaaacaaataatcacacctcatcatcatcagattcagattcagtccaattttcagtttcaaatggcataactatgtccttgtgaccgcccacatatgtatcgctatcatttgggtgcttcatatccagatttcgatcgttcttgcaaccatagcagatacctgaatatgtctatttgtcagataattggctatcaagtcaccagttgggaattaaaaaaaagtaaaagatgctatctaccttaatagaattgagcaatcaaatacacacaacacaaataatccaccaactcaagaaacaacatatgtattacataatgatagtatatggaatgaaaaagacaagtgcacaccatacaattggcaaccatcttaaaagtaattgtatcacttgtatcagtaaattcaattagcatggaacagaaaaatgcactaaaaccaatcttttggttgttaataactcatatgtttgtaaaagtggtctcttcaaatagttattaagggtgtgtttggttgagtggatggggttggatgggacatggctgccaggatttccataggctaaccaaaaatgacacatgacatatgaaatttaacattgttccttataataatatatgcccattaacaggagcatttaatttgtgtaaaaaaaacaggagcatttattttagtacaagtagggcataccattatcagcagatttaatcaagcagcaacaagtcactacccaatcttcctccccttgcgaagacatcacttcagcaaaaaataaattgtcaatatcagctccactggtctttgctgtgaaattgaagtgattgaaccacttaattccctcaacaatcaattgatagtgaacaacatcttgaagctcataagcaagatcctacaacaaacaacaacaggataaaatttacaaagtgttttatctccaagacttgtaatccacgcaatcagaaaaagagtgaggatgagaagataagcaaacctcaacaaggtcatgatcatcattatacttgtctaatagcacttgaaccatttgacgtcttctcttatcaacgttttgactagcttgtgatctggaatatttctttctagtaccatcaggccaataaagtgatttttgtatcatcctctccacaggagaaactccatcttgctccttgaacctaattggaatcacacaaactaatgattaggaagatgtacgtctgaagtgaggcatataaagtactatagttgtcaacaaacaaatgatatcacttctcaaattttgaaactacagggttgaattggctattttctaaacaaatttccatgatcataagttaaagtgtaagaagtcttcatcctttatattttacatcccaactccttttttgcttgtggataggaataggttcttcgcatggcaatgctttttttttacaggaaatgttccaatgttttcatttgcaggatctttttactagctgaccataaaacaagcggggtttatgcttacttggtgaactttcttgttatgtttctagttgtgctaacaaactcaatcagaaatgatggattttggagaccataattttttcagtttctgagctatctataagtgactaagtgaggcacttttgttcagtttgtaattcatcttttactcgtttcgtagggctaattgacctaggactgttaaatagtgtatagcaagtgcagtacacaaaaaagggacaaataataagctagaaccaggtttagaaaaaccttacattggacacttcaggctctcaagatgacgattgatagcatcctcagcttcatataagttcagaaatggtccatctagagcaggatatgtgtgaaaagatcctccacgatccatcctaatgtgatatatccatggccagtcagcagggtctcttgtccaaatggttgattcaggagaagtgtgatggcggagccttgatgatggtgagacctcgctagtgccatgtggtgcggatggtaaggaagaggtagtagcagtaaatggatctcctaatgttgtaggttcaggcgactcctccatggttgcaacttctggttcttcaagcgtttgttctaatgaaagctgagtattgccttcaacatgctcctcacacctaaattagaacaagcccaatattacatataattattttttggatattgaatgcataaagacaattctattaatgccattccagaatgacctgaaagtacataatgctacaacaaaactcaaactaaatcaacacaactcctttaggctagctcacacttttaaaccatcaaaagctcaaagatctttattccttaaccccgtacaccggtacacacatcatgatttttcttttcataaaataaacagtgtgttgcttgatgtgccatctttcactgctcaagcactttgatacactgtaaaactagcaggcatggttctgcaacagaaagatttctcagggcaaccatgatgagtgatgtcgcaacaggtaaattgaggagaatagggcatgtaggtaacagcctgacaggttgagttcatgaactgagaacaataagaggatatctagggaggtacaacaagtgtcatggtcagaacagcagtaatcttaccggatgaaaagactgttaattgggatgcaattaattatggagggtgggggacaagcaaaaaaaaaaaacttttttttaagtgcaagtcattggaatgaccagttttgttgtagcacaatcaaaagcttgggatttgaagtgacatttgtattaccaattgaccacaaatcattggagtagcatacactattatatacctaaaagcacattcactgtgctatgccaagtcagggagaaacatgctaatggctggggctaaaaaacaacatactaccctctgccgtcagtagtgaaatcggcatcagaatacatatgtaaattttccagtgagaaaaataattgttttgaaagcaatgccctggtaagatttgagacacctaacatttgcaatcaataattttgcgctctagagctggacctatttcacgatatgcccatttagccacttgattcacagttctcttttttcccccaacaaaagaacccaaatcccccccgtgcattcgtatgaattggctcagtccctgtccccagaccgaaattgactcatccaagagggttgtccgagcagcaaatagatggtgaggaagacgaactgaactggaagcaataatcaagcaactcctccaaggaggaaattttctggttggttcttgagcaacttcaacacaagtaccagttacagttagaaagagagaacagagtgaggtgagaggaggtgatggccgtactgtggaagcaggggcggcggggctggatcacgggactccctctgggggtgatagtggtcatagattgcgcccaagagctcatgcaagcttgggaacggctcgccgggaagactgtatcccaaggcgaaatacccgcgagaattgcgtgagactagtatttgccgatccatgaagggcagttcgacgtgcagagggggcggggccatccgagccctcctagacacgcggcgttgcctccgtggagggtccatggatgggggttggcgccaccgcccaccggccaccggtggtgagggcgtcgccggcgaaccggggaggaggaggaggaagacgacgggtggcggggaatagggtttcgtggggacaaaatagcccaaaccggcctagtggatgatgctgttaagagttatgggcccagagagcccatttggaggatggcccagtagcccacaactattttcctccctaaaatgcagctcactatttcttccttttctttaaaaaaaaagggtcgtgttttgtttcttgggtttcggattttttttagttttttacttgttttaatccattaaggtatcaaagatcatttaacaatagtatatattaggcgacccctaacaaaccgggatcatgcaattaattattttgtgatattagattaagtttgtaactaatgaacccatctaagtttgtgtttacaatcttcgctttaattcggcccatgctgctagaataaattggcacgctcgctgggtaggttgtctatgtaccaacaattaaaactatatatttaataccgactcttaatgatatttttcaattttcatttttccagtataagctgcaccacatattatttacctgaagaaattcgttgtattttggattaaaaaatccttatagtttgcagttttagatatgtttcttgctgaaaatcatatctaaagcacgtaattaagaagattataccattggataaatcagttcataattaacttgttaggtgtataaaaaaactatgtccttctaatatatcgataaccaagcctgttgcatcttcgaaaagaaaatagaaaggaaaaaaataaataaagttgcaacatgctaggtccatgcagagatcgatcgatcgagtacgtaccggtgttccatgacgatgtttttttgcggcagctagccgaggaatatctcgatctcgatcgcagctaatagtcgaggaattaagacgacaattattaattattaatcaattgaaacgttctgctctgcttgatttattatatacagatgcctcgctagaaaccgtgaaggaatcgtaatcgggctatatatatgaatctaataaactgtacgtatataccgtataacgtagagtaattaacgaaccacatgcatgtcgagtccgatatttatcacaaattcacgagcttgactccataaatgaatcggatcgtttcatcaacttgaaaattcatccgaaagattagcagaatatgtaggggagacgggtagtaggccgattgggcctgatattattgtctgggggtccatggtttcctaattaaaagcccgccaaggtattgtgggcctaaaagagttgaaaataagtccaactttcttccctcacctttacgcggagttaaatcgacattcataaaccataatacagatatcttaaccctttaacttacaaaaacaggttaaattaggtcctatgactatacggatgtatggtttcgctaagggacaatttcgttcatacccctactttcatatccaatattgattttaccctcgttttctagggttttcgtttttctcccacttttttctattgaatgaggcgtttacccctgtaagaatggtaaaatctgataaggcgcactgtaagagttactctctccggattgataatacttgccgttttggacaagggcacggtctccaaaaaataacttcgatcattatttttcattgtaatatgtataaaagcaaagtactttataagattaatctatacatgtagtcaccatatttgaaagacaaatatttttaaaatgattcataatcaaatattctaaagtttgatcttatccttatctaaaacgacaagtattatcagtccggagggagtaaatagactatctattggaaaatagtatatttttaatccttaaatcctctttagagaatcttaaaaaagatttaggaaagagatttttaggaatcttagccatgctctgagcaaatcaaaatttaaaaattggccactgaagtaattaaaagccttagtacttactaaacaatctagaaatagaacagaagagttattttgcttgcacaggaccattccaaaaccactatactttccaagatagccattgaaaaaacatcataatcctcctttaacaggtaaagctaaaattcgaagatcaaccagcacaaccactcaaccaggcgaaggcctggaactcaatagtttcacaccacggtataaacgagcaatggacagcgttagtctgatgctgttgagacacagaagtcacgtaccatatagtattatagtaaaatggcaggttgtactacataataaccaaaactccacaaattcctaaataacatgaaaacgcactactacaacacagacacggtagcataaaaatggttctatactcattaggagtacgtactcccgctcccattccacctcaaccaaaaagttcttcctgtaaacctgtttcctctacatcaccaaaaagtttttcatgcaaacctggttcctcaagatcctaaggaaaaggcaacagcaaacaaacatcaatggaccatcacgagagtaactagcaccatattacatgtgtaacaatatacagtatgaaacatttcatatagtacaaatatacctcgtaaagttttcttatcctctgctcctctttttcttcctgtgaaaggagcatcagaagcatgtcagtatgccactggcaatgaagcatagcatatgcctacatgctatagacagaaaaaaaaaagaggggtggaaagatgggcttatcacacatcttcagactcgctcatctcttcggtgtcataaattccacaaagatactcatgtccaccagcatattggttagtatcatttgggtgcttcaaattaacattctgggctgcaggaat

SEQ ID NO: 14802 - DNA, 5416 bp, Oryza sativa
atgagtatagagatattgtgaaccaaccccataaaagttaactgaatacaagggaacaattaccattgtcatcagatttaagtgcacagcaacaagtgacaatataatccttttgtcctaccaaacacatcaattcagcaaagaacagatgaatttgataatccaattcattatctcctttggtcaatgccgtgaaatttaaatggtcaaaccacgtacagctctccataattggttgaaagtgaatgacatctttgagctcgtatgcaagaccctgaaaatagaattaagaatcagaatacaataagaatgatgggatagtaacgctagagatcgggagaacagacccctaaaagactgtgatcgtcattatacatgtctaatatcacccgagccaattggcgcatatcattatgcacatcctgcgttacttgtgatttggagtacctcctcctagttccatcaggaaaataaaggattttgcgtaccatcatgtccacaatagactccccatcccgctcctcaaacctagctcaaatcagaacaacccattattagtataaggtgaagtgaactataggtaaaaaaaataatagggggttgcagatatattgttaggtaatttttagatagcaaaatgtaccaacagtttagcgagttgaggcttaggagtttgtgtaaagagtgtttaatagaagttttaatatacatatgaaacaacaaaacactagcatagtttctggtagtcgacaacagaaaagaggcacacccatttaaaattacgcataactaacttaactagtttcgaggtagataaggtgtgcatggctattggatttagatttatcaatctttaaagcatttccctatttaaattcctaacacagactggtgtttttgccctgttgttaccagtgaattgactaattcttgtggcaaactgacaatcagtcttgttcagcatctaaggcactaggtgcgatataagctatacttaactgtacacactggaatgctgcaagcgaaattaaaatattcttggatgaaaacttgtgcaatcaggtcttactttgcaaattttcttctattccaagtattctcaggtgaaaacaagtgcaatcaagttgcctaaaattgtttcttggcaaattttatccaccttagcatggcattgttctatttgtagatataaaatcgcataccaagcacatggaaataaaaagaggatatgcaggtatcttactttaatggaggatataggatgttaagatggctagtgaaagcgtcttgagcttcatttaagctgagaaatggaccacccatatcaggatacgtgtggaacagcccactacgatccattcgaatgtggtatgacccgcggcggccttcaggaggtttgtgaacccaaatgactgacccaggggatgaggaaaggcagcaccctgatggtacagcgtcaatgttgtcttctggtactgcctgtggggaggaagagggactggaaataattggttctttcaatgctatagcgccaagaagctcccccacggacaaaacatctggttcctgcagtgcctgtgcagattcaggctcagatgcacctctcaaaaggccctcacacctgcagtgaacaagatcaattagtacaacaaagtatcttgcaaagccaatattcgatcaattagtacaataaaagtatcttacaaagtcgatattccagaatgaccattgcacaaatgccaggttaacatactaggaaatattgatctgttttctaaaatgactcgaaaagatatagccttttaccgaattgcggcatcagtttagtagaagtgaacctatgtaatacaccaatttatagtgccgttagttctatttttaactatatataagccgacaaaaggaattcaagtatcctgcctctcccctcccctcccctctaaaccgacaaaaggaatgactttcatcgagtatcctacattcccacccctcccctcccctccccaaatataagaagggtgtgcaatttgtctcgtgattgatcatcacctcattatagaaagtgtctggggaaccatcaatcctcagaaacataaatgataaataataggattgaatccaaatgcaagccctttcatcaaccttgttcatcgacagagaaagatagggaggagggaggagggttgaggtggtgttcgtactgtgtcggcagcggggctggatcacagggcttcgaccggaggtgatagtggtggtcgagtgcggcgtagagttcatcggaggttgggaacggcccgacatcaacatcgcgccccccggaggcgaaatacccacgagaatcgctgtacactcgtacctcctcatcctcacacgggtcccgctcccgccctgctgtcctggacgccatggatggggatggcgccggccgccggccggcggcgggggcgttgccggcggacggtggcgtggcggggactagggcttggtggaatcgaaatggcgcaaggcgaagtggccaacacaagtgactattgggccggaattgggctcggcccatactaaaatttgcatgactggatcgagtcctcttgcatatgatgaggacgatctggtgtcttgctgttccatgagaaatatgcctatcgatcgatttctatttggtttcttaattatgtcgctcgatggagccgcttgattgctacagtgtatttgctaaattaacctaactagcaggagcatggaggagacgaaaaaaataagcagtgtatgcgcttggtttcacggattggggtcgatttatatgaaggtttaacaataatttgagagaaatcaagctagccaccacatgcaaaaactcctacaatgcacttatataaagataggcagatcataattaaatgcagtttgaagatggacttacttaggatgaagatccgggctctggtgatccatgattatactcaatgtacagttttttttttttttgagggatactcaatgtacagttaagacggtatttggctaacaaaattagtttaagcgagcacgggattgggggcgatttatatgcatcttcttcactggacaattaacgtgagggaatcggaatcgttaccgtgttctgaacaaattactgtatgcgtagtactccctccatccttaaaaaggcccaaccgaacctaaaggagcaatccctattttcatatctaattgtgattttacctctgctatttaggtttttttggcccctgcttttttttttgatcgaatgaatcgattacacctgtttttgacggaagcaagtggacccggaatttgttaagggaaagaaatagggattttgcaaatcttgtgttacccttctattccggcaaggtcactccgtgcttactggaatagcattatactcgtatgtcttgctcttggagccatggtgctcaacgcctcaacggcagcgctgggctccggctagatagtactagctcagtgcagtgaagcaactatacgatcgagctagtacactcaagtctgaagccttaaaaggacgtggtgattaattcgtttcaaaattttgttgattattctttcaaatttgttatcttcatcaatgttcgtcaaaattttacaatagtcaaatctctgaaaattgcatatctggtctgtatatctgaagctgaaacaacgaagagaaaaaacaggaagaaagaaggaaatggacggctgagatgagctgataccgtttcgctaatgtagatcgaacgtccttgttttctttcagtaattactgtttaccgtaagatacgtcttaagcgagctaatgaactgagctgggtttgtccctattcgtggcggcagaatctatataagccgatccgatccccctttgcatctatcgaagaatataaaccctagttctacacttgttctttgtcttgcagcgcactttaaattcccctaattctgttatttttcatgcaatttcttcctgtaggatcccaagtaggtagcctctaagccaaaagtcaagttaaggttccaggtgcatttggtccctggttcctggcaacaatccagataaaaaatagtaacattgtataacattatgttaattataaaacagtctagttatattgcaccctccatgttgcaactgacatgacctcaaccaaaaagctcttcccacacacctgggtcatcaagatcctaagaaaaacattagagagcaatcatcaattttgagaagaaaaaaaaagacactatactgtatgcatataataacgctatgtctgaaataaggtcgcgtacctgatacatttttcttagcctttgctcctctgcatcctcgtcctgtcaatcaaggggcagaaaactgtgtcactaacatggttgcatggcataaaatatgttaattataaatccgttccagttgcaactgacatgatctcaatcaaagagctcttcccatacacctggatcatcaagatcctaagaaaaacacgagagagcaatcaacattaattgagaaaaagaacacatactcagccagaaacatgacatatacggatatacctgatacatttttcttaacctctgttcctctgcatcctcatcctgtcaatccagtggcagaaaacatgtcattcacaatgaagcgcagtatatgcattaatgaaaataaggaggaaaagatggatcctctgacctcttcagagtcactcgacacttcagtgtcatatatcccagtgatataacagtggccgccaacatatgaattgacatcatttgggtgcttcatacttctgttcccaaacttgcaggtatagcagttaccttagaaagaaatagatcgtttcgtcaaatgacagacacaccatcagttattcagttaggcagcaattatatatatgaaaatatcttaaattcaagttgagctaatgaaggtaaaaggaaaaaaaatgcaagaagctatgaaaaaacagattattaaacatgaaaaaccaaatgtttctcccaggtttatgagtatatacaaattatgaagtatgaacccaagtccacaaaagttaagacgggtacagcttaccattgtcattagaacttatcaaagagcagcaagtgaccacataatccttttgtccttctagagacattgcttcagcaaagaatagatggtcacgatctagccctttagatcctttagtgtttgcagtgaaatttatatgatcaaaccacctatgactctcaaatattggttcgaagctaacgacctctttaagctcataggaaagatcctacaatgagaaatagaataagatcggcaagtgtgacatcaattagacaccaccaaagcgagaatgatagacataaagcgagagcaagaacaaacctccaaaaaattttgatcatcatgggctgc

SEQ ID NO: 14803 - DNA, 24418 bp, Oryza sativa
tatgactccccaggtcgctcttggaacctaactcagatcagatcagactatatcattagtacaaggcacaatgaatatagtacaatgtgggggttgcaaaggcattgttagagaatgtgtaccagcaatttagttcaatgtttagagaatgtgtaaatgttatctaatagaaagttcaacatgcatatgatttgaaacaacaaaacactagcataatttcgcagttatcaacatagaagaagcacaaaacttcataatttgaaaggtatacgtaagtgccgtggaatcacacttagcctctggcacatcaaagctagctgggaaacaagctatctattcctagataggaactagaataatgtgatccaactggaaccgccattattcactatggatcatataaaaacaggacctaatataaattcagaaatagttcagctcaagtggaggcaggtgaagaagagggctcatcccatgatcaactgctgcaagcgtctaaagaggtgaatgcaactgcagcaaatgaggcgaaggaggagcaccctgtgtctgcttgagaaatgaggtaagctacaggatttgacccacactcttgtagtcttgttacaaagttctataatgcagtttaagtccgaactgcatgtgaaataacgctatgtgaatggttaagttgtataatgcagttttgaccagaaatgctgtaaagacttgtctggatgctgctttgacaaaacagatcacttctatgtatctgtgaggataagaaataaccaaactacaattttgatatgaaccaccatggtttgggaatcaattgcaacattttaacctgaggggaacatataaaatatatgcgtttcagtaatttaaatgggaaaggtttttttctctctttctcaaaaaacaaaaaaaaaactgaggggaacatgcctaaatgatgcttaccaagcaacaactagcttaggccttatcaacttctgaacttcataatatctttttgttgcagtcatttgtgcttaacaacctcttaaaaacatagttacctaaaactgttcgcttgctcaattgctttcatcacttagcaaaatatttctttttatcagccagtgaacagtacaaactacaagttaggtcctacagttacattttgtgattcatgatctgaacaccatccaagcacaggggaaataaacagcgttagctacaatagagtgtaagaaccttactttactggtggataaatcctgttaagatggctgctgatagcatcttgagcttcattcaagctctgaaatggaccacccagatcaggatacatgtggaatgacccactacgatccatccgaatgtggtataccccaaggcggtcttcaggaggttcccgaacccaaatgattgacccaggggaggaaaggcaacggactgatggtgaagagttgatggtgtcttttgatacggcctgcggggaggaagagggactgcaagtgattgattctttcaatgttgtagcatcaagaagctttcccaaggacaaaacatctggttcttgcagtgcatgtgcagattcaggataagagcacctacagtagcaagatcaatgagtcaaacaatttatcttaaaaagttgatattcagtcaaacagtttatcttacaaagctgatattctagaaggatcattgtgcaaatccgaggataacacactaggaaatgtatagtctttaaccaagttacaacatttggtttgtagaaatgcacatatgttacacaccaatttatccgaaaaattgacaatttgacctttttgtaaaacttgtcaaaattgacaaccctccctcccctctcttccctacccttccccagatatcaagttctactgatcaatattctcctagtcctggtttccccttctgggagaagcaatcttcacaaaaaaaagcaatcgattgaatcgaaatccactaactttcacaaacctccacagggaaaatatatgccctcgagatataataagaaacagataagcgaagggaggtgttcgtactgtgaagaaagcggcggcgggactggatcactgggcgtcgtccgggggcgatagtggtggtagagttcatcggaggttgggaatggcccggcatcatcatcgcgccccccggaggagaaatacccacgagaatcgctgtacactcgtacgtcctcatccgtgaagggggatcgggataccccatccgcacatgggtcccgctcccgccctgctctcctggacgccatggatggggatggcgcctccggccggcggtgggggcgtcgccggcggacggtggcgtggcggggactagggcttggtggaatcgaaatggcgcaaggcgaagtggccaacacaacacaggtgatatttttttattttttagacattttatgttttaattttattaataaccatttctaaaagtattttcaaatctaccatgatcaaataactctatcgcattaacaaccacaccacgctcttgttacgccaccactgctcgtgtgaccagccacttaggtggcattaccgaaagattcagttttcgaaaatatttttagaaatagtctattaataaaattagaacatgaaaagatcttaaaaaaataaaaaaaattccacacgtgactaggtgaggacgaggagtgaactattggaccggaaacactccgttccgggattgggctcggcccatggtaaattttgcgtatggaccattgcccctcatgcgtaaggcccataattgtttctcctttttcttaaaaaactacattagtgtttatgactgaatcgcagaaaagaaaaaaaacaacgttagttctgttgggttttcagttgttttattatatccaattaaaattttgatttttctgtttttgagtgtactcttgaacaattcaccaggcgaattgcaagatagcaaaaaaaaaaaaaactcgctagaaaaattaagctagccagatgcgtgcacgatactccctctgttttagataataagacattttgactttgattaaagtcaaactactttaagtttgaataaatttgtagaaaataataataatatttttaactcaatataaatttattatgaaaatatattcaattgttaatttaatgaaactaatttggtattataaatattactacatctgtacataaacttagccaaatttaaaatagtagtcaaaacgtattataaaaaaaaacagaggagtatatcagatggagttatgtaggatgacggcgatatggtctctgcaattacatgggagagatgtctatcgatggtctttaattggtcgttgcttatgtggcttgagccgcttgattgctacagtatatttgctaagggcgttcgcgaaaataaaatttttgaatgtcacattagatgtttaatcggatatcggaaggattttttttgacacaaatgaaaaaactaatctcataactcgcttggaaaccgcgagacaaatattttgagcctaattaattcgtcattagcacatatggattactgtagcacttatgactaatcatggactaattaggcttaaaagattcgtcttgcgattttccccttaactgtgtaattagtttttcttttaatttatatttaatgctacatgtatatgtccaaagattcgatgtgatgtttttgtgaaatttttttggataactaaactaggcctaaattgacctaactagctgcagcatggctgcagatcgtgactaaatgcagtttgaagatggaggacttacttaggatgaagatccgtgctctggtgatccatgataagttgatactctggtgatccgggctcgagccgttttagcagctggagcctggaggagacacaaattaagacggtgtatttcgttaaaaaattagtttaagcgggcacgggccgggattgggggcgatttatatgagaaaattgtaattataggactccaaacagtacgcttcgcagttatatgactccaatcgtcgacttcgctaaaacaaataaggcctcgcaaaaaacaaatcaaaggcatttgcaaatctgttttgtaatcggaatcgacgtgcacatggtacgtacagtttgctcagaacacgcactttcccagcgaagatgtactggagtatataaattgactacaaatcttatgtccgcttaaattaatttttgttattcaaaggccgtcctaattttgtccccacaagatacctacgtttagcggcttgagccatatacttcctccgtctctaaatatatttgacgccgttgactattttaaacatatttaatcatttattttattcaaaaacttttgtgaatataattcaaaaacttgagtagtagtagtatatttagcaataaatcaaatgataggaaaagaattaataattatttaaattttttgaataagacgaacggtcaaatatatttaaaaaagtcaacagcattaaatatttagggacggagggagtatatacttacaagtagtaatatactccatttcctaatagataacatgtttgacttttgattatatttaataattattcgaaaaatttaagatgtttatcatacttaaagtgttcttttattaagtaataaaacaactcatagcaaaataaataataatcatgtaatttgttcttttaataagactagaaaaatgcccgtgcgttgcaacgggtaaatgctattttaattttattattgctatacagtttagctaagataaaattcagtgtgagaattcacttgaatatatatttttaaaaaaatcatgagctccaattaggagtctaacttttacctcaagttagcatgcagagttttttaaaagagatttcttgtacgacttatttgtatttccaaaaacaagcaagcttaaaaactgactcagatatggatctgtatttccaaaagcaaacgaacttaaaaaccgggttaaatacggaatgacgtaccaaagtaccggcaaaaacatcttcaatttttataatagaaaaaatgcccgtgcgttgcaatgggtgaatgctaattttaatcttattattgttatacggcttagctaggatgaaattcactgtgggaattcgcttggatatttttttagaaaatcatgagctgcaattaagaatctgactttcatctcaaattagcatgcaagtttttaaaaggaaattacttatacgacttgttttgtatttccaaaagttaacgaactcaaaatccaattcatacacagatctgtattttcaaaagcaaacgagcttaaaaattggctcaaatacaatacagatgacgtaacaaaatatcggtaaaaatgtcttcaatttttataataacagagatatggtgttggaagcaccatccatgtcataatggattcatggaacaaatggcatcttagtatagttgctctacatatattaaatggatagttgatatatattaacatgcatgggactgatttaggttcactttccatagtttatgcgggaacctgccagaaccaatctggataatcccgtgcctcgccgttcgattccaaccaggtcctccgcatggctcaatgagaaattactgaaaattaatctattgcctccgtgacggtgtgacaccgatacggatgcaacgcggagggagcgaaatgtaaccgtgcgagacttacaatgacggacgaaaatcccagacaaaaacatcttaaatttttataatagataaagataaatggtcaaacgtggtcgatcggatatagcatacacacgactcattctcaatcaaaagcttctcaaaaaacagtatatacaggactagatggaaagcacaaggtttaaggaacgtattacggtttaaattgagaggacacacaagtcacgacgtcgacgtgtgatgattgcaacaagagttagagcgcaggtagtacgcgagaacgaaaccccaacaattcataatcaagatcaaagataactaaataaaactacagctccacaacatggttgcatgacatatgctaattataaatccgttacagttgcaactgacatgatctcaatcaaagagctcttcacatacacctggatcatcaagaccctaagaaaaacacgagagcaattaccaattgagagagaaaaaaaaaagacaccatactgcatgcataataacgttcggtctgaagcatgtcacatacctgatacatttttcttagcctctgctcctctgcatcctcatcctgtcaatccaagggcagaaaaatgtgtcactaacattgtaataatgaatcttaatatatgcatgaatgtcttacaaaaactaaatgggggaaaagatagatcatcagacctcttcagagtcactcgacactatagtgtcatatattcctttgatataacagtgaccaccaacatatgaattgacatcacttgggtgcttcatacttttattcccaatcttgcaggtatagcagttacctgagaaagaaataggttgttcgtgaaatgacagacacacaatcagttaagcaccaattatatgtaaatatcataaattctagttgagctaatgaaggtaaaaaggaaaaaaaatgcaagaaccgatgaaaaacagattaactagacatgcaaaaccgatgcttctcccaggtgcatgagtatatacaaattatgaagtctcccaggtgcatgagtatatacaaattatgaagtatgaatccaagtctataaaagttaagatgggtatagcttaccattgtcatcagaacttatcaaagagcagcaagtgaccacataatctttttctcctttcaaagacatcgcttcagcgaaaaatagatggtcactgtccaacccatttagtcctttagtagtcgcagtgaaattaatatgatcaaaccacctacgactttcaataattggttcatagttaatgacacctttgagctcaaaagcaagatcctgcaataagaaatacaataagatcagaaagtgtggaatcaattagacatcatcacagtgcagaaagaatgagacagacaacgagggcgataacaaacctccaaaagattgtggtcatcgttatacatgtctaatatcaccttagccagttgattcatattattattgacattctgaaatgcttctgctttggaacatttcttcctagtgccatcaggccaataaagtgctttccttataatcatgtccacgtaagattccccagctcgttcctcgaacctaactcaaatcagatcagtccataccattagtataaggcagaatgtagatagtacaatgcaggggttgcaaaggcactggtaagaagtttgttatagagattacattccaataagttaagagtttcaggataagaaaagtttgagtaaatgttgtcaaattgaaatttagcactcatattagttcaaactaaaacagtagtatggttttttgcagttatcaaagaagcacgaaaatgcataattcaaaaggcatgcgtaactgaatttgcttgtttctagatatataagggcatggctatcgtcttgtagtttatcaatctatagaaagtatcatagtttcaaggtttagatcctaaactcatcctggtttttccgtcctatttttacctgcgattagactaagttctgtgtgatcactcgtgtttacctctgacacattaaagctagctgagcagcaatataattgtaaacgctgcaaatgaaattgaaaattcctaggtaaaaactagtgaaatgtagcttatttgtgaacttcgtgttatcttatggtttgcagtcattttgtgcttaacaactccatgcccccatatatacaaagttacctaaaactgctcgtttgctcaactgatctcgtcactatcagctactttaaattacaagttacagcccacaattctgttcatgactcatgccctgaatatcataccaaacacatgggaaataaatggagtagttgcaagctacaacagagtgtaggaaccttacttaactggtggatacagcttgttaatatggctactgataacatcttcagcttcattcaagctctgaaatggaccacccagatcaggatacgtatggaaagaccccaaacgatcctttctaatgtggtatacgccaggtcggccatgaggaggtttctgaacccaaatgattgagccaagggatgaggaaaggcagtgccctgactgcggagcatcaatggtgtcatctggtactgcctgtagggaggaagtgggactggaagcggttgattctttcaatgttgtagcaccaggaaagtcccctaaggatgaaacatctgcaagaccagaggtacctcccacatgatcctcacacctgcagtgaacaagatcagtgagtacaaacaattcatcttatgaaatcaatacttcgttgtacaatgcaggttaatagacccagaaatatatatataactatgattcatggaaatgcatatttttatgagataacctatttgacacttgacagaagacaaccccaaaaatcttgtgaattgtggacacgttggatcgttttgagattcatgcaaccagccctaaccccttgttcctccctccctcagtcctgccgccattctgcggatcgcctgcctcctcctctgccaccggcccagcacgccgccgctggaaagcacaacggcgaggtgcccccacaacctaaccactcgaccagtagatgccttgtccactccggcctacctctaaactcaggaacctcccccctgttccccctctgcccaccaccatcgtcgccggagatcaacgagctcaccagagcaggaggtgatcatgttgcatgaatctcggagcagaccagaaggtcaaaaatctgtaagatcggggcttcgattttctatcaaatggaggtcctcaagccttcttcctctcctcaaagatcaacagtcgcaactcgtctcctccttattagggaatagccatgaccacaagtaattaaaataattcgatttaatcgaaattaaccaatcctagattcctagttccttcaggtattctatctatcaaaacaaaactctctctaagataccaattagaaacagagaaaggatcgagggaggtggaaggggagaggtggtggtcgtactgtgccggcagcagcggcggcggggatggatcgcgtcctgaggcgaaatgcccacgagaatcgctgcacgctcgtgcgtcctcatcggtgaagcggggtcggaacaccgcatccgcacaggggagccgccgtgatctcatggacgtgcggccgcgcgtcggtggaggggcgatggatggatggggttggcctcctccggcggtgggggcgtcgccggcggccggcggacggtggcgtggcggggactagggcttggttcgtcgtggtcgccggcgaacgcgggtgagcgaggtgaggaaggatggctattgggcctagcagaattgggcccactttcctttggactatcccctcgtgtgcaaggcccataattacttctgtttggtttcaagttatttttttcagattttcctttttatgtttttttcccctgattttgagcaaatcctccaggtgaattgtgatgaactgatgataaaacaaaacaatagtagtgtaatagaaaacaaaaaataaaactcgcaagaaaaattaatgcgtggacaaagcaatattgcatatagacaggtggacttacgtagtatgacgatctggccggctgatctgctgctcctcctccatgtcgatgattatttttttctctcgatagtttcacgattggtctaattattggtggagatgaacaaatttagacaggtaaacatggattagcggctaagtgcgagttatgtacgtactacctaaccgaatttttatcgtgttctgaacaaaccgtgcatactacatgtacgctgagtcctacaaatacacagattcgcaaacgcaacatcacgatcagattggtaattggattgcatagatacccaactgagaaacagatcagaagcgagggagaatcggtggagatatgtacgggatgatcaacggagggcggctagatggagaccggctccgtccgatctccggtggggcttcgccggagatgactgatgaggtagacgatgcgtagcggggccgagggcttcgtggggcctcatttggaagaccactgggccaaaattaccggcccattactgttaaaaggccggggattatgggcttcaaaagcaggactccttccgacaaagagcctggaggagcaaaaatatccataattatgaagcaaaatttttatctatgtactccctctgtccaaaaaaccctaggactggaagtgatatattctagtacaacgaatcggtacaaatgtatatccagattcattgtactcagatgtgtcacatccagtactaagttggtttttttatggaacggagagaatactcttagagcaggtacaatagtagcctataagctagctataaacatattttaaggagataagagaagatagagaagagcagttggctacagatttgtagccgatgtgcgtatggcatgtgggatcagatattaataggtaactattgtatgaattagctattaaattgactataaatgatttggagctgatagttggctacactattaaacttgttcttataggagtagcagtttttaaaagtaaatattgaaaaataaaccataataagagaaaccttagattggactttaaattaacttttacaatttaaattgtagttgtggctggtaagctatcaagcaaaccatgtacaccatgtttcaaagtcttctgttagacggattttcattccaagtttagagaggtaaattgatttgcttgcttattcttgttatgccattttcatgttgttaaacctgtctttaagagaaaacaaccaacttgcatttatccctggtttagtttcctaatttttttccaaaaacatcatatcgaatctttggacacatgcatggagcattaaatatagattaaaaaactaattgtacagttaaggggaaatcacgagagggatcttttgagcctaattagtccatgattagccataagtgctatagtaaccccacatatgctaatgacggattaattagtcttaaaagattcatctcgcgattttcaggcgagttataaaaatatttttttcattcatgtctgaaaaccctttccaatagccagtcaaacatccgatgtgacacccaaaaatttttcttttcgcgaagtaaacaggccttaggcaaggcctggtttagttcccaactttttctttaaacttccaacttttccatcacatcaaaactttcctacacacataaacttctaacttttccgtcacatcgggtttgtttggtttagtgccctaccaaagtattgatagcgccaaaatttaggcatgttttggcactaccaatattttggtagggtagtatttaaagtgaatgagtttggattatactaattgaaagccaaattttatattatagttaagaaagttttagaattatgccaaattaactatgggcattaccatttacttgcctccaaaccaaaccattaaattcactatttaagctaccaaaaaattggtagggcacattttagcatcaatccaaaatgacccatcgttttaatttcaattaaacttccaattttagcgtgaactaaacatacccttaagagcaagtttaatagtatagcccactactagctccaattcatctatagccagtctaatagccaattcatacaatagatgcttactatactattaatatatggtcttacctgtcatacacacactgtgtcttggagtctgtgctgcagctggctacagatctgtagcccgctgctcttctctctcatcttttatctcattaaaatatgtttgtagctggctaatagtctgctattgtacctgctctaagcacaattgaaaaatcttggaagtagggaacggcttcttctccctcaccacaaaatgaacattgaacaaaccaagaaaaaaaataatgaaatgacccatttgccctgcattccaaagcactcacattcattgccttttgagcttgacccacaccactctgagggccctttgaatagcagggtagaaaaaacggagaaatagcaaaaacataggattctgacagggattgaagtgtaaaacagaggattgcaaaacacaggaaaaacataggaattgtcgtttgattggagcgcaggaaaaacgcaggaatcggatgaaagagatagacttaaaggaaattttccaagaggttggagctcttgctaaatttcctccaaaatccacatgtaatgtgccattccataggaatttcataggatttaaaagctttaatcctttgaatcaaagggctaaataggaaaatttcctatagaatttgaatcctataaaatttctgcattaaggccccctttgaatcacaggaatgaaaaaacgggagaatgggaaaaacataggattctgataggaatacaagtgtaaaacagaggattgcaaaacacaggaaaaacataggaatgaccgtttgattgagccgcaggaaaaacacaggaatttgaggagaaacacaggaatttgaggagagagaaagactcgaaggattcttaacatgaggtagaacctcatgttaaatttccttcaaaatttgtatgggaagaggtattccataggaattttataggatttcataggattcattcctttgattcaaagggctatataggaaaaattcctataggaattaaatcctttaaaatttctatgaatttcctttaaatcaaatggggcctaaaagggggccatgaatctttcactccactctgctcaaatatagcactccactccctggtcagtgctacttcactctcccacttcgaggctacaagcttttcttgcttgctgcaatggccgcctcctccgcgcagctcatcttcctcctcctcctcgccgttcttgccgccgcctcatcgcgcaacgacgaggaggcccgcgcgctgatggcgctcaaggagagcctggacccggcggggcgggtgctgggctcgtgggcccgctccggcgagccctgcgggggctcgttcgtcggcgtgacgtgcgacagcggcggccgcgtgacggccatctcgctgcagggccgcgggctctccgggaccctccctccggcgatcgccgggctccggcggctcaccgggctgtacctccactacaacggcatcaagggggctatacccagggagattgggagcctctcggagctcaccgacctttacctcgacgtcaaccacctgaccgggccactgcccgtggagattgccgccatggagaatctccaaggtgaggtttctatgctgcgttcttcagttcttgtactatttcgtctccaagattgcatttcttgggttgaaccttcgttttttttgttgggtagatggggtttgcatttgatttatggttctttgttttcttaaagattgttcggtacttcttcttgtttcttgtgatgcttttcaaataaaactggcataaaaatgtcgcttaggagaatggagcagtgaagccttccattttccacggtttcaaaaaccaatgatgtactagtagtctactagttccaactactccttggtttggtatataaatgctccatttttgtattccatttttcgtcagtttgtggcgggattttggcatgaatcggtacttttagttttgggttcatttattaagcatcagtacaatggttgatttttgaaatggggcagtttatctgttatcaaatccgatttgtatgtttctattccgattcttctcttggagcattgcgacagtcacgtgttcatccattttgatttgatttatcctgactgaactgctgcttggtttattagaaccccacttgtctctggtttagatttttgtggtaacttcaggttgaatcttggtacaaaacactttacagtgcattatgaacttctttgatttgatttactactcggctgtttctgtccaatgtttgtgccttttctgtaaataaatccagtaaagaacaagtgacattttgttcttctgctgccttggctccttccttcagatttcagaatctgcacatatatctcatacttgttgattaggccttcgtcgagcatgtgatgcttctgttcatgttttggaagtctacgtaccagtgcctgctgttccctagttgttaaagagtcaaatattattttctgccactagatctgtttcaaagattcaataatatgatacatagacttcgcaatggctcattgagaatcaaaagtatgatatgatgtggtgcagattttttatgtagcatttctttctcttttttgcagttttgcagctgggttacaatcagttgacaggcagcataccaccccagttaggcaagctcaacaagcttgctgttcttgcacttcagtccaaccagctgactggggccattccagcaacactcggcgacctaacacagcttgcacggcttgatttgagcttcaacagtctttttggttccatcccttcaaagattgctgaggttccattgctcgaggtctttgatgttcgcaataattccctttctgggagtgtcccagcaggtaatatacccttttattacctttcttgagtaaaacttttgctatgtttatatttatcactgtaacttgttgtctggatgctaggattgagaagactgaatggtgggttccagtatgtgaacaacaaaggtctttgtggagttggcttcagtttgcttgatctttgtttgtcatcggaggatggcttgaaacctagtaaacccgagccttttggcccagatggtactgtcaagacaaggcaagttcctcaatcagcgaatacggacaatcactgtgagggatctggttgctcgaaatcttcgaatgcatctgtgggagtgcttgttgttggtgtggttgcagtggtgattggcgccgcattctgcggaatatttgcattctcatattaccgccggcaaaagcagaagattggcagctcactggaggtttctgatagcaggctcagcactgaccattaccaacagaaggaagtttgccgaagaagtgcttccccacttatcagtgttgagtactcgaatggatgggaccctttgtctggtggaggcgttgggtcatccggcgaggttggtgatagctttaggttcaaccttgaggaggttgaatgtgcaactcagtacttttctgaggttaatttgctgggtaaaagtggctttgctgcgacatacaagggaattctacgagatggatctgttgtcgctgttaagagtctcaacaagacaagctgcaagcaagaagagtcagatttcttgcgtggcctcaagatgctcaccgtgctgcgacatgagaaccttgttggcttgaggggtttctgctgctccagggggaggggagagtgcttccttgtctatgattacatggttaatggttgcttgtcacagtatctggatgttaaggagggttctggtgctaatgtccttgattggccaacaagagtttccataatcagaggcattgcaaaaggtatttcccactcaagcattatcttttccagctttatcttcatttacctctgactgatatggccattcaagtattgtcggtgtcggtggtgttctaatgcttaatctgatgcacatttgcaggagttgagtacatgcacagtaagaaagctaacaagccatcagtagtgcaccagaacatatcggccgagaagatccttctcgaccaccacttaacgccacgcttgtcggtcccagggctgcacaagctccttgctgatgatgttgtcttctcgaccctgaaggccagcgcagcaatgggataccttgcccctgagtacgccactacgggccgattcactgagaagagtgatgttttcgcatttggtatcgtcgttctccaagtcatcacaggcaggagggctgtctcacagctgaaggtcagcacagttgccaatgaccttgatagcctgatcgatgagaacctcaatggtgtcttctcaagaactgaggcagctaagcttgctgccattgctgcactttgcacaagcgagacggcgagccagcgtccaacaatggaagctgtggttcagcaactcagcaactgccactgaagaactgaagctagctgatgatgggatatcttttggaaaccttcacctgaggtattttgtaagggtagtgaaagggtaatgatccagttgccactgacatgctagtgctgaacattttagtagtactgattaactagtcactctttttctaatgatctcaccatttcatggttagtgtatcactatcctttcaacattagaatgttgaaaactactgatgtgttagatgttgaacctttggttcggttgatcagtatgcaatggatgctgatttgtgaagccatcaggttcagagagaaattcagcatttctaatgtagcagctctggccagctttgtaacggcattacttgcattgaaatgctttaccgtaattcagtttaatgcctttaacaaactcacgaagaatacgtgatcagatgttgaattacggatgagaattttattgaccctgacatgtcattcatcattccgttgtcctataaatctgcatccgctttgtactgtactactactagaggatttctaatttagctgtgatcagctttgtagagaatttgcttgcattgaaatgatgtaccataattcagttaatgcttctaacaaactcacaacgaatgcgtgatcaaatttagaattacggatgcgaattgatatctgggcgttattgaccctagttggcaattcatcattccattgtcctgcaaatctgcatcttgctacatactccctccttcctaaaataaagagaataaaccctcttctgggtatgaatgttgattaaataaagagaataaaccctcttctgggtatgaatgttgatttagtgtctattcagagtgaaatgcaccattaataccttaactcacgaggtgggtgcaatttagtcacccattttgtaaaatgctcaaacaaacaagtcactcatcttgtttcgtgggtgcaaatcacataaaacatgtgtcgtatggagtgttcgcaatgaagttatatgctatgttaatttgtttacaaacatggtcacacgattcataaataatccaatgtgcagtactaccggtagtaaaattcaattaaagatgaattttgttattgatagccaagcataatatggtaatgttcattgaaagcaggagtagtagcatatacatggaaatataagtgttaatatgtaattttaatgcttatcctgtccacattggtaaaaaaatacatgatgctaggtcaatatggactccaatttaaaaacaaacaatccgtgtgaaaatgtatttggtaacatttgcaccatcgaagcaagatgagtaacttgtttgagcaatttgcaagatgagtgactaaattgcacccacatcgcaagttgtgataccaccggtgcattttactcgtctattcatattcatatttagaagtttttttttacggaaggagtggtagtgtttaccttaatgccttgtacttttcaatattggtaatttctggccttgtagaaatttttaagagcagtttttttaaggagtacagtttgacagaattgcaagatattgggagtagcttcaaaatttgaatctctaagcaagaaaaggacagttccacacatttatataccctgctctgcattttctgcacaagaagcatgggaatggcttttttctccttaccaacactaccagactgcccttgccgttggccattggccactgttcttctcctgtgccactgtactgctctgttcctcgtttcccttttctcttcagaagttgaataacctgtcacaaaaaaaaaagagaaacaaaaatcactactagtggtttgacaaaagcatgccaacactgttaatgcacaagtttacagggctaaaatgcaaacttttaaacatggagtacaaaaagccttgaaacatgtactagtactgtactactactcctatgcatcacttgcacatgacttgaaaattcaaataatattctttcttcgacaggggaaaaaaatcaattgtactcctactgaattgtcacaaaaaggcgaaattcagccaagttccaacagcacgagcagcagcagaatctgcccgttcatcggggagcacaacactgcaaagatttgtttaagcaagccaagaacaaaaggactctaaacatttctaaaacaaaaaaagagaaactaaacacaacctaatcaaaggctcaatcaccaaccactcccgcatttaatcacagggccattatgccataatcttgtctgctcagttattaggacaaagacaaccaatctttattgaactgagcagccattaacaatcagcagtccttgtttcttgaaacgagacggtctctcatcagccgcgtgctttgctgcaatgatgtttgcattgagcattgctgcattggcatttgaaatgtgtcccccaaagcttctcttctgtttgcatctcacactgtctcacaaacacactgtagatttgcagcgctcaaacaagacagcacagaagcaatagagtgtggcagcctagagagaagcagtactactcctcctccaggtctacagtgattttggtagaggagctgcgtattctttcgaggctgcaactgcaatggccaatggcaatggcaatccatacttttgtgcgtgtccaaagcggtatttgggatttcaattctctctttgagacttgagagttgagagagtaaagggccacggcgtgcaatctgatctgcctggctgtccgccatttggtggttcagttcagggttcaggctctagccagaattgacttctgccctgtttggtgtttctctctggaatcatgaccactctactgttctggttggtctaaggttgccgttgcattcgtcagtgttagtgaaatcccaacgtgagaatgcagcaccagcaatttgaatctcctcttcggccgagtttagttacaaactttttctttaaactttcaacttttccattacatcaaaactttcctacacacacaaacttccaacttttccgtcacatcgttccaattttaatcaaactttcaattttcgtgtgaattattgtttgaaatattatctggcaagaaaaagaactgatagaaagataggacatgcctgaatgagatgttcaattttgtttacatgctcacaaatcaagttgatgagaagtttcctgctgaatttcttgtcttgcttgctggcgctgaagggatttgcaactttgtcaatctctgagaaagtgtcttcttgggagaaggatggattgatactataataacactagtaaaatggtttctcttgctttgatggttaccagtgaagtgaagcatagggcgaaaatactggagcagtagtactttagtgtcacgtgtgcacatggtccctccattttagtttagcacttctgcctatcactcgcacgctgttgtatgtaagctacagctactatgagtaccacaggtccacagtagcactagcaaaaatatttattgccctgtcaatggtggtcagttttgtcacccacatttgaagcttttttcttaggaaaaaaaatcacgttttaagctatagtttctactactattagttagggtttgtttggttttaaggaaaaacaaaggatgcttcataaatattaatccctatatgttatttgatttgtaggaataagatataggaaaataaaagaaacatttatttcttacatgttgtaaagagaaaacatagaaaagcttccatccactcagagctcttgaaaaaaattcctattttttattcctatgaattgaaatttatccaaaccaaaaagcccttaacatgtttctttttctagtattactaactcacattttccagtttagcaagcagtaatatacgaccttgtcagtactaattcacacaaaacctgtgtattccaaatagtacaccaccagtgtacactactgcatgagttctacatgagacacagtagcctcttccatacaagagatgctgtactctttagtctctactatacagacgtcaaaaactgaaacacctgcatttgttgtccagtggaacaacagtagcaccagtgtttagattttgggaggcaaatcaaatgcagtctcgtttcgcttcacacattggcactttggcagcaacagcaaaggaccaaaaaaagatatagggaatccaaagcattctccctctccgtggtcatgcatggcttcatccatggaccatggtcaaggactccttggtgagctgtggccttcaagggaaatgtccttttgccccagtgctgtgatcactctgcattttgtaccagcggcagcaaaggttcccccagtgtggtccttcggttcaaggtcaaaactcataatatgtgcacaattcctctactactccatagtttttttatttgagggtcataggatctgcataataatagattcaataagactgacattgatttttttttacactttctactattctaattttgaagaaagaggaccacataatcttatttttagcgtgacatgcttgagggaaaaacagtacatgagacctgactgttttgttcgccttccgtcatccgacacagaattactgtttgaaaacaatgcagatttgcagttttgcaatcagataacagtatattacagaaaacaatgtccaggagagaaacaccgtagaggcaagactgaaggagtatcatcatgagtctgatggaccgtctgaaataaacagtttagtatagtactacaggatcatcagtattgctggcaaggcaaactgttgacaagagtaatttattgaaatgagtgtttcagggttgctggcaaggcaaactgttgacaagagtaatttattgaaatgagtgtttcagggtttggtcatgtacagtcacttatttatggtcgatacaagtggagaggacagagaaaacaaaacagtctctgccttcatacatcagacaacatgatcaagtaactgtgtcaattgttaaactgagaacataagcaaaagctgctaaactgaaattgctctgattgcctctgaattctgaaaggtccgtaacggaatcctgtattagttttcggctttaaactctccaaaacttcactggatatttcaagtgaggaactgaacattctgaacttatgatgtcaagcaacagcactttgctgctcaagcatctgtgtccactcaaccggccaccagtctggtttgatcgccttaactctcacatccctattatccttgatggcaaggcttgaattttgcttcagggcttcttcaagtctcagcaggcccataccacggctgccaagagcagtgttaactgtaccgattttcttgccagactccttgtccacgacttctgagcctggagcaacagcctgcttgagttctaaacaacagagttcgaataatgaattaatgagtctcacaaaataaacatgaaacactttgctaaattatttagcacacaatccataccttgcccattttcatcttcaaatattaatggcattaggcgtttcctaatgacaccacgatggtgtgtacgtgcaataagttcctgtccgatatagcagcccttctcaaatgaaattgcattcaagccagcaaaattgtactcaagcggaattgcttcacctgatttaaagcaagacaatttcaattaatgaaactaaacaacttcatatctgattagaaaaaatatcacaaaagttgagcaatgaccaaagtgatgtcatattacccccagaatcaaatattggcaacagaacagacgctctttacgtacttcaacatatgaataaggtcatttgtgcaagtttatcattgtgctacaagggaaccaggaaagctgctgtctgagaataaaagactctatacagtctatgcttctaagctatctcccatggaatacagaatgatggtaaataatccaccactgacaccagccaacaacaataccctcgtgtcatagctatacagatcataacgtcacctgaatccagtcgccttcaagttgttaaccttgtttgcaggatgcacacgctttctgggataatacttgttaaatgcgctaaagtagattatggaacctttgaaagaggttacaggagatactacttggttactatcaagttcatcgacttcaatagataattgaacttggagcagaatggttttgaccaaattggagacagtgaactagaaaactgtaatgcagtcaacagacatttatgcattgtagagacatcttcattgttatcaacatcatctctagacttggaaccataacaaaattaattaaaaaaggtataaatgtgaatccaacctttcgggatctcagttgagccttctgcaactccattctctatccgccagagcaagtaatggcgctcatcggcttctttgtcagactcaactagcggtgctgtggaaaacagaagagatcaagtgttcagatggatcttgctagatattgaatatcatgccacaaacagtaggaaacatcaggaacagattacttacgtatagtattagctggaaagattcctctgtaaccaaggcaatccaatctcgggtctttgaaccactcccaaccatggccattaccttgtgcagctgactcggcagcatggtcaacaccttgcccccatccaatggattgggcctcaggttcttgagtagaaggtccggtatgctccacattgcgtccaaatctttgccaacacaggaattccttactaacattgtctatctcaaccttggatcttaaccgatatctgaatgggcaaaatatcatcaggccataagatacttgaacggataaaatggttattaaggacaagagggatagatcactgattccaccgcaaaactgtaacacaatgtctctttttttggaactaggagagccaagctccccccccatttccattaatagaaatgagaattaccagtttacagaccaaaagaatccaaattcccagcttgcaggacacactacagttcatgacagaaaaagctataacacaatgtgatctcatgtgtcattatattcctcagctacaagaagatcctaattctcacgttctccttcctactggatcttaacaaatcaatcttatccaccacaactttagtccaaggggagctgcttcataggtgagtttgctgccaatggtcctacttgaaagttgaaactaaagtcgctaattagttagttcacgatattcttcagtttggaattagtagccttaagctgaacgcctaaaactttcaatactaaccaactgactccacacgagagcatgaaatgtccaaccaaactgtcatcgaatgttttaccaaatcagtcaaaattccaacatgacaataaatatctaagcaaagtcccaataataattaagccacccatcatgatcacagttaagttcagttttcagacttgagttctcgaactagcaattagattagttaatgaacttgcagggttctttctcaaattaatcctaactgtcaactcacggtctgaatttaatccacaatctctcagaaatggagaatatacactagaagttccgcattggagtaacagctttggggatttcacctcttgaagcaagcgagtagctcgtcgacctcggcggcgtcgacgtccgcgagcacctcgccgggctcgtcctccccctcatcctcctggttccccttgggcctctccccggtcagcggcgcggagcccgtgcggtcgagcagctgcgacggtgggggcgggcggtagaggaagaggtcgtagaggaacctcccctgcggcgtcagcagcgccgcgtacgccggcggcggcgcccgcgcgggcgcgttgggcgtgggcgcgtacctctgctgcgacgacgacgagaggaggaggtcgttggtgaggagcgagcggaggaagcggcccgcctctggccccgcgaagcggaccaccgcgcgggaggcgaggcggcaggccagcacccccggctcgcctccggcggcggcgggtgagctcgcgtgcagcaggcggcgggcgagcggcgtcatggccgccgggattgcgcgttttttgcggggttttggttggtttttttggggggcgaaatcatggggggggggggggggggggg

SEQ ID NO: 14804 - DNA, 16972 bp, Oryza sativa
gcaactaggcgttaattactctcgtttttagatgggaaatacgttaatttatggcgtgttactgcatgatcgcaaagatgatcactctgaataatctgcactgtacgtggcaagtgtgcatgcatgggttgtggtgcagactatttacatgagtggatcagatctgtgcactgttggatcttccgtgttcgatctgtgtgtgttctcatgcaactcaaaactattatggtccgagctgagcgaaagcaactgccgagtaacaactaagctacctgcatgtagctatatatacttctgtagtctgtaccgtaccacgtacgcacgtacaactacgataatatctctcggagggcgtatcagcgcatagccaatatgaggtgctaattaatatccgtgcttgtatacttcctctgcctcgttaatttgtccagtttcatcgctcgaaataaatttgcgtacagttacaccagaaatctaaggtatatactcctcatttctaaaatgtagggccagttcggtttggttccaaattgtgccctatcaattcattggtaattttcaatagtgtttctagttgtttggattggtgccaaattttaacaatacatctctttagataaaaaagttttgccgtctaaatttggtagtgccaaaaattgcttaaactttggcactaccaaaattttggtatggcaccaatccaaactgacccgtaattattttttaaatctaaaatagaaatgtagctatattttaatacgaacagagcaattactggcatcaaattgacgcagtacgttaagtaacatgaggtccttccgtcctttgctagtggctacaaactacaagttatacaaaaacaactagttatataagctgcctgtcagtcagtggtggtcactactacaagcacacggcgatagccaatatgaatggccagaaaattaggctagctctctgcattcacatacgtactgacgtacatatcccaatcaatacaccacgttgagaggctttcggccggcaattaagcccgaaagatatctgcaggctaattactgatcatatacatatcacacagggatattgcacaatcactgcatgccagatgccacattatattgccacatatacacccgggctagctagatgcttgctagctagctaccttttcaacctcatcgtcattaactattatcacgactactctttccattaatcaaaatgtatacatatcaagaacacatgcatggttgcattttggatatctcgatctctagctatatagctagctagctagcttcttaattagccggccggtcattcattaccttaatttgcatgtacaacgagaccaaaaaaataatgagtaaatgatgattcagttcgttcgaactcatcactcaccaaaaaaaaaaaaaacagcatacatgcaacgacaccagctaagctagctagctatagctccaaattaattaaacttcgccttcgttttcgtctacctctagctagggcgcgcgctaatctgcgcatgcgccgttagctagctccgacgatcaaaatgatcaatcgatgaatctcgatccggccggggtggttcatatttacacggtagtatccattgctagatcgagctaagctagctgatcttgccggagcaatggaagaaggaattaatatagctagtgtacagatgcgcggcggcgggttcagcgggtgcaggagtattggagggaggaggtgagggagcggaaggctacctcctcgcaggggaggacgaggaggccgccggcgccggcgccggcgaagccgaactcctcctcggcgcggcggagcagggagcggaactccggccggtcgagaagcgcgaggggcaccacgaaccgccgccgccgctcgccgacgtacaccgggaagtggcccctcggcacgtcggacggcaagccggacgccttcttcttcctcttcccactcgctgacctgcttctgctcctgctgccgccgccccaggctcgagcaccgcttcagtatctgctcagccccgccgcgccgcccttcttgatcgccacggccgccggtgagctcaagcttgctgtagttggtggttggtgatggtggtgacgaggaggcggccatggcgagggggtatatatagggagaggtgggcgaggtcgtgaggtctcgccgtggttggtgctggtggtggatgggcccgcggcgcccgtgggcttgccgggcctgggcctggtacagggtgtgggacccacatcgcaggtccctgtgtttttcaccttagacctagtaattagttgctagttgctactacctccctcccaaactaattacattttgagagaattaaagatagattagcaacaaacacaatttaacacaataacccaatttaatgaccacacattacctacataaacttgattaaaaggaaggtcgagacaataagcccacttaattaccattcttaaacttgattaaaaggaatatttggatcctttgtcagcagaaatttttttgggataaaatttaaatgatagaaatgtaattatttaagacggagataatactagatagtaatggtagagttgcaatggttgtgattagtgaatctgatctgataatggtagtccataatgtggtaccttggggagctccttgttttttcatttttcctttttatacaggagtttttgttgagtgctagtacgggcccattctttgaagatgaaaattgatggatgatcgccttaattacagggatggattaaatactatatattataaatctaataaataacttagaacaatttatttaagcaattctgatttatgaagttttcggacaaattatagttatcaaagcgtggcaatgcatatacaatctatcagggttaatccaaaaagagcgaggccttagatttagagttaaatgatgtaatgtctcattttaaatatgtaagttcagaatttcccacctttttttacttgtatgaaacatggtgattttctggcctttcgaattggacctgtttggaatatggtaatcttccaaccttcaattccgaataagtcaattttcatatccacatcaaaatgaaatatttccttcctacgttcgaggcgggccttcatagaatgttctagaagaaggttgttcgaagttatccaagaaggttgttctaagttttcgaaagtgaaaagataaaaaggaggagaaaaagttgtgatggggggctagctaaaatcctcgatatttccctactcttgcaatttgcatggtagagacaaggtcaacacactatagttagctagtatattgtaggatctaagtatcaatcaagtggcagtgaacataaaagagagaaagaggagctcaagtagtggggaagcaacttcaaggggttgacatttgacaaaatgacagtggaaaaattccaagtctcacatcaaagtgagtgatcaaaaccaccctttaatttcttctgctttttcaatgccctgcagccagtgttgttgcagacacgttcaataatggtccatgatccatatctttcaggtatctctgaccactgtacgtctgtaccggccgttgccgctgctgcatcctctacgcatcacaaaagatgcctagatagttttttacaacagtttctacttgcatttcatcagaaaaaaaaaagaagaagattcatctgtgtttctgaaagagaactacaacaagatttctctcctagttcaggttaatcaggttcaggagtcaagacttcaggtagcaattttcaactattgataatatttgaataaattattttattttattttatttaaaaaaatataaaactattaaccatgttaatttaacatatgaagtataaatttcgcatggatttgagatctcgagccgtgtcaaatagggagatggtaaagattacatagtgaactcacatcctctagagccgaagtattgcaagaaccaatagttcacatgttaattaactcaaaatctagtgcagcaatatccctcaaactgatgtaattaagtatcctcctagctaagtagctaggcttggctacttcagaactaattaatcttatctttattcagttaactaatctttgaatgatagttgatcaatcacagatagtatgtattatcagctggtagatctgcagggcaaaatataatcaagggccgccatgcacttgccactggcacttgtgtggttgcatctcatgataggtgatgttgctatgacatggctactgggcgtacggatgggtggccacccgtttaagcttggaccatcaaagatggggcactaactggcacactatgtcaggataaaaaggaaaataaaataatcatataattctagctatgtatttacatggcatgtaggagaaaagaaaaatactgtcctttgaaatcttcagaaagtgtcctttgaagtcttcagaagcctagctagctagctcgcttgcacacttgacctcatgctaatccatgggtttaattaattttggaatttaaaacccagtaaggaaattcagaaacaaagccatgcattccaagacaagaatgctagtcgcattcacaccttttaattagttagtagtaattaattaatcaattaactgataaatatcacactgcctgcttggctatcagcatcatgcgattattttgatgtaacatattgagataattaatcaccagacaattcttttcaattttctgactgaatgtcatattgtcatgcatggtgtggtggtatacaagcaggtcagcactaattatctgctttcctgcttgtgttatgtccctctgctgttgaacaagtttgtatgggctctcaaccaactggaaacattatgttggcaatctcatcacaaatcaccattgtatattatgctgaaaattctattattgttggaccgctatagtgtcaactcagtaatgatccatttatctgaaatctgattggaataatgaagtggcagggtcgttgctagattcttatcacctgacatgacattggtcgcggctagctgtgtgtttcgtatctaagacggctttgaaatagaattccacattggccatgtgagatgctacaaattcagacactgattggaggaaagagaaaaagatgatcatccatgccacttcttgattaaattatcttattcagaaatcagagttctggaatgaatactgttgaagcacatgcatgcatcatccattttaactttcccatcacatattcagattaaccttttctttataaaaaaatcactttaacattttgatttgatttagattattgagcagattatccatttgattgtagagataaaacaaacttaacaaatagcttaaaataagtgctctcagcaatacaatagaggtattttcttttgagaaaacatatttttttaaaacatggagctgtttcaataatccagtgaataagttgaaaagaaatgggcggcaacatggatggtaaaatctaagcgtggatctccatttgtctctggtcccttcatcaaacatgaatgcagcctgattgcttgtctgcattagcaaacaaaggcgagcgagcgagcgtgcgtgtgcaaccaccacactcacacgtacgcccgcacgtacgaacgtacgcagccttcaaggcctttgccccgaattatatcatggccaaacagtgcgacgcttcagtgatcaccagcaggtgcagtcaatgcagataccaaacaagcaatcagaaaattcagggttcagacaggctcacctaactgaccaagctttttagccaaacagaagggttgcatcatgcgtacttgaactaattaatcttgcagactctctggtcgatttctgaattaattaattaccagaagttagctagaacacctgttcgatctttcagaaattcagacttgagatgagagacaggaaaggaaactgaaggttaagctgtacaaatcaaactagaccgttctaacgaactgtcagaatttgaatgttcgaggagtactactgatggcagtagggtcgtcttcttggagaaaaacggtagctgctgctagctaggacaatgacattcttgatggatacatgatcagatgaaaatccaaaatcaattaatcagatggtagtatcatcatggtaggagtacaccaatacaccaagaattgaaagactcgatcgatcgacatcaatcgatcatggatcgttaatcaacgcatcaatcgatcgccatgcatgtttatggagatgctccaaacatgtcagtgttctgctccagttgaaaaactcttaagctccaaattaaaaagcgtactcaaactcttgatcttagctaatggcgatcgagccgtgcaaatctgagcaacaaaccgattccactgacgacgatgagtacgtctgtacgtgtacattgtgctgtcgccgtcgtcaactgggacggcgtacgtggccggccggagaggtcgccggccggccggccggcgacggcgacgtctgagcttccacatggcgaactggatcgtccggtggctcgtcgccggccgatggatgttgacgcgaatcattgggccgggagacagcgcccaaacagcaagttgcaagtgtttgtattgtacctacgcccccccgtgtgcatgccatgcacagcatgcatgcaaagcactcctgctgccatataatctcctcaacattatctcattatccatcgactttactaaacgaaatgaaagcttaatacgttttttgaagattatgtgaagattctgagaaactgttggtaagaatctaaaaaggctgagtttatccagcttcgagcttcaagttattgtagtttgtttttatattttgtaactaccgagacatgtaacttggaggaaggatgtggactgtttaagggaaattaagattctgagagtagctgtagctgctagaagctcctcgcatagagccatacacacgtctcaaatcaaatcaaggcttggttaattaattggggagaaagcggaactgcattatattaggcttgagctaatcatgagggttttgtcagcttcagcaattgaaagtgacttgtaaaagggcaggtatgattgaagcaaagcagcaagggacataggaaatcttgtgaaggttcttctggtccttgcaaaccagcctgtaagatttggaccatcgatcgatcaatcgatcagccatgatcagtggtagattgtcccacaccttgtaccatgtatatatatccatcatagattcataggctggtggttgaacccctgtaaagcaaccccatttaatcaatctcttactgtttgcaatttagtaatagtataaatgttgaatagtggcaagagagtaattccatttcagactttcagtgcagacattcagtcagtactctgtccggctatatatatccaaggacgatattaacaccatttcgttccagttgtctggttataaacatacatacaagttggcatacaagctaggaaagtcgatttgagtacaccttgttttcagttaaatttggaaccacatgatttttcgcaagtaccgtcattagaagaaaattcaagcattatagtggaggtggatggttctgtaaaatggtaagcgagacgaacaagtgtcctttttcccgcttatatatcacaattctattttattttccttcccaacttcatactagcatgtagaaaatggttagttcccaataaggagggattcgaggagatcgagggaaaataattctatgcctaattctaattcctcttgtgggtaggattaaccgaacaagttgtggataggattaacggaacaaggcctaaaccagttttatacagctaacaagattatccctacttgcagtcaagagacacaagaagtcaggaattgctaggtaggatctttttttgtggcaacaatggctatggactgtctaaattttgtcggcagctctaactttgagtgagcagcatcgctcatggccagtagcaaagcaatgcacattgcagacactcaactaatcttgcacagttgcactacgatgcctacccccttaggggactgtagcagcttgtgaatatataccagcacgggtaccattccccatttttcactcactcctagcacctgcttgaaaaagaatatggaacacactgctacatttcattaacgcaatgaccccagtagaaaacgcgccattgatttcattctaattgttcacatgaatcaaaacacatggcaagacatagtgagaaagatatcttgattgcaagattccagaacatttaatcagaatgcatgaaacaaaaaagattccagcaagaactgaatcggtcgttcagcacagtttttaactgttacccacactaagcgcgttaatagatgctccatgtcacagaatcaagaaacatagcacgtttttgagccaagaagatcagcattcagcactatttgcagagtcaaaaggagttaaactaagcaatcgtacttgttctagaatgtccatcatatagcagggcaaaaattaacagcttagatgagccctttcagtatggagtaaaagggccaatcagagaagtaggtgttctcataagatgaatgaaatcatagtagaatatatgcacaatgacactgcttgttagtacattaattgcaagcccaagggctaaggcaacagctacaatggaaatacagtgatacacttgttatcatctagttagagcgttgttatcagatcccaacatcttccttatgacagcacttgtagcaaattagccgtgcccaaattgttggccttgaactgaatgtacgacagcgaaattcatcgtcagattaaactctggcattatttacctacgcaacaatgctaatcagaaatacaagtaattttactgaccagaaacagctttggattgctgaggcattccatctatcatgcttaattgccttctcagcttagctatgtgagcttgcacctggagcaacaagagagttacaatgtcagagaagtggacattgttttaccccattcaactgttcatgcacaagcaattcctgttactattaggtactccctccgtcccacaaagaaaccatccctagattcccaatgcaagtttagtactgatgtgaaatgacctaaatgcccttcttcaagtacaaccactcattagtcatcagcacttacccacgaaaaaaaaaggaaagttaaaaatccctccatcgtcgtttgcatctgagccaccgacgacgaccctgtatgccggcgcgccaccgccggcctgcacgtctccgtccgccgcaagcttcagatccaccgcctcacaaacctctgttgttgccacccccgccgcatctgatacacgacgccgtggaaggtcgcaggcacagagagaaagggagcttccaagccgcatccatccaccggagctgcctcccacatcggatgatggggatccgccggcttgcaaccctccaccgccttccgagctgctgcgtccgggtggacgcggaatgtcgcacggaggagtgggagagaggagaagagagagggagcagggagtgggcaggacgaagcaggaacatgagcgaggggtgaagcaaggatggaggtcgctggagatcgacgaacaagagagacgagcagtagtattgaatgtttctggttctggacggagagaacaagagagacgagtagtactagtattgtgtgtttctagacggagaggacgagcagtagtattgaatatttctgggttttcgcgcaggagtcgattctttccgggacaaactctcactggtagaaattgattttttgtgaggcagagggagtaagtcagaattattctatgcaacatcccctatactggcatgctatgtaattttatttatagctcgaaaatatgtctatggttatatataagtcagtctaggcaagtgatccccaatgcgaaattttaccattttgttgcccttaaaagattattatgctaatatagtcctttagtagtgttatcattgggagatacagaacttaccctggaaagcgctttccagttgaattaatttggggaaaaaaagactcaacaaaagggacaactactagtttacaactgcttgcatgaatagcttaattatatgcaagggaaattaaaaaagaccttcttgaaattgatacgggatgtacaacttagccaaaaagacatttaccaactgaaattgatataagataactctctcatggaaatatctacggattgaatgcatgttacaacagactaagtagatgagaaagcaggaatacttcttgcagtattgacaagcatagtaatatatctcagagaataaggacaattgaatctcacctgttgccgagcagcagccagttttaatagttcatcagcttcagagaaatttgagaaccactggctcaaaggatgatccttagtgtcaccacgcttcttttcatgtggcacaagttccatagggcctagacgatggataattttgtattgccatttttatttttcccccaatgaaatataggtacaagtcatggtgccaagaaaaaaggagtacctggaggaggcaaggttataccaggaggcaacctaggcacagtagcagctggatgattttgtactcgttggaaaaaggcctcagtgggctcagggaagacaatttcatcgtacgtttccacgacaacaggctttttagttgattgtggtccagtgtcctcttctggatacagtttaagttgatgaaacctgcatcatttatgtagttaactaaatgcttcccccaaagaaatatgatgtttgaaacaagatctctgcaacttacaaatccagacgcttttcacacacgtcactgtggaaataaagggttattgcaatttcaaattctccccagccagattcagacaactcgaaaggtggttgctctacaactcttgttggattagtgaaactcgggtgaagttgaaacaccacacgcttaactatcacacttaaatcctcatttgttgcagagcgaacatacacagtccatttgtgagagttgtacctagaaaaaaagaacatattcatgccctttagataatattcactataggtagcaaactgagtacttgaggaaatttaacaataagaactgttcacagaaaaaaaaatacttactcgcttgccttcttgccaagccagaaagaaatggttccatagacaattgggaaactgatctccacatccttgagttttttattctgtgcgaaaaaatcagtaaaacaccatgtcaagtaaaaaattgattaaagcttattattaatccataaagtataccaactaactaaaatgaagcatatggtgtaacaaaatcaccctggatgattcacttaggcttcccaaaaaaacagagggtgaagtttgttggatgcttatttatttccttgttttcatacttcaagaaggtgactgtatgtttgatatcatatactagacgactaagcaattaattggtgtgaagaataagacatggtatgatgatgcaaaggaatgtatataaaccacaagctagtaatcagttaaacaatagatattctggtccactgtttctcaattctaactctaaaaatgacaaacagcagagtccgatgcagcttagctaatcggttagataagtcttggattgaatcgtatcctagtcatttactcgattgcacaattgaacattcataagatgttcactgcttactaacgaatgggcgtgatgtctacttcctttgattcacccgaggcaccgagcatagctactggtgtgccacccaaaaccctagtagcacccccacccctcaacgcaaaatcacaagagaagaatcggacgagcacgccactgcaaagggaggtaaaccttcttgtcggagtcttcgggcggcctcgtcggcttggagcggagcgccttctgcgcggcggtcagcacggcctccggctgcgcctgcggcggcggcgccggcgtctgcgggtccagcgcctcctccgaagctggcacagccgacggagaagggtccgccgcaggctgcggcggaggcggcgccgccgccgtcgccggcgaggaggaggaggcttgcggcatcggcgcggcgcgcggcgagggctcggtcggtcggtgtcgggtcgggtcgggaagaaggcgaggcgacgcgaggaagaagatggttgggtcggatcggtccgatgggcgagtgggcccagattggccggcccactcgaagcggcgtgggttgcacgcttgcacggataagttgggctgtaaacctgtaaagtgtgtgtagggttttggatgggcccggcccataaagtgagcggtgggctcaacgggtgtggggtatttttggccgttcagcccatttagacaaccacaggcccacgcttttggattatctgtagattgaggcccacagcttttcgcatacatgattaaccattttaacacggaataaggtcaccggaggtccctcaacttaacagtgagattttttaagatcccttaactacaaaaccagaaatgtgtacccctaaactctctcaaaccgttcaccggaggtccctcagcagtatttttgtccggttttgctgacgtggcatcctagtcagcaaaaaaattaaaaaaatgcgtggggcccacatgtcagctgcacatattttttttttctctattttgttcttctcctcttctctcttctctcttcagcgagcgcggcagccacaggcggaacagcgtgatggggttctcctccgtggaggcgatgagcacggccgcggctgtgacagcaggttcccagacccggagccaatgcgttcagccggagcagcggctgctacaccgacgccgcattctccgccgtgcgctcctcgccgccgcctagatgctgctgctgcgcctgcgtcgccgccgggctcaccgtcagcttctccttgatcgctcccgtcaataaaaatgtggacatcattattgattgctaggagcactacgtgcttgcagacggcgaacgacacgacggtgccggcgaagcccgccggggccgggccgcagctgaagctgctggtggacaagcgctcgcgtcgcgtgctgtacgcgaaggcgcgcaaggacgcggtggacttcctcatcggcctcctccacgttcgtctcgttcgtcgaggccgacgccgacgtctcgctggaggagttcggtgactcgctgtgcccgtcgatcccttgcgctggcgaactcttgaccctgctggatagcgacttcgccgtcgtcaccgaccggccactactctacgtgcaggtacgtacgtcgtcataaaacttgaataaactttgcaaattttgcaccatttgtattgtacgtgatttacgtgttcatgatgccatgcatctcgtctgaggtgtggcggcttcgtgttgcatcataggtgacgaggctgaggtgtggcggcttcgtgttgcatcataggtgacgagactgaggtgtggcggcttcgtgttcagcacccagatctgccacaacctcgtcgacgcggcggggatcacgcagttcttgcaggctgtcggtgagctcgcggaaggcgcagaccgtctggccggtgtgagcgagggagcccctcgacgcacgccacccgccgcattcggcgtacgaccaccccgagtacgagccggcgtccgacgaggccagcgacaagctccgtccaggcgacgagctcgtgcaccgcaggttcctcttcggccccgacgacgtcgccgcgttgcgcgaccagctccccacgcacctcggccccggtgctcgcgtttccttctcctcgagtccccgggcccagaccgccgcttttcgccgcctacagccgccgatgctgcccttccgcctgctccggccgcgtgccgccgcccgctgccgctcgcccgccgcttgccgccgttgcagccgtgctctcccactgaccaccacccctccacctgctccagccgcgctcgcccgctacttgccgcgtcggcgtcggcaaccgctagctccgagtcttggaacctgccgtcgccaccgcggccgtgctcgtcgcctccacggaggagaaccccgtcatgccgctccgcctgtggctgccgcgcttgctgaagagagaatcagagaagagagtacagaaggagaagaaaagaaaagggaaaaaaagtgcagctgacatgtgggccccacgtaatttttaatttttttctgaataggatgccacgtcagcaaaactaggcaaaaatactgccaagggaccttcggtgaatggtttgaaagagtttaggggtacacattttttgttttctagttaaggtaccttagaaaatctcactgtttagttgagggacctccggtgaccttattccttttaacaccgaatttactgatgcatctgaattcaacttctaccggtgatgattcttaagagattatttagatccgttctttaggacggatgactatcacggtcacggtctataaaagttactgtgtaattaggatttgttcatgttttgcttggttctctgtttatctttggagacgctcataggcaaaaaagagaaaaaaaaaactacagcttcctaaaacgaagaatataattttagacgaatggaactaattcccataaaaattccgtgaaaatttacccccttcaagagtagtagttgaactaccatgtgaactgtgaatttgtgatcgagcaagcattgtgcccgggctatcctagctagcaggcagatggacagagagatactagctagttctaaagtcgccgtggtggtggcagctatcatatcatacacgcacgtaccgttgcccccttccctcatcgccggccgccggcccggaaagtgacctcctgtacgctggaatgccggccgatatccgctggccactaagtagaagattcaactggatcgacccatgaattcatttatttatagatcaaataagtaaataatctatatgttctacatcatgattcggcttaagatgcaagtgactcaactcgtgaacccacttataacccaaattagtatgtaacccgcagtccgcagatcaattcataggttacatactaattttatttataagtggattcgcggatcgatccacttcaatctctagccccactgctgtgcttcgacggcgaggcaagccaccccgacaagccacgccccgcgcaacgtgctccctcccttccgcgtcagcaagacagcaatcgcgctaatggaagaagctgctgcattgctgatatgaggcggatggaggagaggagagatcatgcagaaagcgactctcatactcactttaatcaatcaactgccgtcgtctatcactgtagtacgcaccaactgttcctgcacttgcccctgtgcactgtcagctagctgctcttcatttctcatgccagttcttctcttcaaaacaattatgttttcatgtgcatgcacttcgtgtttcgattctcaattttggtctttatttatttttagataagtacaagcttttacgtactaattccagaagatacaattgtaccgagaacactcccggtctatatatagctaggataccattgtggtttgatatgcttgccatgtacatatgctcatatgagcagtactgcagtacttgacttgtaccagcagattcatatttcaaatcacgctcattgtcaagcggtccacggtacaatacaacaacgtcctttcaaattgctttcgtgaaatgccagttttatgactattaactaacagtgcattatacgagcaaaaccaatcatccgatcgagtctgcctggagcaggatacggaattggacgattgccctctcgatcttgcgttgccgttatggctacagttttcgtgacgattggatcaagtagccaggcagggaatgtcatgctcaaagctagatctgaagctaaccaggagctcagatcacaggcccacaatgatgctgcctcttgtttatgtgacctgaatatatacttcattgctgatctagctttagccaactgccaatgccatatgctaagctaaaaattcatttttgattctgtatattcggtgtgctgtgtgtgctggtccctagctcccatcctctgttcatgtgaccaactcaagtatctcaacttatcaaagtagtagacaagtactagtagtagtagctttgaatctctaatagagtagtgtatgtttatgttcaggatagcagccagatcttcttgctctaatcgcctttttctagatccgaccgtgcgtgtgcagaagcgcatgtgtgccccttttggagctcttgcgatcacccttcataatcatatctgcaaacgtgttcagagttttttttattcatgtaatcttgtagtactacgacattagcaatgaggtaaagcttcttcaattgctaccctctctcaagtgatttacatctttgtatcactgtatgcacagctagttaatttgttctggactttatcactgtatgcctctgaaactctgaatcttgatctgaagagacaaagttacaacacagtatcgacagtaatttgtccaacagtggtattgattggccttattaggaaaactgaaaaaggtcagactaggtcaaatcttgttctgtgttgctgtgcaagctagatgacatgctataagctacaaagtatcgagcagtggaccaacaaaaatccaaataaaatcgaataatctgcgtgctgcatgcactgcttggtgctccactcatcacgtctgcggattgtatgtaggaatattatcaaaagagctttgccttgtcctggtgttgccctgaaaacaccaaagaacaggggaacaaaataatgggcatatttttctgctgtatctctgaacatatattcccttgtttac

SEQ ID NO: 14805 - DNA, 2411 bp, Oryza sativa
aaaacaaaattggttcaaaggacaagaaagctaagactttttaaagcaaaagcccaccttagaagcaagtaatttgtcgcctccaggtatttgagctacttatcagtactcactacaagttctgtaggtgatggcacatatttcattcagttcacaatctgttattggtcatcaccatctggcaaccccaaccaaagtgctttctatgttgcgtgtttgaagggtgtttctggttttccgagatatgctctcgctttcaacatcaaatgcttactgtcttgccagttagacaaacacaatgatatcattacttaggcctaatgctatttataattgttaccatgttattattagccctagcagtaaacctaagctgttctgatgaactaggaatgtggtcctcgcttcaccctcaagctgctcaccttacaacatgggacctttgacacaaaaaatggggagtatgaatgggttcacaaggtactattattcatttaccgtcccatgcccacactacactctacatgaaagttttctgacatgctgcaaatcttgcatcattgcatcatttacagccggacatggacacgagcagaagaagatttttcttgtaatttagcatgggatcctcatgccacaccagatgaaatattagtgttgttcggaaattactgcatattcgttttgtgcacttagaatcgtatcacaaatgtaacagacctctatgcacatttgaagcaattttgatgatctatcaaatgagttgagctatacgaatcttggcctctttactatatggttgttgttcccgtatccagtatcttgcacaaaagctgccctttgttttgttccagccctaatatgtcttgctatccacaagatgtatcatcaaatctgctgccatacaaaggtcgttatcatccaactgccatgggattacacctcattgttcctgcccttctctccatccaagaacttatcattgctggccccatgttcttcaaggctgctatagccaccagcggcgccatgacagccccaggatcatcgtatccccgaggtatacctcttctcggcctgttacctactctggttataaatatttgatgtttaggttagataacacttattttaaaagtgaaatatttatacctgattagcctatatagtactctaacttacaagtagtaatgagatactggttggccattgcccatcaaggccgctgatcttttaaccctttttattactgcaaagtactagatgccactcatttaaccctttttattactgcaaagtactagtggatgagctgatggtataccctatacctctttctctatctttaagactgtaattacaacttgtgatatctgtggccattgcccattgctagcgctgttaaacttttgacaaatttcatgctgttactactgctaggtagtggctgagctctgatgagcaggctggctggcagatagctgcctgctgctgggtactgctgctacacatggcctgggggtcccatcctatccaagtaaggccatatgtttctgcgcgtacgtccgtgcaggccagggcgtacaacacagaggtgcgttctctctctccttctcttggtcgtcttctcttttagatgagatgagaggatcgcattgcaccgctagcttgaaagagaggctcctctccatagagtaattgccatctgaaattgccgccctgttgtgtttgcttgctaggtgggttggtcacgagtgcagcagtgcagcggcacatggcttgctccctcccctggccctgccatgttatctgctccagtttggtccaatgggtgagtgaagttatactgccacttcatctctgtttctgcagcatctgcatgctagctactaggtaaatgtttgttcatccctcttcttgaacactgtcagttagctgcatatacatgctcagttgctggccctggccatggtagatctcgagttacagctaaaaatcaccccttttatcttcagttttgaactgagttccaggtcactagaagtcttaaccatgcagtcaaatttgggtgagcagcttttatgcagccatttgggtattaaagtggatactggaatattagtatcgcgcacaaaagctaagcctggacataatttgggtgagcagccattgcgtacatgcacctacgtgcaactaggcgttaattactctcgtttttagatgggaaatacgttaatttatggcgtgttactgcatgatcgcgaagatgatcactctgaataatctgcactgtacgtggcaagtgtgcatgcatgggttgtggtgcaaactatttacatgagtggatcagatctgtgcactggtggatcttccgtgttcgatctgtgtgtgttctcatgcaactcaaaact

SEQ ID NO: 14806 - DNA, 8726 bp, Oryza sativa
ggcactatgtctgtcaactgacaaagtaataccaatggacgatgctctgctaacaaggaaaatagggtatccaccagagcctcttccatctttcttatggttgatttgcaagacggcaggtgtatctatatctgagtagaattttgcataacagatggaaaggatatcagggatgtttaattaagttctgacctccaacttctctagatgaatggccacatagaaatagcgcgaaagtatcagttggctctttcatggtttgattagcacctttgcagttcctcttgataaaataatgagatggcagcagtacatctctaaccatcaccaagatgattttgtttagactatcacattctttctgaggttgtttactcctcagtgctctctctgaaatgttgagaacaaataacaaatacagaatagaaggcccactgttcaaacattgcatgcaaccattttgtagttggatttgccttcttttcagtttcctgagaacgctttcttccacctgaaacaataaatatatgaaaattcaaaattaaggagcacataaagcatgaactctgtggcatgttaaggtgaacaacaatataaaatggctaaaagaggcacttaaccttaattgtttgactcaataagcccaggttaatatgaaataattatttcagattgttcatacaccggggaatatatgctgctgataaagaagcctggaaaagctgaaaattatgactgatgaagtaattttgataaaaatgtgtatgctgaaatgaacatctagcagaatgggagaaggccagaacagctaataccatcaaaaatgtgaatgacagaagaagctgggaaacttctgaaatcagtagcccgaataaagaaaaatccctcttgcaatgtagaaggaaaatacagaaggtcatataaacactaatccgataccgaattacaaacccagttgagttatatgtgtatagagtaggcacctcatcttctctagcagctgtttcttcagctgattgttttgccagatgagccactaccagctcttacaatttcacaatggcaagtacgtagttcgaagttcgtaaatcagaaaatgtgcctttatcaatacacagtacagaactaaaggtactgctgtatggcataatttactgaaaggtatacaaccattcccaaacaaaaccagaaaatgaaaactgaaattcagcagggtaagcagacatataacaggtgctagtcagcatacgacaaggatgaacttaagttaaagcatctttcaccaacggtcgaagaccatggtctagtgaacagaaaaaggggaaatcttccttcagaactctgcgccaaaatagcttcagctttgaccggcgatgtaaaaaaggatatgatctgcttctaattggcaacagacaagctctcctagtgttgaggaactttggaacactttgcaaagcagagagttctcatctttgtaggactaaaatctaagatagctgcacaaaataattacagcaattagaacatttctagtaacaattgtacacatgagctaaactcagagagaacaaaatggaaacctcatcatgcacaactcttaatggaatccatttgcgtgcttattgaatcatgcttgtgcaactaaccaccattacaactagtgaaaatatctcatgcagtcagataaaaaaaatattatgtggatctgagaaactctgccatgcatatcttctaacgcgaaacatgtgcttaaggaaaaggataaatgagcatgatcacagaggatatatctgtcccaaacattgtctatgcagtgctagaagcacttgttacttgtttgatcaattaaaatgtaatgccaggagtaagcaaaaaaaaaaaaatcgaagccagggctttgatcttacttggaataacaagaagaaagtttaatcaacatttgaccaaatcaccacttaatcagaacaagatttttctaagcaaattgattggattttgcaacttcagacaatcaagttaaattgcttatgttcaacttgctaatagctgttgatagcgtaattcttcttcatgactttgagtagtacacagtagtttgccttactttatgcattagaatagtgtgcctttgcagtccacattttaaacgacagaataatattgcaaatccatgatatttcaatttgtagagtgcacacctgctgcattcgggggtttgatgaatcatgggcaagtcagaaggcacatcaggttattttacatatatgatgtcctcctcatctggctcatctgcatcccagtcaccttcttcttcttctgatagatttgcaccttctccatcttcctcttcttcatttccttcttgttgctccctttcctcctttaatttgtccagtatagcaagatctatatatatggcaacaattagactatagtttcccaatatatttgagagatatgaaaaaaaaacgcttagtgcaatactgcaataattcattgtgtgctaatgcaacccctgcaaacattggattgttaagttataggttctgtgatgttaaagcttaaaaaaatgtctgtatttggggctgattgcctcgcaaagaccctacaggaagaagcttacgtctggtgtggtatcaatgaagcgtaacctatgatcttatccaaataaagcatatgggtacttgtagctataattttcaggtaaaccgaattgcaaacagccaaacacaattttaagtttaaacagagatgcaaaatactaacacaacttgtaaggtaacaaaaacaatgaccatgcttcttttgaactatttggatcttgatatttgataactatccgaggagcagtactggacaatcacatagtatagatacgttcaaggatgcatgtactaaatgaagataaaccagtgaaagcagatattcattggaacaggtagatagatgagtttagagtgtgtaccctgcttccccgctccatggactcatcctcgatgaaccgtatctcaggcgtgaggcgcagcttcatccgcttgcctatttggctcctgacgtacttagtcttagccttgagcccagcaatggccaccttcttccccctctcgtccccaaacacggagacatacaccttgcacacctacgaacaaacagtgaagttcagcatagctcgcacaaatttacaatctctctatgactcgctaagcgaggggaagcgtcgttggagaattaacgcaggaggcagtgacctggaggtcgttggagagctcgacgtcggcgatggtggtgagggaggagaggtactggtcggcgccgagcgcggcctcggggaggacggcgcgctggaggacggggtcgcgggtgagcatgtccgcgagctcccgctggatctgcttcgccaccatccgcacccgccgctccttcgccatgcaccgcaccacgcgcagcgacgacgccgacgagggaggcggccgcgcgggcgccagaggggacgcgacggcgaggcgccgcggcagcggaggggacaccagcggccggcaggtgaacatcgccgatcacctcgacgcgagtgtagcggtggcggtggtggcggtggtggttttccggcggcttcgcggtgaggccgtggaagacgatgagtcggggaagtgggaggggatagtgtcgtcgtgtcgaatcgaacaatatctcgcgtctttttttagttttgttttatttgaaagcattttagacgattttaagaagagtttagtgcaatccattttatacagttctggttgtaaaagaaaactccagcaaaatcatcttgcccattcaggccaaaattctacaaatttctctctgtaaatttcatcgtgccctggaaaggcactaaaaggataatacgattttgaagactattatctgatgtagatggagtcatagaaataagaaatctaataaaaatgtcaaatactccctccattccaaaatataaaggcataaccacctctaacccaaagacaaaaaaataattattattatcatctcgtagttttattatcctaataaatacaatgcatgtatcaaatagaattagagaacatgagagtaaaggattttaaaaagtaataatttaatagagaaatggtcatagttaagggcttacatgcatgcatgccttatattataaaatactccttccgtttcaaaatgtttgacaccgttgattttttagcacatgtttgaccgtttgtcttattccaaaaaaaattgtgaaatatgtaaaactatatgtgtatatgaaagtatatttaacaatgaatcaaatgatatgaaaagaataaataattacttaaattttttgaataagacgaatggtcaaacacgtactaaaaagtcaacggtgtcaagtattttgaaacgaagggagtataagaaaagtagttgtggcttatattatggaatggagggagtattttgtaggattgattccatagtcaaaccaagcaacatacagcccatgggcaccgtgcccacatcttggaaaggaaagcccatctaggtaaccaggcctataaacccggcccactatatcatcaaatgccacgttgccctagacgcttaaaccctcacctcccaaacgaacacacacctcaacctcccccgagacgacggcggcgacggcgacggcgatggcgaaggagaggaagcggaggcagcccgccgacgcgccgccgccgggggacgacgacgaggggagggaccaccggagggagaagaagccgaggaaggagaggcccgacccggtgctgccgtcgcagatcaagaacaaggacaagcgcaaggaggtgcacgcgaagctcaagcgcgagaagaaggcccagaagcgcaagctcgcccgcgagcgcggccaggccgcgcagcgcgccgtcgagctcggcgagcaggcaagcgcgcgcctcgatttctcccctccgcagcgagctccccctctcgaattcctccaagctttgtttcttaggtttttgtgagggttttcattatgggtgttcgcagccgccggagaagctggtgccgcggacgatcgagaacaccagggaacctgacgagaccgtgtgccggcccgacgaccaagaggtttgtgcacgttcttctgtgtttcttacttggattgatcctaccaatgcgagtttctcaattatcggagtaattgtaattttaatttctaattgtacattcgaacctgtttgactaatagtagtttggaatcaaggacatttatctgacagggtctccttaatgttgcattaggtttgtggaacatgagaattacatttctttggtagttaggctaggtatgcggtgaggttggggcaatttctgaattacatttctttggtagttaggctaggtatgaggtgaggttggggcaaattctttctttactagttatgaccagggaaggctatctggaacgtggtgccttgccgaggttaaggaataaggatgagataacgattataagtggatttagctgcttgcttgggggagtttgcagaagttcatgaggcttgtcagtgaatgagtgttgtgctgattcctgttattcactagcatagaacactatactatacagatgtcatgctatcatcatatcatgcttataacatgaatcagttaccagtatttatgattttaattaagcatgcaacttctacaagacacatcactgtgtttttctgccttcacatgcttgcttcgattgagttccttgcacttgttatacatattcagtatgcaacgtcaatgcttggtagtgctgcactggttgatgctgctgccttatattatataatttgtgcgtacacatcacgggtttttatatgctaagctgcaaacattagattttttttctagacattttactgctttactaagtactaagaagtaagatctagatgtcctttttgtttcatatagcaatgtgcactccaagatatcattagcatctcctttagatttattagtctatttagaatcttggtgtattatatccttttctgttactttctcttaggatgaacactcattcgatcattgtgattcaactttacatggtatcagatatcaaattatcgttcttctgtgcagctgtttgcagggaatgatgctgatgaattcaatgcagttctgaagcagcaaacaactccaaaagtgttgattaccacatgtcgcttcaattcaggcgtatgcattttctatgcttatcacctctgcttttggatttttgttcttctcaatatcttgtgctggctgttctgaattgataattatttgataacctctattcttaagaagttgcatctaacactttatgtttatctgcacatatgtctacagaggggacctgcctttattgaggagttaatgcaagtgatacccaattcgtgttatgttaaaagaggaacttatgaactcaagaaagtatgacatgttcaaagtagctaacctgttcatttgtttgaattagacacttcatatggactgaaacacatttctttttagattgtggaatatgcaaataacagagatttcacttcacttgttgttgtccacacaaaccgaagggaacctggtaagaatccatcaatttattagttcaaaatttgcacttgttatctgttatgacatatttattgttattgtgtcacagatgctctactgatcatcaattacctgctggtcctactgcacattttaaactatctaaacttattctgcggaaggacataaaggtactttatctgtattttctttatcatactagcaaaatgcctttgctatgggtaaaatgcacatgcttatttgaatatatgttattcacttgattcaaatgaatattagactattatataatacaagaaaatatcaagggctattttgtaagttgtgcaaatgtagttgtgggttggtgaaccaccaccaccgctattgtcttttacagtagtatagattatcacctactaactaatgttatattgttttcttaaataatatctactgaaactacaactcttagatgagttattcaaaattttgttggaaatggtaacctgtatttatttatttttatttttgtttttgggagaacttgttgaatagctttggtgttgtctacatatctttgtgctaacttagcatatattttcaccataccaaagggataggacagcaacactgttatccatcttctatgtgttctgataatctttgtatttgcattgtgaagaacaaatagtaacagctacttcagacaagcacaaattagtgctatttttgaagaatcatatgcatactatcttctgctactgcaaatctcctgtattagttagtttataataactgtttgatctgtttgtgtttttaattgtgatctgatcacgatatcctttgttcttagttttttgcacacatgtaagagtgagaaaatcccacggctgtctagatcttagcaaattgacaacaatatgctagttgggaactgtgattatgtcctctccagaaaaaaaaaagttaactgtgattatgtgttatgatgactgagagccaacacacatggctattttctgaattctttagatctaatgctgatctttaccctattaaacatttaaacctctatacacaaaaggaagaatataaaattatatgagtatatttaaagtcagatagtaaatgtgccattgttttattttcagaaatcttaaacacaatcttgtttttaccgaatgctatcaggaattcattagggacatactggttgtggtttggtatattgttatctgcaggaaaagagccttgcttgtgcataacaactccttttgagggtcttatattattgttagtaattagtgcggtggcctattggctaatataaacacatagtgtagttcagaagataaaacaaactttgatgatcacgttcatcacaatgatgaatatgaaaatgtcaactaattcgtaacgttgtttagatagttatggtaataacaatgattatatcatagctgcatatctgttattacaccgctaacctctttagactaaaggtgcactggaagtgaacaaagcccaagttgacatcaattggtcatcctacttgtctctagtttgtctctaggatgacttagtcatctgagctttgccctcaaaatcaaatgtgcatgtgactatgttcggtatcatatgacatgtctgctagatgctgatccatgtctctatccaacatagcatgttttagttttagtttttccagtctttcaatgattgtatatattattgcaattgcaatggagttgggttgataaccatgttgctgatggtcatctagattgatggaaagcagaaaaaaaatagctggaaggaacgtctttattctgctgcacctggactttgactaattttagtagcgtttcatatccagatttattcagtttatttgatatgttcttgttaaatgacaaaaggttctcagcttattttccaatattatataaatctgtttttgaattttagctttgcgaaccagttaatattcatggctttgtttacctttttggttgcagaaccacggcaaccccacaagtcataagccagagttagtgttgaacaatttcactacgcgccttggtcatcgtgttggaaggtgatttgtgaacatgaacccttgtgctcctttgctgatc

SEQ ID NO: 14807 - DNA, 1925 bp, Oryza sativa
ggcgaggcgcacggcctcaaggaggcggagcgcgccggtggcggtgacgtcggcggtgtagtcggggacctcgaaggagacggcgacgtgggactgggcggcgaggttgtagacctcgtcggggaggatgtggtcgagcgcgcggcggagggaggaggattcggaaagtcacgtattggaggcgcatcggggggcgcggcgtcaacggctgggagtgcgggtcgtggtagatatggtcgaggcgctgggtgttgaagttggaggagcggcggatgaggccgtgcacctcgtagcccttgccgaggagcagctccgtcaggtagctcccgtcctgccccgtgatgcccgtcaccagggccaccttccgcggcggcgcgagggagggcggaaccgacggcggcgcggcctcgccgttgtcgccggcggcgccgccgttggagtgctgcgtcgtggccatttcaacctgcttagatctggtgggtgggggacgaggcgaggcgaggcgaggaggaaatttgaggggaagagtgggcaacgagggcagggagtatttgtagggcccgcctgcagtgggaccctctacctgtatgtgatgagcgaagtgacgaagacgcaaagtgcaactcaacacgatttttgtagtcttctagggggtgtttggagagaggacttatgttttggagagtttatgtttttgagagtttagcctctctctcccaaacaccctcttacttacacaaacatatatttttaagagatgtgtgaatattatgctcactttatcatgtaaaaaaataacttagtgctggatataacacattatattactatgaatttagacatatttctgtcaagattcgttgtactataatatatcacatctaattataaattctcgtctttttagagagtatggtcgagttgaatttcatgtcgtgctagccatgaccaggcaacgggcactatgactttgtgagtctgatttttgagaaatcaggaaaaaaaactcaaaattcttgcaaacaatagcaatgttttttttttctaattacatggataacgcacgacaacactaacactaagtacccacacaccggcaagtcccaaagaaacgcttaaatggattaacggacaaaagcctcgtggagatcaacatttaaaccgtgcgaagtttccctaaaaaaaaacgtgcgaagtaaagatatgcactcgtgatccacttcttgggtatatgattattacgatagaaacaaaataggtaaatcatcaattttaactttacaggcaaattatgaaagaatgtgattaaaagacgtacaccctccattctaaaatgaatcatatccatatcatatagccccatcaattttggcatatcggaggaaaaagtgaaacgacatatttgtaaatgaaaaataatttgtgaataaaacttttatatacgtgttctgaacgatctaaaagcaaatgttgaaaaataaactacgatgaaaaaaaccccaaaatcaactctaaatttaagattgaaaattcaaactttggctgataagcgtgagtgaaaagatgaggctaataatatccatattattgctaggatgcctcaaacggaacatatcctatatagattaaaccgggatttgtttttttttcatatgattaattttctgaaggaaagggatgtaatttgggcttgggctgaccaaattgatagcaggccagatcaaatcatccagtcaattcttgtattaactctaggcgatatcagtatcacaaaaaggttgatagcatgcgtagcatagtgcaaagacatttaggttgttaatccgtagtactaattactaagcttcaaaatccacgaggcgtcctttgcctgcttaatccttccctttcgtgatcgcaactcgcaagcaacaggtgcaagctgc

SEQ ID NO: 14808 - DNA, 6446 bp, Oryza sativa
atattattaaagtggccaatgcaaaaattacatacagttagtattttagagttatgacaatccaatgagaaggaaacacagcaccaaacaagtatggagtagaaatctctctcagcaaaaacttcaagcaaagtctaaaggagaaaagttcagggcctgttcggtaggactaaatttggctgcaatacagccatcagctacagtactgcgcatacaatctctacagcagcagcacagctgcagaagtatgacagccagacaggcccttagtaatcataccatgcaataccattcaagaaatcgaatgagaagtctacacagcctttgaattcatgagtaatcaagtttaaaacaataataaataaaatcaatttgttaacatcccaaatagcacaactggctaccacaaataatctatcagcacagcgaaaagcatgagaacatacccaacaggcagaggaattggaagtgaaccagtgaactctccagggccagcaattttcagagtagatccaaaaagaatgttgcactcactgaggaatgaaacagtacagaatggccgaacaaaatcatgactatcaatatgtggtgggatgcaatctccagggtcatatatattgacaatacaactgtctggtatgcaagtctttggtagaacatgccaccgtaccaatctcttgatcatgatcttaaataagctaggcatcggatcagaagcaatagttcgaataatgcctggtgggtttccattcttgtcctgtcatcacagattcaaaccttagatggattcacatgtgaattaaatcagtaccactgcagtatcaagctgatgggatcagaggataaaactagagtatgtaccgtggcataattataacagcatccaaattggattgttactcgccctttaccacgcatccacctttggggttccgtatacgtacgatctgacagggggatattatgcttggatttagatatacaaaaatacaaataaacaaaacatggcaaataaataaatgcagctgtgagcccaagaaaattcatgtgcgtatagcatttgtaaagcagaaagaaggaccttggatagcactaaatagagtaggcttcccaatatatagtatacactcacccaaataaggatgagaaattctattccggtccaatggcctaaggtgaatcaaacaggcttaggtgcttcagggtactctaaagtgtggccatttgttagtgttatactgggccctcagtagataaatagtgcatagcttgaatattaaattaattaaattgaaaagaagaacgcagatatgtaaactggaatgaaggtcaggcatctcactcaacatgttacatttacttcaatcgtggttattgtggtgtgcacgactgtaagaagcacagaaaatcatgcatgtctgttttaatatccatgctgagaacgcttatgcagcatataagcaaagaaaccaaaaacactcagagattactgtaaataatacattgaaacatattgaggtttacacaaatggggaaacaccattatgacagaatcatgtgtacagaaaacaatgaaaatgttttgctatccgctacgcttctcctggacagacagatttcggcagatgcttctgattgtgtagtagggtgaaactgtgttatttttgtcaaatatggctgattatgttatgatggcaatacctataatttatcaaataccatatttatcttcctgcttgaaatcacaaaagctaatctgctacttgtggtaggtagatccaatgatttagtagaataattaccaaaaaagtttgtagctttgagtgcataccacatagaacaagacatgagaaaaccaattttataataattcttcggctttctactttgcacgagaacactatacaagttccagttctacacgatagaactactgtggtgcatatagacatctaaatgtttgcctatgatccatatccccacaactaccatagcctaagtagcaaagcatgaccttaattacagctaaaacctttgcctaaaatttacataatcctgacctaaaacccttttcatcaagcatttctcaaaactcaagactttacatgaaaatttagccaaattcaactagcgccatagaaaaacatatcgaatctccatgcagcttaaatctcacctccaagctccccgtgcttgcccatctcctgaagatcgtatacgtagtcgacaatacgcttctgttcggccgcgctaaacacaccgcaatgaagttccaggccagcgaggatattgacgagccgaccattgaccctctcaaaacagatgaaatccttcctccgcaccacgttccggaaccgcctcagctcccgctgctccctcgtcagctgcacacccggcctaccagcctcgctcccttcctcgccgtcatcagccgcggatgccgccgcgtcctcctctgccgcggcggagagctcgtcctcctgagccatgtctgcccacgacttccgcgggttctccgccggctgagggttctgctttgctgctcctgctccggtggcagctgcggcggatccgagtcccatccgctgggcttgaacggcaaatgctgcgggtgagccgtagccggatcggactcccaccccgagggctcatgctgatcgatccgcggcggcgggcgacgacggggattcctcggctgtcagagtcgaggtgaacgggggggcgtaagaggcaacagcacaaaaaccctaactacggcgaacccagcacacgggattgttaccttgcgggggcagcagggaggagacgcggctgcggagggagtcggcgcagaaggcgcaaaggcccgcggagaggaaggggagccacgtggtgaggaactccccggcgatggcgagctcgtcggcgttgtacccctgcacgagcgccatcgcgtcggcctcgccgccggcggaggcggaggaggaggcgtccatcgaagcgtctctcgctgccgtgtgggccccaccctccctgtgcctcgatgtgataactagtactagtacccctagcttctagttgttggtatccggataatcctggccgtccgttgtacgatcggacggtctcgctggtgtgtgggccccacctcgctagtgctctacttgttggtatccggataatcctggccgtccgttgcacgatcggacggtcaggatcggactcagcgaggagaagaggagaaaaatctcgagatgaaatggacgcgtaacctgactccgattcggatcccccaccggcgagatggcacgcggatccgccgccgcggcgatcgccggagttgtgtggtgcttctcctcctcgtgggggtggcgtcgggggcgcgtcttccgggcgggagcgggggtaaccgggggcgggagccgcgcgggggagcggcggcggcggcggtggccacggagacggcggtgttcgcgctgggaagcttctggaggtcggaggccgcgttcgggtgcctccccggcgtgatccgcacctccgtcggctacgccggcgggtccaaggcccgccctgagtaccgcaacctcggcgaccacgccgagtgcgtcaaggtgcggtgcggagactcccacgcttatagctgttcttgatcgataccatgaaccaatgatatgtccagttccatggtcgtagcaattcatttccgtagttagcatcgtaatctgattggccattaccatttcgtatgtgtaagttaaaaactgaaagaaaatactcgcgagttttcatttccatcgtaatctgttttttttgggttccaagtttcattttcattgctaaatagggatcatttccttaaaaaaacaaaaggaatgttctatgttcaacaaggacgattcatcctgccagatctgctttttgtgtgtattttttgtgcataaaccatcggaaatgtttgtccgttgagtgcttcattcaaatgcatgtgtgtgtgtgtggtgtaggttttggagtggtaaactggtattaatactttgcagggcctccttataaactaactttgttggtgttttatgagctaagatgattgacatttttgagtcatttaggttgaatatgatccccggttgattcagtacaagaaactttgagaggtcttctgggcaagtcatgatccacgagaggtctttgggcaagtaccagatgttgccaagccaatacaggtgcgttagttttattagcgcacccccctatgtgcaatagatcagtttgttcacagtttaccatagtcagctttacattcataaccaggtgacaattttgtattcacatgtttcatgtaaaacttagactggtttccaaaccagcatttagcatatggtggctgataagtttcacaacaaagcgactcagaattgagaggcgtgcagctcatttcctcgccttagtctctccagccccaagcaaggacctatgtgttcacaacgttgccatcatggcttaggaaataatgggtcactgcatggtgtagctgtcattctcactagtttgataggatcctcagacagcactgtaatgcgtcaattttaattcttgcttacttatgtggtcacagatccatcatcttcacaaatggatccgtggaagctagattggctggtctaagcaaagaaaaagaacaagctaaggatcgccgcagtgtcattaccacacagatccaaccaataggtgcattttatccggctgaaccggaacatcaggtagcaatcccatctgaaaattcgaactcaccatgacattctatggtttatttccttttagttattgcttgtactttggtaaaaatttgagctgaagcgcaagccgtttctcctgcaactgattgggaacctgcccgaggaggagctcctgacctcaacactagctgcaaagttgaatgcatacgctgctgagctctgctccccaaatacccagaacagaataaactccaagattgatgagattgctaagaaaggatggcccatcctaagagacatttagctcggtgttcctgggttttacatattaatatatcattatccaattgtgcatgattttgccgcaaatcttgtccagatgactggttgtggtcattccttggtcgcagcaatcactaattagcgttcatgtcctcctctgctcattttgagatctctctaatagaatctgcatgtatatccaaactttcgagttgtgtgatgtgacctgaaatcctgaatttatgattggttcttacagaacaggtgccgaaattgtatattgttactctggctcttttatgtgtaaaaatatatgatgtggattcattacattcttaatcaaaaacacttattcccatggaatgctaagaattgttcattcttttgaaaacaaaaatcacattttgttcttatggattttttttcacagtttgctcttcggaatgagtaatgggctaatggccacagtgaaatggcgccagcaacgctatactagatttttcttgatggtacaattgcatggaacacacaatctacaggtggaacataagaccctttttttgggaaacatttcgctattgttgcaacctcacacagctaagcagagactagttatttacatgctccatagaaggaagagattattttgcaaggctatttctcagaaacattctaaacaacaagtgaagacacaaatgcacaatggtcagaggccactaattgggttgctgcttgactctttttgaaaccgttcttggccaaaccatggcttatttcctttttttttccccattttcatcagtcctgccaaaagcgacgttggcctgtcgttccaatgcttccctcacaaaaaatttcaacctccaaagggttgtctcactctgcacccgcataaaaagcatggttagaataaacaaattacccaaattattacgagaggtaagtgtttggacagcacatataaaataccttgaccttccttatcaagttccagttcgtcttctttaactttcaaacctagggttgtcttgggcaaccatttccaatgccttataaagcttttttggaaacagggggcaaaaacctgcacccagtttttttttctcatatgtagtcattttcctacaacatcaagattttggcaacatgccacgtgcatgagtttgacagcagttgcaacttataaacagcagataattaaatcgataggcaacagatgaacatttgtaagatgtaccggcatttctggaccaccatttgccgaagctcctccaactgcttgttgatttcaatcagctggaataagaaaccaaagaaaacacacttaatatctaacatatatcagaacattagtacaaggaatgaagacaaggagttgcagcattttgtgtgtcagccttctagaaaaatcacaaaaaggtatatccatatgtcaggaactcaggatat

SEQ ID NO: 14809 - DNA, 7546 bp, Oryza sativa
gcttacaaacattcattcacctcattttcaactttaggaagaagctggagccatttctcttcaaatttctcaagcaatgatttcgccattatatgaacatcatgtcgttcatcattgtacttcattgcattggcaaaaattaatctaacatccgaatatatttctcggacattgttatacttgttgtcatctttcccttccattttcttttgtatggtcgaaaaatccataggtttggtgataatctgtaaataagacaaattgaaaacataaatatcactacaaactcatttcagggaggcataatatagtagtagtagatgtccaaatcaacactgcttgacaagcgcagagcaataaatatcacccaaaagaaaaaagaatgccatttaactgagatgtttatatttatatatagcaattggaggtctcctacaagctcccacgttaatgctattaggggggaagctggaacacattagcccatgaaaaaaggggggggggagggggggagtacaaataaccacattaatctgaaaagggaaggaaaagaaaagatgctaagcgttcatctgagaaacccatggatactctacaatagaacagatctactgtgtaaggaaacatctgattctgctagaaaaagaaaccaccgagtgatgtacactataagcataaaagaatcaatattaacacaccatctttgcatgtctgatttttgcaggattaagcaataaataaacagatagtagaagaggacaaggtagtaaaaaatgcctgacgcgacctgtgaaacatgaaacacaatccaaacacgcatagcacacatgtgcatagctgcgaatgaatccatgtttaaataggaaacaaatcaacaaagcaatcattagacaagagtacagcataccgtgcggtcatacctagttagcaagactctgcatagtcactacattgccaataaattaaacctacatggactcaaacacataggttctaaaaaggatgtactttataagaggtatttgcatctataaaaattaagaacgtgctgtactatcacaatattgcatatagtaggatagaatgcgtacatgattattatgtgccatatatgcagatggaataaatcattcaaaacatttgaaataaaacgggcaagaaactttacaatttagaactacaaaagtaaaaatatcaagggatacaagaattctaaaaattatctgaaccatcgaaatatatgaactctaacaagaaagaacaattataagttcaagattaatcaacagaccatctggcaacaaatgttggtgcctgagccaagaagagggtcaaaattcaaaatgcaattatttacaaataagtcagcagaaaccatgatagaattagatttatacaatttactgaagattacaaaatcgagttaacagtaatttattgccgcacatattcaaaccagaagaataaatacagaaaatgaatttactttccactatttgccatattgaaatgtttgaattaaaagcttgtgataagtttattatagcgttaatactaaagctttggtccaaaataaaatcaaaggttgtgtttgactgattagaattcatacatgcatgttcttcaacaataaacggacacatatacacacacaaaccttaaacgtgacacggtagataatttgttatagatgtataattactagctcatgtgggtgcacagattctgactagttcatttaatcggttaccaagaaataaaataagtgtccctaatattgcaggacacatattgccaaatctgaaggatgcatccataaaccattaggattgacaaatcaatgctgcattccaagagtccaacatcattttggtcgtctgtaatcctaattcattatatcagtgtggaacagtgtcacaagtcgaacaagcgaactcagggaagagagaagagggggttcactctgctagcaaatacaagatgaaatgtgctagcagtattaccttgtaatagtcatcaagctgaaggcctaccacatcaaccggcttgagaaatggctcggcccattcatgagatgtgatctggaagaaaaggaaatcaagaaaaatattgagtgcatatcatgcgcatttcatttggaaagctagtagtgtgttttgagtgtcgagttcaactacgatcaatcaatatgaatttgagaggaaacaatggagcaagaccatacaaatttatcagcatatcatcaagctagatatatctgtctattttgaaggatgttttctatacatggttatggagcaaaattagaatcaaaactagcggcagaaatcttaattaaactgcacttatttatcattggaaataacagtagccacacgtgcacaagaccggacaataaatagctttctagattttttttcagttagacctatcaggtacagtagccatgcactatccaaaattagcctgcaaattaaaagcttttgcaccaagcacattctgaagcatgattcaggatacactaaatactttgagttatccatgccagcaagcaagaacaacatagatcaatgcatttgtcggatttttcttttttttttttcctctcgagatgtggttaagaaagatcacctggcgcacaatcgtgccaaactggcgcataagatcaggcatccctttggaaaggctgctatccttgcgaccagccttccggccaccactgccatgtttcttcccgtcgtagaatcccaccacttcattcaccctcctctccagctgcaatccacataaatctccaatcaaacctctacgccccaattatccgaatacaataaatgcaaaacaaagaaaaaaaaactgtaccctactgtttccctaaccaaaatccccaaaaccgcatactacagcgaggcgagaaggaactcgaaaatccttccgctgaagaatctcatctaccaggctaagcagcgagacggactacttccaaggttgggggagttggtatttatttacctggtcggtcttggagacgaggtcctcgacctggcgccggaacgcgtccacctccgtccccggggccctctccccggcggcggcggcagtggcggccgtctccgccgccgccatagccctccctccctccgccccctgtgggactccacctcccggcaccatatctagggctcgccgccacgcgcgtcgccggcggccgtctgcgagcgaaaaaggcgaaaccaccggcgcctcgactcgacggaatctttttttttattttttttcctttttttttgccccgcatctcttcttcccttcaccttccgaccctgtgggccggatgggatgggccatttcctgggccggaagacttcgccctgcaggatgtgggcccaaggtggggcggatggaattgttgggcctagtcagcctcgtgatttgttaacatgggccggagaaaaggctggggcgaacggtacaggggccgtagggcacacgtggaataagttcatatgagttccttaacttgtcaacgaatccgatttttgtccttaaaccccaaaaccagatataacggtccctcaactatcaaaaccggtgcagataaggtcctcgacggtttagatggcgattttttctgacgtggcgcctacgtggctattttgactcggtcttcatctgacgtggcgcttacgtggcaattcgatccggaaaaataataaaaccagtggaccccacatgtcagtttcacacacaaaataattaaaaatggtgggacccacgtgggccccacatgtcatcttcactcccctccttttcttccttttcactccccatctcccctcttttcatctcgccggtggctgctgggaaagaagcagcgtgtgggcaccggccgtgggctccgcccggagggaggagaggagcggcgcgcgcgggcgtcggccggagagaggagagaagcggcgcgcgcgggcgtcggccggagagaggagagaagcggcgcgcgcgcgggcggcggccggcgagaaaggagccgcgcgcgggcgacttctccctctgcttcctctcccgccgcccctgaagacgacgacggtgacgggttcaacgaggagaaggacgagcacctcaccatcgctgccccgcccccgtttccaccgtcctccgcgctgcccaccgacctcgatgacgtcctcttcttcctcctctctccagaaacccacgggtcacgggaagttatgcggccgacggcggtggcggcggcaggtcatcagcaagtttttctacagtgtcgcgaacaacaacataggcagccgcgcaaagaaatcccatttgcctcattccaccacctagtgtcttcctaagaattttagcctgaaagtccatatttccatcgttacataccatctgcagtttaaggtaacaagttaacaagctcaattgaacagaccttctctatgaaggccgccgaaccaacatcaactgatccaacaggaactcctaagccttcatatatgcacacctgcagtgcaaatttccgtggaactacttgcaccgctcttcagcgacctactgcggcgtagacctgccgacgccctggtccgtgtagtcagaccgcatcttcccggaggctgtcacagttgacgacaagctcatcatctgcctcgatgacggcagtcctccacgatgatctgaaccgcggacgcaaggagcaagcgtgcgccgtcacggacgccgcgcgcgctggcgtggctcaacgcgaagcctacgcggtcggtggtgtacgtctgcttcggaagcctcacccggttcccgcacgagcaggtcgcagagctcggcatggggctcgctgactccggcgtgaactttgtgtggggtcgtcggggataagaacgcgtcgccgccgcagccagggtcgcctcacgccgccccttcctcttacgcccacagccgccggagcgtgcctccgccgccgcgcgccgcgggccgctgtctctccgtcgcgagaaaggagatagtaggagagagatgaactgatgaagagtggggagaggaggaagaaaaggagggctgagatgacacgtgggcccacgtgggccccactatttttaaattaatttgtgtgtgacactgacatgcgggtcccacaaggtttattatttttctaaatcggattgcccatgtaagcgacacgtcaatgccacatcagatgaagaccaagtcaaaatagccacgtaggcgccacgtcagcaaaaaccactgtccaaaccgccatttgcactggttttgacagttgagggacctgttgtatctggttttgtggttgaaggacggaaatcggattcgttgacaagttaaggatcttagatgaacttattccgggacacgttgctacttcgccagagagatcctcaacggctcgattgtcgcagtctcgcagagatcaaattgctggcaagaagtggcaagaagttttatttgcggtttttttttttttggcggggaacggtttctttagttcaagtaaatggtagtacaagtgctaaatgaggtggcttatatgttagctagatcgactactggcatggtattcatggttgtatctatgaacttgtaaactctgaatttaggaacttgtaaactctgaatctttatttgaatgaatgagcccaccttgatttaccaaaaaaaaaaatactcactagctgcttgatttgaatgttcaagtgggttgatagtgatggtgaccatgagtccatgaccgtgtcttggtgcccacacgtgacacgacagtatcgctctcgtagtcgtaggcgtacgggtataccaacttggttacaggatactgctcaacttggctgcctttgccaaataactcttcacatgccaaatttgcctatcacccaaccatgtacgtatgatgaactactaacttttcctctcttttttcaataataacttctaactgaccaaacgattgatatgtcaataagccatggacttgttattctggtttctgaagataaacatggaccagctttcaaggcctctttggatcgcaggtgccagatggtttcatctgaaaacgaaaggtaatcaaatgaatcagatctgggtgggcctgttaaactacagaacagaacagatgctcctccttatcaattctgatgatgcgtcggtggatggatcagtgaaagtcagcttcacagaataacagtgcctgactacttgtataatccggtgctccgtcttcataacacagcctgaatcggtgaattgtcaatacgcgctgtgccggtattcaacagaaagacaagtcaggtgctcatgacaaaggaaaattcattgaggacaaagtacattgatcacagaaccaaatgccacttgaacattttcaaagtcagatatagtaaatgcagcaatacgtacagtatgtttgtgatttgattcacaatcggtatggaaatattcatgtttgaaagtaacttacacatgaccatgaatttgtagttgtgaaatgtgaagaagtcttaccctcacaatattgaagatcatgggcaggacttggagacttgaaatgcatggcattacttcatttacatggtagggcgaactagaatatttggttcacataatcacattacagaagatgcacaaaaatgtgaacaggtaaaatcaccttgaaaagaaactttagttgcaatatgacaacagaaaacccataaaatcccaaatcaatcagatgttgcagatgagtgagcaatagctcatagtgtagcgtacagttatcaaaactgagatcttgcattgttcgacaataggctcagagaagagctgtctgaacaataagattgatgctaacttacatccaatggaaactatgctgattaacaataatagtacagacaatcatcatgtccttttcagttcctaagaagctcaatcctcatctcaaactcacaatccatgacagggacaccaaagaaaaccaaaaccccgccaaacaaccgttaagtattttggctgctgaaggtcaatttaccaccatagacaggatacaaagggaaggcaatacaatactcacaatgcttgtcctgaaggccattttgtcacatatgtcctcccgccttacatgcaagatacgaaactggtgctgactttttatcagatatgccatccgtaaacttcaggaacacatagtttagacccaccaagtcacttacctagatcaacaaatgagggcttgagtccaagatttccattgaactacaggccaggagttcagtacattctatcaacatgagaataatatggacagaagattcatttttccaattgtgcactaaccacatgttacaaagtgctaagagaatagagatggcatcgatccacgatacagaaggacaaatcttgtttcatagtaagacacataactacacatttctttgcaaatggcatcgactcgtttattattattatctgttaagaggacacagccatatgacatagtaaaacgtaatgaaaagcactatatgatcgatcaaacagcaac

SEQ ID NO: 14810 - DNA, 1207 bp, Oryza sativa
taccatgaggagtgcatgactacgagaagactcagtattcaacttcgtgtttgcagcaacacgatgagcctccccaatccttagaagatctacaaaactcttctgatctcgaacctcaactactgtagccccaggtaacgaaacatcccctgtcctcggatcttctacaatggctatattgtcatttacaggatcaaggaggtcttgtatcatttccatatacaactgcaataatacacgtaatatacatttactacaacgcaagaacatgaaagccatacgttgaaattggagaaagtatatacaatgccatgggaactcctagaatcacaaacctgtaggtaagatactgatactgtatcagtttcaggtgttatatctgccaaaatatcctccattgcacggaccatgattccccgtgcagcagtatcttcttcaccaagtcttccaagtgtaaacgttttcccagtaccagtctgcccatatgccataacggtaccattgtatccctccaaaacactctgcaaaatacaaaaaacactacattggtacagccattggtcagaagagaacaaacatgagtccactaatagcttgcgtggaagaaagtttgcagaaccactagctacaagaggactcaaggtttcttttacctcacagaattgggtcaaactttaataacattgcacaacctctagcaagattcattaaaagaaggatttctctgattatttcatcaaaaattaagaaaccttcaattgtaccaatattccatgctccagctgggttgtgttacacccagcatagtcgtatattccaatccaacattcaaaccatacttgtgttacaatttgccaaaagatttcattcacgaacaattgaaattatgaataacaaaaacaaggaaatgcgaaaaagggttcgactgtgtcacatacctctacaactgggtttgcaacaacctcgtacactctcttctgtgaagcaaactctgtaagcacttcatcaaattcatatgtttctgactcccagttgtttttacgaagctttaaccttttgagctttataaagaaatcatcaagtaagactgtgagcaaacacatgttctttttttgcattgcatgctaataaatcggagggaggggaggggagtgcaaacctttggctggggctcaacacaatcaccaaagtcagaatttgcagccaa

SEQ ID NO: 14811 - DNA, 2420 bp, Oryza sativa
actgcatgtatgcatgtgaaagtttattactgcatgccaatgccactttttcgttgggaatccgcggcttgtcttttgtctgaactctgaacttgtttgtctgaattgacaagggcagttaccattaactactcggtaatcagttggggatatttgggatgagcagaattgttctcatcagtttctcacactgactgaaagccgaaagctggaagcctgaagccctgaagcactggaggacaaggatgttttaaagtactcatctctccaaactccaaagctgtggaagcatagtagtagtaccggcagagaaagaatagatatagatagcctatagctatagatgatgagtagtaggagtaggagtacatcctaggactggatgagcgagtatcacacactgcactgacaagagagtgtatgtgtttctgcttgcagatgcagaggcagggcaggcaggagtggctcaaggctgatgttttcctgcatgcttgcttgctttggttgtgtctatctacgagcacgtttcgggagctgagattttaacaaacagtaggtaagtagcccgccgataaaaaaatatatatataaaagtaaatattaggaaagtaactaatatcaaataaatagaatggatgaggtttcgaacccaaaccaactagcccatcaccttgtgagaatagtccgaagaccgctgaacgtttctcttgaatgtatacaactactactgattctaagaatctaagagctgaagttgtagctaggagggtgtgtttagttctacgccaaaattgaaagtttgactaaaagtgaaagtttgaagaaaaaagttaaaagtttatgtgtatagaaaaatttttatgtgatggaaaagttaaaagctagaagaaaaagttgtaaactaaaccaggccaaactcactcaaacaaggtcagcagtctcatttttccatctgaaaaaaagtagtctcgtttttcctctgcctgtctgtctgtgtgtggtatgtgcatgcatgccctgcaggtttatccttctcaaccactctgatgaatgatgatgctgaccagtgaccactgctgggacccacacccacaagatggggcccttttcatgtggttttcagtttaattaatttcctaaagtctcctcctcttgctttccttgaagttggtgctgtgaaagaaaggccctacctgaatgtcattatcacactaacaaactgtgctcttatctgcttctgttttgtacttgtcggcagaacaagcagatgcagacatccaccttctactattcggccggatttgaagggccatgcttacttgcaaccattcaatttggcctctgaattttgaatagtactaggtcccaagaccctgaactaaattgtggcacttactgaatgatagaagctggagcttagcaaacaggttctttgttcatatgttcataaaaatgaagagtttatgatgatagataggcactgctaatgtttggagttgtttcacattttcatctgtttcagcaacgaaatcctgcagcctttgtgagaacagtaaatgtcaagcaggtttgttacaatctgtggcagcttatttgggctaccaagaaactatttttcgcctaccaatccccatctctcacagaaagcgttcattcatttttttctgacgaaacattctgcagtttttttttttttgtgtaggaagtacggtaggttgtcaccaccagggttgctttgagcctttgacctttgagaggaagagtacaagttccagtcccagttcccaataatttttgaagcttttttgaagataacaaacatgggccaacgcatacggaacatgtgcacctgatataactactccctccgtttcacaatgtaagtcattctagcatttcccatattcatattgatattaaatatgtctagattcattaagatcaatatgaatgttgaaaatgctagaatgacttacattgtgaaacggaggaaagtattaagtttgaaacagttgtgcagccaagaattcttcccctttggaccttgccctgtgatcactagcatgtgtactgatacagagagttcagttaggagtatcatattgcagaccacagcaacctttctgcagattttcaggcaacgaacacattatttaacaagaacattctcgcctgatatcacaaaatgtatgacgcgtctctcgatatgtttgacaaaatgagatcaccagaatggcaactagagtaccgtatttctcttatgactgctacaacattattctctcttttaagtccaataccaatggagacagcaaaacaaatctcatatctccacatgaactcctgttgatgaaataaagcagtaggatttcaaagcaggagtaatgaggggagaacaatacaatctaacacgtataact

SEQ ID NO: 14812 - DNA, 5132 bp, Oryza sativa
cagtagttcatcagagggttcactccgaccacctatggttaggaaaagcaagcttgtggttgtagacttggcggggtctgagcgagtagacacgtcaggtgagtgcattctcgtcgataaatgccatgtcttgctgcacttctatacctttgacaggataataaggctaacatacgcattgggcattaatctctcaggaagtgagggtcatacattagaagaggcaaagtctatcaacttgtccctaagtgcacttggaaaatgcatcaacgcgctagctgaaaacagcccacatgtaccagttcgtgattcaaagcttacaagattgcttaaagattcatttggaggtaaatacatgctaacctgtcatttggtctatgtaaaaatgaaattgtgccatagcttaggaggcacgctcatctttatctaaaagctaataaggagccaagagcatatccctgtacaactcattgcttgtaacacttattgttttttgttctaattgaggtgcttttcttgaaattcataggcactgcaaggacatcattggttgtgacaattggtccatctccaagacatcggggtgagactaccagtacaataatgtttgggcaaagagtaagtttttatgctaagataggtttaatgattttagattctcttgccttcaagttgcaaaaatattcattgacagaccatctcacgatttcatcgtgtatgctactgctgcgtgctggaacaaaattccaagttttttatgaagtgattaatgttttcttcattgtttcatgtataggcaatgaaagttgaaaacatggtgaaactgaaggaagaatttgactacaaaagcttatgtagaagacttgatattgaattagataagttaattgcagaaaacgaaagacagaggaaatattttgatgatgaaattgaaagaataacagcagaagctcaattgcgtgttacggaggctgaaagagaatacaaaatttctctagaggtttgctttccactataatgttttatatattttgttaggcttggtgcaagtgtttattcttggggatatcttgatcttcatgagcatgctatttataggaatcaatagtgcagtgactaaatatttgactttgttttctcatatacttttatcttttagtcagaatactggtcgtcagaagttttctttgacaaaaacccacagtgaaattgggccttacattgacaccataaaggagtatccaattttgatcttataatgaataagttaactattagtcaataccttaatcatgtcttgattcctcaaatataccgcccctatcatcaataattcatcatctatatctcaaagccttgagcatctttaggtgctcggctgctcgtgaattctcttaaagggccatctacaaacatacagcgatgtcagtgttgtaagctgtgagtagaaacatcataggtgattctagaaacatcatcttgtgggacctttctctagaaaaaaaaactacagaacaaaaaaatttatgtaaatttcacaaatagtctaaatcgcttcatctctaagcttcctaaatcctaaataatcattctagttctaccatgcttgattgaggatgtcttttttatattaattttttatatgcattttcttaatgcagaatgagaaagcgaagtaccatcaggaataccttgactctataaagatactggaggagaaatggaaaatacaccaacaatcacctaagaaactggtacatctttattttaggcactgactagttcatcagtcctcttattattttctcattgttggcctggattaatgtctgacttaaaaaaatcacttacattaactttaataatttagtttctcatttgggagagaaggggaaagatccacagggttgctgtatattctaacttaaagcgattgatgtgcaccaataatggggaaacatgtaagcttgacgctgattggcatgagagtctcgtgtttacattgtactttgttttagaggtttttaagccataacaacttatgttctgacgatttgccatttttccatcaacctatggcatttattttacatttttactgtaaattaaagaaactgaacctacatccagtgaggtaggaaaagtgcagaacttactgagaatgagaaagtgttgcgccaatctgctgaagatgaggctaatgaccttaagaatcaagtattacactggaaaaagatggaggtactgtcagtatataattgttttccgcctgtaataatacactaaccttgttttcatcttgtaggctgcagctactgctgaggttgtcaaactacggaaaatgctggatactgaagctagccaaaaagaaaaacttgatgaaaaaattgctgttctgaaaagccagttattgcagctaagtcttgatgctgatgaggtaagaattactggcggttccattttttttttcttactgatcattctgaatttctagatttttttagggccaattgcatatttgccactagtttgaacagatattgtgaatctgccattacaaaaaatgcaattgcatatttgccaccaaaaaacattggaacccatcatttctgccattggattgacagtttcgactaacaccgttgaaaggtggttttttttaaaaaaatgggacaaggatacccttgcaatgaaattgcaaaattaacatcattttagcatgaatgttactgcaccggagggagagaaaaataccaataatttgaatgaatatatgctggtgcctcttatctgtcgcctgtcgcctgtcgcccaagcctccgccacatgctgctgccgccccagccgtcggctgtttctgcctcttgcatttgttgccgccgccgccccgaccgccgcagcgcctgccgccgtcgctggccgcttgttgctgactcgtcgaaagccatctccactgattttcggttcgtttgctattgatttggaaaggatgagagaacttggtgatctaggggggagatcaagggagaggagagggagggttctggtccggtcaggactcggggcagcagaaaagatcaacttgacaagggcaaaatagtattatcaagttacattgatttttgtaaattatttctatcatcttagttggatcggtatagacggtagtggcaaacagcaccacagtagactattgtaggtggcagatgagccattcgcgttcttatgagggttattgagagttagggggtgaaagtagtggtaaatttgccattctctcatttttttaatgagatggttcatgtattatctgatcaatttgataagtagtatacctagtgatgcatatattctctcatattattgcctgttggctttgtagtgcataacacagcaaatgttaaagttaattaagtccatccacagtttttttgacttgcacccttcctattattccaattattccatttgtatgaaacacatacgtgctttcttgggggactgtttccaagattttagtgtaaggtctctgatgttctcttcttttgtaccgttcatttttttctttctttttagacaaggaggagcctcgacagaggagatggatctgggaaaatatttcctgggtttgattctttgatgtctcattcaaggaattctcagcctagagagcagagcaatggacctaagccgcccattgctaaactgtttgaacaaggtatgcattacttgagaacatatttcattcatttgcacctgtctttcagattgtatctttttatcctctagtccttgtaagatatctacatgtaataagaccattataaaaaaatgtgataaaagtttacctatgttattcctgtaatcctgtacataaataaacctgagttgtgattttgcttttggttatgatgatgaaagtttctcttcaactatttcagttgggttacagaagatactgtcgttgcttgaatcggaagaacctgatgttcgtgttcatgcagtgaaagttgtcgcgaatctggcagctgaaggtgcggtgttcatattcaccatgttttaattggaaacatggattttgttatattttatttgatgtgtcaagatttgcatttgatgtatagtatggttgtccgccatatatgcaaatttgatttttaagcatttacatctgatactctacaatctgcatgtcatgcatagcctatgttggatactgctgaagtgaagtattcggataatataaacatacatttgtcgcactagcagttgcgtcattttaaatattgatgccttgatattacaattatggaacccgatctcagtttaacttgatacacattgcttcttgatcatgttatatcaacagcatttgatgcgacttgcaaatgattgattctattcacttttcttctctgagctgcaatcatgaattaactgcggttgcatttgcgtatttcagaggcaaatcaggaaaagattgtagaagcaggtggccttacttctctcctaatgctgcttaggagctccgaggatgagaccattcgcagagtagcagcaggagcaattgctaaccttgcaatgaatggttagtaggccagtagtaattcatgaaagagggccttaaatagtgattatatatctgtttgtagaatgtctcttatctcattgtgtcaataatatatgcagaaacaaaccaagatcttatcatggcccaaggtggtgtaagcctgttatctatgacagcatctgatgcggaggacccacaaactctaagaatggttgctggagccatcgccaacctttgtggcaatggtaaactctatatttctgcatgtttgccattcaaggagttagtaccctaacaaattaatatttttgtctggttggctggcattgcacaacaccgaggacattcaatttaatattaactatccctgctatgcatatacgtgtagctttaagttccgtgcaaaggagaaaattgttgaagtctaaattttggttaatggccacataatttttgttgggagcaaagctgataagactagtgtgggagcatacaaatttaaagagaaaattaataattttcttggatttaaaacatattcccatccatatgactatgtcct

SEQ ID NO: 14813 - DNA, 11817 bp, Oryza sativa
ttcccttatgtccctttcccttatcgtactttggtatgagtgggtgacacattccacatttcaaagatgccatgcaagggacattttctgcttttcagattgtaatggcacataggcacatagcttgaacttgctatttccatcttatgatcttgtccatgagaccataactgagatttccttttctagctaaaggactgatgactgatgatactctgagattagctattatgcagttctcattatcttgaaactctttcaaggaaacatatctccatgctgatctaatttgacacagtaaatcttgtgaccgttaatgcagttctacataattcttgtcagaagccaaatttttatgtataatcttatgccatcactagaattgttcttcatgttttaaccatgtctttctaactaacacgttggcaattttatttcatcaggaaataaggtgggaaaatcgttattaattgatgatggtgcgcttccctggattgtaaaaaatgcaaataatgaagctgctccaattaggaggcacattgagcttgcactgtgccatttggcgcaacatggtatccctctctctcgttgcttgcaacattgctccttcatacactccgttgttcatacagtatgtacatgtaattgtaaaactatacgtttattatacttatggtgttaattttacctttctgcagaagtaaattcaaaggatatcattagtgaaggtgctttatgggaacttgttcggatttcaagggattgttctcgtgaggacataaggatgctagcgtaccggacattgacttccagccccactcttcaatcagagatgagaagattgcgcatagaatgctgataaccgactatttgctgctggttcactgcttggttttacattccgccctcacaatcaaggtgccattgcgccaagagctggcaatcaggcatataggtcatgatttacccaatttttgcaagcgtatgggaacctgagttttcatctcgacaggtcccctgttctcctcaagagttttatattttcgttgtgctggctgctgagaagttgaaagtctgggttgcaattgatttattcattatggtaggggttcgtattttacgttgtttgtaaaattgttgtaaaaatatcagcaaggccaaaaatgagagctgttatcacttagagaccgagagacagcagataggtgtagatttggccatgaatcataatacttgtattcattgtacagtagctgatctttactgtaagtctgtaacttattactgaaaaaggcgtgatattagttgctactctgattacctctgactcgaactgtaccaattgtactcatggcatgcaagggatggaaggcttaaggctgaatctgaatagcctgacacgtgtgcgtttacccatgaaattcactcttccatcccatgcatgattgtagtttttggaggatttgcgttgaatatttgtttggtcagtagaaatatggacaggcgaggcgcagacagtggtaaaacactgcaacacgcagagttcgaggacgtagattgtcgcacggttgcaagcagaacgccgcggtcgctcgccgtaaatcgatgaaaaacctaccaacctacctctacggctctacctgaggagggaacgaggaattgaggagcaaccgaacaaacgaaaagggaagaaactcgcctcctagtactctcctagcacagcaaatactacatccgtccaaaaataagtgcagccgtagatatccgtgcccaacgtttgaccgtccgtcttatttgaaaaatttatgaaaaatttaaaaatatttagtcacacataaaatactattcatgttttattatctaataacaataaaaataccaatcataaaattttttcaaataagacaaacggtcaaacgttgaacatgaatcgtgtaaaactgcacttattttgggacggagggagtacttgctgtgctaattaattagcaacgcggctgcgctgcgactgcgagccgagagagacaggcagacacgcagtgcgaaggcagcggtgtacgtcgtcgcgtagcacggcacacggcagacggggcgcaggacgcacggaggctggcgagaggacggacaaggtcagcagcgtgcgtacgtgcgtgttttgtactacacctctttgctgttgtgagttaaaacaagacgaatggcatgatgatgatatgatgatgagtcgtcgattatccttgagattttcagaggtggcgatcgatggcccccttgccccctgaatataatcctgatgacctgatcacgcacgcacgtatggtattgcacgtcaaagatcggtaggaccaacgtccaaaccttgaaaccctgaactgaaacacaggccggctcctacctaaattaagttgttggtagcacgtccccggagacacggctctcctccatcgagcgcgatgcgcccaatgaccatcagattcttccactgatccgctagctgcgtactcatattgcaccaacgcgcacgcaacgccttgccggttgcggcctctcctgccactgagacggacgtagtcgtagtcgtcgtagtggggggcaaagggcaaaggagacgacggggggccacgaccacgagcggcgcggcgcgaggattttataaggcgcgggcgggtcgtccaccggcacctagcgtcgctgtggtgacgagacggaggctgaactgtccgcgtcgggggcgggcggtggacgacgtggacatgtcacgtcacatcatatatatatatctccacaggatcatacatccatcgcgcgcagcctagctaccaccacacctgatcgagccgagccggcggactcgaagcatcacccaatccgtccgcccgaaacgggccgagatttttccgcataatatcgagggttgattggatccatattactacaaattaaatataccatttcagataaatgacactactatttgcgatattggctgcgtttactataaaattttgaaaaagtgaaaccccacgccatcgccatgacgttttccatcagaccccgtagacgtgggaaccacatgtcagttccatcttcctccattctccctgttctttcttcccatctcttcctccattttccacgtctaatacgagggacaacgatgttggcggttcctgagccctcccgctgtggatggggttgaagacgatggcggtggtgcctcctgagctctcctgccacggatgggagaaggccagcgatgacgacggttcccgagccctcccgccacggatggagtcaaagaagacggcaacgactcttgaaccctcttgccctggacgagagaagttcggcaacagcggtggcaacggaaagagggagagactgacaagagagaggtaggggaaagagaagacaggggagagaggtgaagaagatggaactgacagctaagtcgtcccacgtgcagttaaggctaacagagatttttgacatatatcgcgacggagtggcacagttccaattttcccaaattccagtggcacatgcatgccgatatcatgaacaatggtggcatttatctaaaatggtatatttgtagtggcatggatccaattaaccctaatataaaggcgcaccaaggccccccacatactctttcaatctcaaaataaaggctatttttactccccttaagttttgtcctacaataaagatatttatttacctacctacctcatctattgttcctcatttaattaatttcttcatccatattttcttctatcaaggcccccacatactctttcaatctcaaaataaaggctatttttactccccttaagttttgtcctacaataaagatatttctttacctaccaacctcatctattgttcctgatttaattaattttttcaaccacattttcttctcagctaatcacaatatataattttggattaatttcacctactttccttaataccttgtatccaaaactctgcaaatgattatatttgggacagatgtgtacgtagcatgtcgctagctagaagtactacctgtatcgctatcagccacaggccccctataattgtccggtcctacgtactccctccgtctaaaaaaacaaactctagtttccatatccaactttgactgtctgtcttatatgaatttttttttataatttgtatttttattgttgttagatgataaagcatgattaatattttatacgtgacttgtctttttaatttttttcatatttttttaaataggacggacggtcaaacgttggacacggaaaccaggtctgtctttttttttttggacggagggagtactctccatcgacgacgcaacagtaagtggcagcccaaaccctgaatgcatatgtacaaacacgacggggggcgaaagcgacgcgatatggcatgcaatttagttccctgtctgcctcgttaaattggctacatatacacatatgcaattatttttttgaggaggacacacatatgcaattatgcatcatgcgtgtatagctttgaccgatcgatctcgattggttggtcggtcggtcccgatccatgaaattatagaacgagaccatgacaagaccagatggggttcatatatatagcttcaaaactaagttattacctgcagccgttcattctcgttcgtccttggatgcaggcatatatagctgatactactctacctcggaacagagaatcagataagtatatactccctctgtccttaaatatttgataccattaactttttaaaaaatatttgatcgttcgttttattcaaaaacttttgtgaaatatataaaaccatatgtatacatgaaagtacatttaacaatgaatcaaatgataggaaaataattaataattacttaattttttttaataagataaacggtaaaatatatttaaaaaagtcaacggtgtagaatatttaaggacggaggagggaatagattacatgcatgtaacgcagtactccctctgtcccataataggtgacgtttttgactttttatttgcaacgtttgaccattcgttttatttgaaaaattagtgcaattataaaaaaagataagtcatatgtaaagtacttttgataataaagcaaatgacaaacaaaataaataataatttcaattttttttgaataagacgaatgatcaaacattaataaacaaaaactcaaaaagacaagtaatatgggacggaggtagtacaagaaactatatatatgcaggccggccaattaaggtcgtcgtctgatcgtctctccgttgccgacagcagcgagaggggaggactggtcgtggccacagcctgacgaagacgacgacgagtcgaccgatcgccaaacacacaactgcactcttgcaggggcaggcaatgcagccaggcgcccatgctgattttgaacggccagctcgatcgatcacaaaattaaccaagtacgtcaatgcaaaagcatgtactacatgcagatgcaggctctggatgatctgaatgcatgcgacactgcacgacactcatcatctgctgcccgatctgcatgcctgtcagtagtgtatctatcgctctgtgcaggtaccctgtactatactgatgatctgatcgatcgatcgatcgatcgagaacatatgtacatccattcctcggttgaatctttgatcaacttgtacacgcagatgcagctacaatctatcagtatatatatactactcctatctatgatctatcagccgtggaccatatgcacgctggctgccggccggccggcgcctgagaagagacaagctgtacagctgcttgaagtaattgaagtttgtctagcttgaagctgagctgaatgcctgaaaccctgaagcaagctagctaggttgcgtcgctgcaggccggctgcagctaaactaggagctatatatgtactaggtagcactagcagcagctgctgcattgcgacgtcgatcggagaggggacgggcatgtgtaggggtccggccgtcgcgcatgccgctagctgctgggaggaggcgcagtcatatgcatgcatgcaaacacacatactcagctcagattgctgttcatttcactgttcgatccatccacttttcccatcttgcattgcccttgtgggccggggcgaggtcgacctagctccctctcgatcgatctcaccgccggcagccaccacgccatggccgccggcgaggagatagctagctgcaaatcgcattgctgcaggtgttgctgctgaaaattggagcggtgattcgatcgaagagttctattaattgttaattgggatggacggctagctgagctcctgttttaatttcttctgaatcattgatcgaaccgaatcaataatactgctcgatctctcgttggttcgtcagtaattctctttcctgcagtacctatcaagcaaagcaagcatatatgaatatgacacgctgattggatataatattacacagcatgatcgagcatgttgatccagtcgtctgctagtgcatgccaatactactgcagtatcatcatcgacactgccgttgtttcagtactgtaatatcgacctatggattgttgacctagttctactgccctatatatatatatatatatatatattgattctctctttggatttttcttcagaagaaaatcagtgtcgatacgacgacttgatcacaagcagctgggctatatgtgatgctcacgcatcaaagtgcgtgctcattcttttgttctgaattaacatgagcacaaaccaaaatatatatattcttgctagtccagctcgcgtgatatactctacttctttggatcgagtatactatatactactatatcactgtttctctatacctttttaaatatataagttctctatacaccagaacatataaaattaagacagaagaactaatatataattcactccaagttggcggcaggatgaatgagagccacagaaatataattatgatgcacttgaaaaatacacctgatcatcagatgatgatgagtagaaaaggagaagtgtcagtgtatcgagatcaatcgatggaatgcacacggctggagaagaacatacctcaaattttgtcaggttgtacccctaaaaaaatgtcagatatagctgtgctgatagccactggtacatcaagtgcgtagataatacaaaatgtggatgaatggcaacgaccaagggtcaatatatactcaatattcatgcatagagtgaccatatagacacatctactactgctaaaaccattttttatgtgcggataaaatcgatttccaccaatgacagctctgggtgctcctcttcctcgcttgtggtgatgcactgaggttggtgtaacgagttcgctatggcaggagactaggagccgtggaaagagcggaatttcagggttttcgattactctctctctcttgttagtctcagcaattctggaggccatcctacaggaagattgtctgtggtcatccactggcgccgctgcttttgggggtttattagaagtatagtggggctcagccgccaccctcctatagaggagcagcgtttttccgttttttttttactttagcagtccttttgtttctttctattttcccttgtccccaggcaatggtcatatgatcggttgcgttatataacaaaagctttgctttcttctaatatattgacgtgtaatcttttgtgcgttcgcgaaaaaaacagccagagacaaggagaaaaaagataaaagaaagtgtgatgagaaaaccaacgttgtcctctatatattatatttattggaaagaagagaagaagcagaggatagaaggactagtggtaatggagatgcgaccagcgtttgatcgacggcttgatttttgaagcgccgatcaccgaagagttgtgaggaagacgacaagacaagattcaagcagataaataggagcatagcctggaaaaaataaaatttcaatgacggccagcttaatgtcgaaataacatcatttccacgagcgatcagcttaagtgaccacttttaaaaatataatttttgtagacggttgcttaagacgattgcctttgaaaaatatttctgctaccgatctttcacgcaatgacacacccactactctttagatgtactgcacaggcagtggcactatgccgcctgtgcaattagggggtgcttgtgaaaaccgttttttctactactcctccgtttcatataagttgtttgattttttttctagtcaaactttgttaagttgacgaagtttaaagaaaattcagcaacatctaaaacaccaaattagttttatcaaatctaacattaaatatatttagataatatgtttgttttgtgttgaaaatgttactatatttttctataaatttaatcaaacttaaaaaattttgactaagaaaatattaaaacgacttataatatgaaatagaggaagtagtagtgatcatttgatcgactggaaaacctaaatgatcctacatattgcattgacaaagtgtatcccatcgtggtaggatgaatctaacaaatctttatcatggaattaatgctaatacaaattgataattcgcgacatttttgtcaaggagtatttttctaatctaaattatctattcgggttccggtagtcaatcccctccatatttacattacgtcatatatacaattagtttcctcggcatttctgtggttctgtcttcaagtcaacaaaatccttgcatgcagagaaccaagctagcacaatcgtaacgggaatcacactattatagtacatcatatctctagtgatatatctctctcatgcattcagtataggtcaaagactcaagacgacccaaaaatagtcttctttcgcaagaaaataaaatgccacaaaggtgtgcaccaataatagctgtcttcagtcaaaacccatcactactttttttcttttagtttgaagaatagaacccatcatttacatatatagatcaaattaaggttacacaaagtgtgctaattaaacatacattgtcatgcatgatcctcacaaacaaataatatgtataatatatagcatactatctctatttttaataggtgacgccgttaactttttaacacacgtttaatcattcaacttatttgaaagatttacgtatcatttatcttattgtaatttgttttataaataaaaaaatatactttaagcatgatttatatatttgcataatttttctataagacgaataatcaaatgcatgtctaaaaaatcaacggcatcatcaattaaacaatgaaagagagcataaagtcctttagaggagtacgtgaccggtactcagtagcctagctagaacatacatgctccatatagttatacttgacatgtactatggtgtaaattaaagccatatatttgatcagttgaccgatcagaagacattactcatgttgaatgttattcctaaatatatatacagcatagtcaaagtatatcaaaaactgtacacccacacacatgcctttaactacagagacaacgtcacactacctcttgtgatgttgcccctctatatatctttcatccacgtacaagactgaccctaaaatagtctaacttctggataatatatagtagcatacatatatataattatttggtgattctctcttgatcatcagggaattcatttcactacttctaataagatatatatatatatatatatatatatatatatatatatatatatatatatatatacacaatatctagaataaatgaaatactagtaattccctacatttagagggcgcacttattggtctcaattggttaattagttcattaattatctaggatgtgaagcaaaactaaaacacataccttagcttgcacctataaaaacatgctttagtcaaagggatgacacatttacatgtataattaatgttgatatacaacaatcaaattctagttcagaaaacataggtttgtactgtagaaacaaaacatacatgtcatggttacaatatggcaacaatatagttgcagctgctgaagatcatgttccttggagtgcatagcatatattgtatcaaagtgtgtggatcatgcataatgctccacattttgatatttgacatgtaattcatatatttaatatataaactaattcgtatgtgaagaaaacttacaaatgcatataacattttattcccacattggtagcatcatcatagtatccacgtgattatactcatgcctatatggcatatttggttggttgtatcaggctggcttgcttctctgggtgcaacttctaaatcgacggctctagtggtcaacttctaaatttgtcatttgcaacgtgtcaggtcatacaatggttctatccttgcctcagcaaaatcatcacgcaacgccaaagcaaccgtaaccggtaacgtatcacactatctgcagtgatacgtcttatctatcccttccgtactaagccccaattccaaaagaagtcttctaaaaaaagaatagattgatagacaaatagagtaacgcacacaggcacttatttgatgctccatttggtgtacgccgcggcgtgaatacgtaccaccctatcttgtagtatctacagatggcgagtagataaggtaacgcacaatgtagtcgccaatttgatgcttcgttcaggttcaggtgttacggtgtgaatacgcaccagtctattctataagatagggtaactaacgcgcatcctataagatagagtaaagcacatgtatagtcacttatttgaccctccgttgggcatcgcggcgtgagtacgtaccacccacaccctatctctgattctccccaaaatccatactttggtagtgtcttgacaacgttatactagtagccatagtgacgtggccgtggtggcaatggtggaggtgcaaaggctataagaacacggtcaacacaacacggccgcaaatcagccatgtcagcgatcgagcgaggtgtgacatagcaagagatagagacgtgggcagcaccagccagccaccgaggtgctcctcctcgtcagacagcccagcccagggcccgctcccccatggtgggtcccaccgcaccaccccctggtgggccccactccccccttccccaatatacgcgcttgtattttaacccttctcctctcctctcgtctcctcctccaaaccaaacccctcgcctccgctttgaccaccgccgcgccgcgccacgccgcgccaccgtgagagagggagacagatggatccggtgacggcggcggcggcgcatgggggtgggcaccaccaccaccaccacttcggagcgccaccggtggcggcgttccaccaccacccgttccaccacggcggcggggcgcactacccggcggcgttccagcagtttcaggaggagcagcagcagcttgtggcggcggcggcggcggctggtgggatggcgaagcaggagctggtggtgagagcaacaacaccatcaacagcggcgggagcaacgggagcggcggggaggagcagaggcagcagtccggggaggagcagcaccagcaaggggcggcggcgccggtggtgatccggcgtcccaggggccgccccgccggctccaagaacaagcccaagcctccggtcatcatcacgcgcgacagcgccagcgcgctgcgggcgcacgtcctcgaggtcgcctccgggtgctacctcgtcgacagcgtcgccacgtcgcgcgccg

SEQ ID NO: 14814 - DNA, 4283 bp, Oryza sativa
tccgccaccggcctcaccgtgtacgtctccggcggccaggggcaggtcgtgggcggcacggtcgccggaccgctcatcgccgtcggccccgtcgtcatcatggccgcctcgttcgggaacgccgcctacgagcgcctcccgctcgaggacgacgagccgccgcagcacatggcgggcggcggccagtcctcgccgccgccgccgccgctgccattaccaccacaccagcagccgattcttcaagaccatctgccacacaacctgatgaacggaatccacctccccggcgacgccgcctacggctggaccaacggcggcggcggcggcggccgcgcggcgccgtactgatcaacatcgatctcgccggagagaaaaaaaatggaggagaaggatcggagcgagccgtgcatggtgtaggatgaattaagctaagagttaatttcttcttccgcctttgctaatcatgatgctctcgtgttgtttaatctgtggcaatctgcttaattgcaagctcatcactgcaattaagcagcagctaaggatggttggatggttaaaactagtgctctctgttagtgttgatgttaattaattaattactttgtgttctttttaccttttatttactcttgaatagactaccttaagctagctagcataatgcatgattcatgtagcttaattagttaaggtagccaggtagtagtaattaaggaagggaggcatgatacaagtactactagttgctagctagatagtggtaattagtcaactaattaagggtctacaagccaatcaatcaatcaattattaaactaatcatgtcattgtccacctttctctcttaatttgtctgtagctgggagcaagggggtagctagcttagtgtgcaaagctgcgtattttatggagaatgatgggtcagttcgttgttgtttctcttggggttggctcatccggtcacacacacatacacatatgcatatatgtcaaacaaggcatctctggatggatggacagatggtatcacatgagcaaccacttcaccaacgaatggatgaccagatcgatcagatgattattacatggtagaataattgcttgattagctctacttttgataagttgatatcctctgttcctttccgttttggttgtgttcagatgggattaagcacaaccacttcaccttctatatgatgcatatgcatatgcttgtgtggcaccacatacgtgtacacacagctattgctatattttatgtctccggaacagacgtttgctggatcctcacaggtgtgtgtttcatcagctgttcagattcagctgtgcgtgcgtagctacaacttgcactccaacaattaggttgggcgcatgcatttcgtcattgttgtgattatttctttgagccaggatcgaggactactatatatatgtatacaaaattacatatatgtatttatgtgcagatatttatatccaggattagcactattgaatttaaggaatttttttgggtgggggtggaaaattttccgaaatttcaagtggaaaattgttgtttcatttttttactcaaatatatatatttgggtatttaattcgttgcttcttttaaatatattaagattatatgctactaatatatgaacaataaatttgaaaaaaattatggacccatattttggcggtcttgaccgccagtaatttttttttgtcgatttgaaaactttgacattgctgtattttgctttgaccgccaaaatagatttccctaccggttaaccgcaaagaggaaaaaaaaaaaggcattccccttgctctatagatttggtgtgttcattttccttgaaggttggccgacaaaagtgacggtttgtggcactctaagaaaattcatgatcctggtagtgaacatagaattattaaattttttgttttgtctgctagcttgtatggagtatatcattgcccactagatgtgcatggttcgtataaaatcccaatttttttacaaatataaatctaatgcgcattgcctactttgtaataactccgttaatttgtctcgcaaattcgtttgtcaggggatttgtgatttcataataaagaaaaaaaaccggaggattttaataccaatgcatttattgcaatatttccatttgtgtatttgtgttgtaaaaggaagcaaatagatgtaaaactactgggcatataggctgagaattttcttccactttgagcaaacacatagagaacaattattataaacatgttgaacactagataaaaaatgtataggccatcacagttatgaaacccaaaccatcccgggcaacttgtctggttcacacatgccttgggcctgccgttgtgtacaatgaagataaaagcgaagtgagtgtaacttaactggttaggtttctagtggtggaacttgcccacacaaatttgagccctacactaggcctctttggattgagggattttttagagaattttcaaaggaatattgtagatagaaaatatttcctttcctgtcgttcagttcataggaatcaacacaaaggaaaatcggaggaaaaattcctttcccgtggaatcaatagagaaacaaagggaaatttccatccacttctacctcattttttccatttcttacgttttttctctgtctatccaaacacatgtttaccaatcctatctacagaattactgtgtttttcaatcctctgttttttctctattttacagaattactcctgcatttttacaatctcgtaatccgaataagcgtaacatggatgatcatacttacggctaattattcctttatggtacttagagggatacctctcagtatctcagatatcagcatgtatcatttttttttttttaaaaatgaattttatggtccttaagaggtaccataattaatgtactaaaaggtaccaaaatttatactaaaaaaatatgatttttccaataccgcaaaaccaacatttacaaaatatgatacctggtcccttctcgcgtaccgcgtaccgtaaatttctcaatagataccccatgtcttgagtgaaattagtgctttgtaacagtgaaccatttttctggatccgcctcctgcggtgagtaaattagctgcacatattgtccatgcatcactgcacactcagttgatgtcttgatgatcagtatatatatgcaattggatcaatcgagctagttagtgtgcatgcatgtgtgtgtacttgcatccgagcatttccttctcctgcagctaaggtagcagggagcagccagtgctggacatatgctgcctcgaagcatgagtacactgttcatctttgcatgcatggttgggatcggaggactagtgcacagtgcaccccctccgatcctgcatgtccagcagcagcctgcatgatgcatcgatcgatcgatcaatctgcaattgtacatattcaatcgatcgcatgctcgcatgcatgcaagaattgaatgaatatgcatggtttgttagccacagagcaggccagagagcaatgttaaaaaaaaaacaagaagagaagcagcagcaaatgattctccggtgcctgcactgcatcgatctagctgcatgcatgcacgcttggcatatattcagatcgatcgatgtatatgcagttgcagttaattcgatcaatttgtttggttactttttttttactgaaaatgcatatagatgccatgatcgaatctgaatgtgaatgaatgatcgagccgcgtgagcaaaggcagcagcagctcgtttgcagctttgcgagagggatcgttcgatcgagtagctagcgcgaagtttgaggctgatgcaaggaacagtagatagctagcagcagcatgcaagagagtgagctgtgagcagcagatgcagatgcagagatgcagctagcagctgctgctgctacccagtgcggtaatttaacaggcatggagggcgacatggatggatgcaatatgcagagaggtgaggtatgggccactgaagaagaattaatcgaggtgagctccgtgaagaagaaagaattgatcacttgtagagagtagagagagagagtgaaatggagaattcagatggatggatggatggatgcgtgtgatgtgatgtgtgtgggtgtgatatatgtgatgtgagagtagaggagaagatgaagagagagagaggctggaggtggtggtggtcaggggcacaagtgcagttggcgcctttttgaggcagcaacagttgggaaggtatggcg

SEQ ID NO: 14815 - DNA, 752 bp, Oryza sativa
  unsure (1)..(752): unsure at all n locations
tgtgtcattttggatgactagctggtacagncgttcatcatagaagaagcatctgactctttcatgcatactccacttggctcgggggnnnnnnnnnnnnnnnnnnnnnntccgctcttgcaattgggtcgttgcgattacgggttggctgtctaattgtccaggcggtaatggtagtatcttgtacctgaaccggtggctcactttttctaagtaatggggaagaggactgaaacatgccactgaaagactctactgagacaaaaagatgggctgtcaaaaaggtagaggaggtaggatgggcagttggtcagatctagtatggatcgtacatggacgatagttggagtcggcggctctcctaggcttccctcatctgggatccctggggaagaggatcaagttggcccttgcgaatagcttgatgcactatctcccttcaaccctttgagcgaaatgtggcaaaaggaaggaaaatccatggaccgaccccattatctccaccccgtaggaactacgagatcaccccaaggacgccttcggcgtccaggggtcacggaccgaccatagaccctgttcaataagtggaacacattagccgtccgctctccggttgggcagtaagggtcggagaagggcaatcactcgttcttaaaaccagcattcttaagtttaagatcaaagagtcgggcggaaaaaggggagagctccccgttcctggttctcctgtagctggattccccggaccacag

SEQ ID NO: 14816 - DNA, 793 bp, Oryza sativa
cgtgattgtaatcagtgtgcagcagtccatcattttgacgtccccatgcccccccccgtgtggtgtggcggcatggggatgtcaaaaggaaagggatggagtttttctcgcttttggcgtagcaggcctcccaaagggaggcccgcgcgacgggctattagctcagtggtagagcgcgcccctgataattgcgtcgttgtgcctgggctgtgagggctctcagccacatggatagttcaatgtgctcatcagcgcctgacccgaagatgtggatcatccaaggcacattagcatggcgtactcctcctgtttgaatcggagtttgaaaccaaacaaacttctcctcaggaggatagatggggcgattcaggtgagatcccatgtagatctaactttctattcactcgtgggatccgggcggtccggggggggcactacggctcctctcttctcgagaatccatacatcccttatcagtgtatggagagctatctctcgagcacaggttgaggttcgtcctcaatgggaaaatggagcacctaacaacgcattttcacagaccaagaactacgagatcaccctttcattctggggtgacggagggatcgtaccattcgagcctttttttcatgcttttcccggcggtctggagaaagcagcaatcaataggacttccctaatcctccctttctgaaaggaagaacgtgaaattctttttcctttccgcagggaccaggaggttggatctagccataagaggaatgcttggtataaataagccactttttgcccg

SEQ ID NO: 14817 - DNA, 721 bp, Oryza sativa
  unsure (1)..(721): unsure at all n locations
cgccccctgattgacgtcctctgcngtagttcatcaaattcgaaatgaaacccggttggagtcatatgggttttcttctatgttttagctagccagctatggcgcctatataaatcccccacacgaacgaacaaaacgatcgatgtgtcgaagtggacaagctgattaactaatcagctttccctttcggttgcgcacgtacgtacgatacgacaatggcgccgccgtcgctaccgattcttctcgtcttgctctccctgtcgtcgtcgctgtactccttctctgcggcagcagccgaccgctggaccgacgcccacgccaccttctacggtggcgccgacgcctccggcaccatgggtacgtaaccggtgcacgccgatacatatacatctattttagctcagaattgatcgaagtggcggcaatggcgccgccggttgtgtgcaagtggcgcgtgcgggtacgggaacacgtacgggcaggggtacggcacggacacggcggcgctgagcgcggtgatgttcggggacgggctgagctgcggcgcctgcttcgagctgcggtgcgggggcgggnnnnnaaaaaaaaccngnaaaggtggactgccgccggcagaccggcaagccataggggggagagggacacgaccaggtgtcctgggaaaccactgccttcacaggtatcccggctggtgtgtgaaaccccaccgtttcaacatttc

SEQ ID NO: 14818 - DNA, 630 bp, Oryza sativa
cgcgcgaatcgggacgtgccggttcgttttgcctggagatatggtgatggcgcttcggtcggcgagcgtaattaacgcgcgcacgagatgttccatctcgactgccacagccgcatatccacctcatgcaccgtaaacgggcgaatgggataagtggaagagtgggcgcgagaatcgagggggcaagatagtgggcgcgagaaacgaggagccgggcacagcgttggcaagggtataaagtcgccgaggaagagatttgcttcctttctctcgccattattccccttgtcttcgccgcttgcgccctaactccttgtttcatgtgccctaccttcgccacacgcgctcgctctcaaacatctcttcttccggcgtcatggcacggggctccgctccgcttgacggtagcgtgctgccgccttcccgcatcgtgagcgagagacaggccgggctgctgcgccgcttcatgccggaatctgcgaccggccaggagatagtctcgctgggcgaaggatgcccggcgccacgctacccggggcggtccgtcttcttcctcccttttgctatggcagggctggttccgccattttcttctttcttcatggatgttctggagttttacgatctcca

SEQ ID NO: 14819 - DNA, 501 bp, Oryza sativa
tactgaagtactgtgacacatatactgcatctggtatgccacactccgctgcggcagcaatgacatgggtgcatggcctgtggagcagcttcggctttgcacaagagcaatgacatgtgtcgtcggctttgagaacacactcctgcttcactctcttgcggtagatacccctgcctgccttatcttgacatagtatctcaaacctgtgctgttgggtaccttgcactagagctcgatgtttcatggcctttttacgcaactcctctagctttttctgcatgaaagctccaaacaaaatgctgttgttcggcatagagggaagaactgcctggaaccgatccctaaaatacctgcatgtcccatgtaaaatgaactccactatgccaactagtggcagtccacggacaccgcgcatcacccagttgtaaatttctgccaaatttgttgtcattattccatatctagcaccacctgtgtcatacgccttggcccatttctctt

SEQ ID NO: 14820 - DNA, 615 bp, Oryza sativa
tggatccccctatttgaattgaacggcaattgtgtttgaggtgatcgattcattcccgtaataatttattcagatttgcaacgtggaatgtgtctcaggtgatcaaattatttccccattaaaatttacatgaatcagaaattgacagtggagaaggtgatgatcgatcaacaatgaacaaaattatatatattacttcatgaaatactgtgtacacgagctgaacgaatacatcaatctatcagcttacattatatatatccaacaacaacagacacaattgcaaaagaaaaaaaaaagagaaaaagaaaaacatttatcaattaatgcatataacctccgcggcgagagcgcaaccggtccagaccgaactgacgcgctcgcgagctcagcagaagaggtacccaacggcggcggcggcgagcgtgccgagggcgacggccggggcggcgttcgtcgcggcggcgccggcggaagctccggacgggccaggagccggggcctcggtcgcggtggccacgccgaccaaggacgacgccacgacggcggcggtggcagccgcggcgaggatcctgagcttgagggtggccgccatttcgatcgctagctatgaat

SEQ ID NO: 14821 - DNA, 660 bp, Oryza sativa
gagatgccttaatagatggtacagtagttcatcacttgagcatgtatgcaaaatattaacaatgccaatgtttctaaagaaaacaactctagaataaatcatcacattgaccattgacattagccgaattactaataagcaaaacttccatggtacaataattataaaatctatatcttatatggtgatccataaaaacacatacaatttgactttaaataaatatcaaagactcataagccaaatcatacttcaaacaaattatatgccaacctaccaatttcactacttagaactggtatttgcaacatgtatgtataatatcaatttgataagcaaacacatgtgctagatagtaagcaatgttctaacatgacataggtaaataatatgatgatgaacacaataaacccataccttgccttagcatccaacaaaatgcggctcaaagatgtgatgttgtatccatcgctgttcatcttctcttggtttcttcacgagcatagtaatgtcttgccccccaagcaaaatcggctttctcgactgcacgattttgaaggcaagacgaacaccgcaccaacatccatagcatcatgtgaaggagacttatctctaatgaccgatgatgctatggattgatgaactacttgcagtcgaact

SEQ ID NO: 14822 - DNA, 823 bp, Oryza sativa
  unsure (1)..(823): unsure at all n locations
atgtagagtagtatttagtcatataagcacggtgcttagttcattagataccatcatttggggtaatatacagtggttctcaggatcattagttttggtcacaagtccgtctggcaatcctacatacgccaagacaattcgcaggatatcgtctttagggataagctcggctagtccctcacggtgtctccggatactgcaagagaaccggaaagtgctatctctgatctcgccgggcacggattcgaggaggaagactaccctgttgtcgactacgagtcagaactttagacagccatgtcgacaacagttagataggctaccccaaatattgtactggtgtgattatggtaaataaagagcaacgaccggcttcggccaacagggtgtagggttattacctgacaattcaggggcccgaacctgtataaaaatctctatctctatctcttttacctcagtcttgcgtatatcctagtaccaacgatccccatactatgcaaataccagaactgcgacatcaaacatcgacagtggcgcgccccccccaaaaaaagggttttaaagggcggaaaaggggaatnttttgggtgcttcaggattttgaagagatgggttcaagagatgaattctccaacaataaactactcgacgacttcactgtggggaagatcaaatccgaccggagtatgtcttccgacgagatcgaaattatcgccgtcgtggaggacgaacgatactggcagcattggtgaccgatccaatatgggactgttctggaagctgacggtgatgaactactgtaccatcaagaaagcatcac

SEQ ID NO: 14823 - DNA, 725 bp, Oryza sativa
cgagcagcccatgcacctactattggtacagtagttcatcaactctattcatggatccactagtatgaagataggtagatgcttcgctgattaattaggcgacattaggtggtcccataactctagactttgggaatattcatatcacttggacattatcgaatggttagatcatggtgggaatggatgcacacctacccctctattcaaaaccctcaaaatggttttaggctgggctcggcgtgcatgggattgttcatagctccttggccacctaaagacctgtcttcgaacctctgatgcaaagcactacctgacttgcacatgactagtgggttaggcttagtttgaggctcaggctgagtataacacaaaaaggcacggatggagatggatgaagccatgggtcgatggacatctgtaggacaaaatgaaggctacacaggcttctgaccggtataccagatgtcatggcacatggctgacgcgctgctgctatgagctcactaatgactgactgtctaggggttccggacgtaagtaccgtgcgtcagtactctcgtctatggctacgatgggctcgagactatggcatgtcttacgtacatatgccaaggagctatgtcacacgtggatgcacgtgaggaagacatggcttgagaggtaagacgtacaccattgaacagagtgtaacctattggaatagccgctctctctgtaatggg

SEQ ID NO: 14824 - DNA, 1055 bp, Oryza sativa
aagaagcatgcagctccaaaccagagaatctacttaaccaaatgtcaagacaaaacatgccaaaccccttacatgcatcaagcatgtataaaaacacataaattacaaaattatttgacacaaccaaatcgtgcatccaactagatcagagcataagaaagtctccatctactaagaaccccccaggcattcggcattgcaatctatagatgttaatctggcacgcaatgcaatgcacacctgcttaatcaaatccaagctagaatcacaaaggtgacgttaaggagcattcagccaaacccacatagtgtctccactccactatgagctgctgcgaatttgttcttcctattctatatagtaagcccacaatcgctcaatgcctcaatccatctgtcataatatctaacaaattatccgaaagaacacttggaacaaggtaagagtttattcttcctaattctggtttagtaagccctcgatcgctcaatgcctcaacccatggatcacaatatttaacaattttttcaaaaaaaaaactaattctgccgtgtagtattgattgatcctaacagattggaacaaagtaagcaaaaagagtttgggggatcccagattggggggagagagagagagagagagaggcactcacatcgacctggcccttcttggcgacgttggtccagtccctggcggagacgccgctgcgccagtcgaactcgaagccgacggtggcggtggggcggtggtcgggcgcccagaagcaggcgaggtagtccccggcctcggacgccgtgaaggcgaagttgcccgactgcacgttctccgagtagtgcaggctgtggccgtggggtgacgtgacccgcaatgagacgcggtgggactccgggagcagcggctgcgccgacgacgacaacaaggaggaggaggaggtggagccgcccccctcgggcaccacgacgtggtacttgcccaccgccatggcgcccaccttgatgtcgtcggagatgcacttggtgtggcccgactgcaggtcgaaccgcagtgcggcggcg

SEQ ID NO: 14825 - DNA, 2699 bp, Oryza sativa
agtaagacatgatggcaggctgatcaataatgctctcacagcccccaaatgatggggcatgatagggtatcttaacagaatcaataaatctcctagtagcatcaaagtctccagcaacctgcacagacaaggtattttagaaatttaaatgggtggtgttatatccacaggtgagatgagaattaaagagaagaaagtacctcaaaactaatgacaccaccaaagccggtcatctgactcttggcaatgtgatgttctgggtgacttggcagaccaggatagtagacacgtgcaatctaaggataggaaataagagactcagaaaaaacaacacaacaaaaagaactactcgtagcttcatagcttgtacaacaaatgaaaagtgcagagtttgcaaacctttggatgttcctctaaaaattgggccatccgcattgcagtattattctgacattgtacacggagatgcagtgtcttcatgcctcgaagaatcaagtaggcagcattctggtatcataatggcatgaaaagttaagagacaagagaccagaatattcatcaacagtataacatacagaaatagaatgcaaagacattcacaacttcaattcaaatcgctttcagacattcacagctgcagatcatctattatagtgtgttatctatttctgtacaattgacgattttaattacagaattacctaacaagggctatcactacctctagtcaatgcaaacgagagagatattttaccagcccaaactcaccggatttagaacaccaccaactacatggtgatagatgcggactttggaaactagctcatctctgccactgatgcagcctccaataacctaaaaaacaaaatattcttgtcaaggcaatctatatgtgtaatgagtacaggaagtttggtccaaacacttacatcattgtgcccagcaatgtactttgttgctgaatggataactaagtcagcacctagagttagtgccttctgattgattggggatgcaaaggtactatcaatacaaagcaatgctcccttgctatggcacatttttgagacaagatcaatgtcgatgcatctcagaaatggattagtaggagtctcggtgaagaatagggatacctgagtagaggtcacggataaatttttggttaataaataggcatatgatagcattagaggaaaaggaaatagtacaaagatcacactcacattattattatccagtgcattttggagagcatccatgtcagcaggtctaataacggtcatctggacacaaaattgtgtcataagataagcaacaaattgtaaacatttatgtataaacaaatggaacaaagatcataggcatattccaaacaccgtattctgcagaacataaatatttaatatgcacttccaagatactggaaatttgaaagcaactatgaaatcattatacatttttggcttctacaaattgatggaaagccaatctcaaatagtaactgcagaatcaagtgtgtgcacacgcacgcacgcaaaaagtaccggtataattataaatgcctctatctggctctcacaggaatctgtacagattactaaagtagcaatgattgagtggtggtggacaaaagaatgcgagttatgttggattagtttattatacaacataaaattgaacttagaaagatgacaggtaattgctgtgccaattaacacaggaaatagtagcctccatgtccaaatataatattttaagtagatcataaaatttaaaatttgtaagccttctgctactatagaacaatgacaagtcacatcaactacaagaaaaactccattgaaagttacatatgcattactgcaaacaagaataataagatcagattaccgtaattcccctcttaggtagttcagtctccatgtaaattctcgtcttgcggtaacaatcagtggtggtcacaacgtgcccacctgctggaacaagcgcgctgagcatagccacacttgcatacatcccggatgccacaaagacagtggactcggctttctccagtgcactgaaacatcgaagtagagcaatcaaaatcccatccactaaaaccaacacagcatcaagcattcccacttccaattagcagaaccattcatttcaagaagaaaatattacaccagcaacaaaggggaaacatcacctcatcttcttctccaatgcctcagtggtcgggttaccatacctcccatactcgaagctagcatgcctcccctcctgagagaagaggaaatttttaacatttgcaaaaagggcatctaccaaatcgatttgtaggagtaattgcaaccccccaactatttacgaaagatcgccaatcatttctaaccttgaagtcaatgagctcctgcgagttgttgaaccagtaggccgaggtgttcactactggcgtggtgatcgcgtctgtggcgatccttctgcccagcctctcgccttcgataggtatatcaaaagcacgaaatggatcagaaaaaaaccgaagcagcggggggaaggcgatagatctgagaggggattgatcgtgattacccgcgtggacggcgaggctggcgtctgaaccgagcagggcctgctcggccaatgcggcggcggacggctggccgagcttggcgttggggatggcgccaacctcggccgtggcctccgcc

SEQ ID NO: 14826 - DNA, 12960 bp, Oryza sativa
  unsure (1)..(12960): unsure at all n locations
cttatgaagagggtcagcctggttatgtgggacggggacggncggcgcgacctgtcgaggacgttcacgtcggagacccaggtgaagncggtgcacggcgaggtggagggcgaggaggtgatcgtccgcaacggcggcgaggtcgacgcgtacagcctccggcgcggagcgtggttgtgggtgcgcggcatctccagctcgggtggtcctgtactggatgtggcgctgctggcgcaccgggacagcgtcgtacaccacgacgtgagcttcggcgaggcgtcgcggcctcttcgataccccgacgacatccatggccagcgtttgtttgtataatcgcatattcaatttgttttcgttaaggcccgttaaaaattttcaccctgtaatatcaaatgttttgatatatacatggagtattaaattaaatataaagaaaaaacaactaattacacagattgcttataaattgcgagatgaatcttttaagcctaattgttccatgatatgacaatgtggtgctgtagtaaatatttgctaatgacggattaattaggtttaataaattcgtctcgcagtttacaggcagattctgtaatttgttttgttgttagtctatgtttaatacttcaaatatatatccgtatatccgatgtgacacgccaaaactttacacctgtggatataaacatagccttagtacagcaaactttacatgagacatgaatacactgtatgtaatatatctttattatgttgtatataggaatataggatccgcacatatatacacagacaaatatatcacatatatacaaccatgtatgcatatagtccatactcgatccctcgcccctaaatataaggattttttgttggatatgaacttgtccagatttgttgtactagtatgtgccacatccaaccaaaatcccttatatttagggacggagggattaacaagtagggaaggttggagacatcacatgaaaatcttcccatcgggcgcccaatgccccccaaaaaaatcggtcggtcaaatgtttcagttgaccaacgaataaagcattaagttatatatagtgaaaaaaatagcaaccgaaatatttaaaaattttatgaaacatggtgaagtacatgttaaaacatgtcgctatatcatatgaaacaactaatgttaacggattgaaacttatgttttttttcatcagaatataatcatgcgatatcttgtcataaagatttaattacaacaaatacaacaacgtgattggatcgtagattagataattagtttaggagaaaattcactaaaatgcaattatatccaatcacatgatataatacattatcgtagatcggtgtcacatatattagaccctgtttagttcccgagcaaaagttttattccctgtcacatcgaacgtttggacacatgcatggagtattaaacatagaaaataataactaattacacagcttgcgtgtaaattgcgagacaaaatttttaagcccaattatccatgatttggctatgtggtgctacagtaaacatttgttaatgatggattaattaggcttaataaattcgtctcgcagtttataggcagaatttgtaatttatttttattattagtgtacgtttaatacttcaaatgagtatccgtatatccgatgtgacacgacaaaactttacacccctaatctaaacacccccttagtcttttgcatgctgtaaaagcagttatccaatcacatgatagaatatatgattgtagatcggtgtcacatatattagtcttttgcatgctgtaaaaggaaatctactccaccttcacatcgtagaatacacaaacatcaaaatgctctgtcggcccgtgctagcttgggccttggagcaccactgttatccgataaccataacgaattggatgaccataaggaagcaacgctctcgatagaactagaagccgtgcagcccatctgcctggcatggctataggatcagcaggtttcagctccggcgtccctcagcagcagcagccgccgccgcctcctttgcaggcatctggtggcggcacatggggcacgtgccgtgcacgcgcagccacttcaccaggcacacgccgtggaaccggtgcccgcacggcatctccttccaccgtcccgccgccgccgtcgccgcgtcctggccgtggaggcagatcgcgcactccgcggccggcgccagctggtcgacgacgacgtccctgagcgcctcgatcgcctccttgaatgcgggcgccacgccgccggtggtgcagccgggcagggaggtggagataatcatggagacatgttgctgctgctggcgctggagatggtcgtcggagacggagagcagccgcgcggcgagcatcgcgagcgactcgcggctatacggcgcagcggcgggcgtggcggcgctgttgatccaggtggagtggagccgcatgaggtggtcggagttggaacggaaccgcgaggcgagcacggcgcgcgacggcgggaggccgccaccgccgacctccgccatggcagcagctgcgcccgtggtcgtcgtcatttggacgtacgctcgtgtaccgggtttaattggagtgcgtagaatcaagctaagcgagcgatcgatcgagcgcttaggtttgcagctgcaatatatgcatgagacaggcggctgtgttgttgttgattattttgctagcaatggaacagagaaggagaacagaggagagaagctctgtgtttgtttcacaaactggttatgctttgctcaagtattgcacgttacattgattgttggacagcagcatcacatctaggacatagctgcctatttataggatggctaggaacttttctgaacacaactagtactggtacatgcatgaaaatactagaactcacaaagaacatattattgtctacactactctagaaatttcacagagaaaggacttgctccttgacttttgtttcatgagtagtagagagagttagagagtaggctggtatgttctagaaataaattaactccaacaaactcccccttaatttatttcttgcaaactccgatgagctctctgtcgcggacaaatttttctttggataaagccttggtaaatatatctgccaactgctcattagttcggcaaaattccaatttaacttcctggcgatcaactgcttcccggatataatgatacttgatagcaatatgtttcgtcctgtcatgactgactggattttcgctgatcgcaattgcagacttactgtcgcaataaattgtagtaggctgatattgcttctcgcccagatcttccataattctcctcaaccaaacaacttgtgaaacagcttttgatgctgctacatattctgcttcggctgaagataaagcgacaatattttgtttttttgtagaccaggagcacatacctgaaccaagtgagaaagcgtagcctgatgtgctcttcatatcgtcaagacatccagcccagtcactgtccgtatagccaattaattttgattctttaactggcttataccatataccataatctgcggtccctttgatataccgcaaaactctctttgcagcggtaaaatttaattgacttgggctagacatatatcttgataataaacttgccgcaaacataatatccggtcgtgttgcggtcaaatataataaacttccaactaagcttctgtaaattgttggatctaccttatcagctccatctctagccttttgcttttcatttggcaacaagggggttgtaactgacttgcagttatccatcttaaatttctttagaatattttcagcatatttcctttgtgatataaatattccttcatcactttgatgcacttccataccgagaaaatagtggagcaagcccagatcactcatttcatatgtatgcatcatatctcttttaaagtcttgcatcatcttctcactattgccagtatatatcaaatcgtcaacatagagtgagacgattaggatatccgtacctgttttgttgatatatagagtaggctcacttatgctcttggcaaatcctttctgaataaagtacttgtcaatttgactataccacactctaggcgcttgctttaatccatataaagccttcttgagtctgaataccttattttctcccccttggactgaaaacccttcaggttgttcaacatagatttcttcatcaagatagccatttaagaaagccgatttaacatcaagttgataaatcttccacctcttttgagctgctagagcaattatggtacgaattgtctctagcctggcaacaggagaatatgtctcataataatcaatcccaggcttttgcttaaagccttttgccacaagttttgccttgtatttctaaactgagccatctggatttaattttgtcttataaacccacttaactccaataacttctctgtccctaggacgatcaaccaactcccatgtattatttttctcaatcatatgaatctcatcttccatggcctttatccaattatcatgtttttctgcttcttggaaactttgtggctcaacaactgaataattgcaaaattcatgttgttctgaccctctttgttgagaagtagattctaataattcaaccatacttcttacccgtcttggagctgattccggtgtagaaatttgctcttcactgctcgggcttgaatctgaactagcacttgagcttgacattggacttgatggctgtggacttggagtatgatcttccacttcatgagtgccatgcatatgtggttggcctagtgtgatggtagtggttggcaataatggagtactagaggcttttggagacttccagttccatgtagcactctcatcaaaaatcacatctctgctaatgataattttctttttctccaaattataaagtctatagcctttgataccatcagcatagccaacaaatatgcaccgatcacttttattatcaaattttactctcttttgtgctggcacttgagcatagcaaatgcaaccaaatactctcatatgaccaatgacaggctttttaccataccaagcttcaaaaggtgtacggtttggtactgccttggtaggacttctatttaaaatataaattgcagtattaactgcttcagcccagaaagatttaggcatacctttgtcttggagcatagaattggccatatcattgatcgtccgatttttccgttctgcaactccattttgttgagcactatagcctgccgttagctgtcttcggatgccagcattttcacaatatttctcaaattcttttgagatatattctcctccttgatcgctgcgcaatactttaatttttcgattactctgattttccaccatggccttgaattttttgaatatctccaaggctgcagatttttcttttagaaaatatacccagatcattcttgtataatcatcgataaatgtgataaagtaccaatttcctccttctgaaattgttggcactttaccaactatatcagtgtgcactagttccaatggtgcacttgctctccaagctctactgtggggaaaagaagcccgaatttgttttccaaatacacatccttcacatgggtcagacttgagagtaataaatggaaggccttgaaccataccttttgtcctgagtagcttcaatgctctgtaattaagatgacccattcttttgtgccataaatcggaaatatcaatttcactcctgagagccatttgagttggatgattcatccttaatagaaaatttctgttcttctccatatttattttggcaaccagacgattattttacgatccaatattttgcaagaaaagacttcaaaataaaccgcgtacccgtgttctagaagctgcccaatacttagcaaattttgctttaaatcgggtaccaacaaaacatcttttataaattttggaccgtctgctgtttgaacagcaaccgtacctttgccttcactttgggctatagagccatttcccatgtggatctttgcatgatacgatgaatccatttctcgaaataaatttggatcagcggccatatggtttgtacaaccactgtcaataacccaaacatcatctttttcttcttgagcagtatggcaagagaaaaccatttcttcagatttttccttttcttgtgaaaaattagcccgattaatttctcgagttctgcaatattttgaatatggccctttcttttgcacttgttgcaggtcattttcttccagcacatatctgtagtatgactagatttttggcaaatgtcacaccacaaatttgaactggacgtacctttttctcttctctcttgaccatcttccttctgcctggaaaagccatttttctgaaaataaccacggtctcgcattggaaatccatttttttgaaaatttccgcgaaaccttgagttttgaggcctgaagctcaactttgactgaaatgcattttcaatagagctcccttcgcgctgaagctttctttcttcgtgagattccaacgagctcattagttgctgaattgtgagagtcgacaagtctttcgactcctcaatagcagcaacaatgtactcgtatttttcaggcagactgattaaaatttcctccacaaccttctggtcgtttatatcttcaccatagaggcgtatctgattaacgatctcaataactcttgagaaatagtcttttaccttctctgactccttcattagcaaattctgaaattgtcttctcaaggtttgaagcttcaccgcaagtaccttctgagatccttgaaactcctccttcaacttgtcccatgcttccttggatttcttggcgccaataatacgcggaaatagactttccgcaactccttgttggatcaagaacaaggccttggcgtccgacatccgatcctctgccaaagactttttctgttccgccgtaagagtttctccagcggaatactcttgatagccattctcaacaatatcccacaatccttgagatagcagcagcgtccgcatcttgatgctccatatatcataattttctcctgcaaatacaggaaccatagactgcgccattgtggcgcccgaacttgaagccatacttgtagcttcaattgacaataccgatacgccgtgctactccgtcacgccctactcgaacctgggcgctctgataccagttgttgttgttgattattttgctagcaatggaacagagaaggagaacagaggagagaagctctgtgtttgtttcacaaactggttatgctttgctcaagtattgcacgttacattgattgttggacagcagcatcacatctaggacatagctgcctatttataggatggctaggaacttttctgaacacaactagtactggtacatgcatgaaaatactagaactcacaaagaacatattattgtctacactactctagaaatttcacagaggaaggacttgctccttgacttttgtttcatgagtagtagagagagttagagagtaggctggtatgttctagaaataaattaactccaacaggctgtacgtgccgttgggcttcgtgaacgccgagaagctatcggaattcggccatcagaatgtcattgggttctagtgatcaggactgtgatcacaagcaccaacgcattcggacttggacctaggactcggattcggcctatgttttcaactcgataagtcggaaaaaaaatgttttgactccattctaaaatatatataccgacacagttactacctccgtcctagaattcttatcgctttgagttttttttttttaatttttgatttttcgtcttattcaaaaaaattatggaatttttatttattttatttgtgatttgctttattatttaaaatactttaattatgacttcttcgtttttatatttacactaatttttcaaataagatgaaagatcaaacgttataagaaaaaaagttaaagcgactactaatttgagacggaggtagtaccttttttcaaagttctttagcgtttattacctgcagggtactgtagaataggtcccacggtaaaccgaaagacctgaggcccgatggcccggctcatggcacgagattttggcccagtccaagcacagcacgacctttaattagaccatgtttgggcctctgcctcggcatgataggccaatccggtatgacccagtccaacgattagagagttaagtagttgagggagccaaaaataaacttattctagccatataaggtatgtcccaaagagacgaggaatgcaaaataaacttattccaaacatataagagacggcacaaagagattagggagccaaagttttttcaagaaggagcaccgtaggctttcatgtcttcgggtcggcccggcacgacccaagtcttattgggctgtgcctgggctgatggtgcagcaagtgagtgggcacggcctagccctgcgtgtaggtcaggccgtgtcggtccgggcggcctatttggccatctatagaaaaaaaaactagaaaacttagcgcggctttgccgtgcccttacgataaacgggtacaaagcaaaagcatcaaataaatatgagaatttttaccattcttgaggaggtaccaagaggtaccaggtaccaggtaccaggaggtgccactcacatctaaccgtcgatctcagaggggtaggattggaaccggttaaacgggatgtagcttatcgtctccgccctcccagtatggaatgctgagctgcacatatactccctccgggttaataatacttgtcgttttggagaagggcacggtctccaaaaagtaactttgacaattattttctattataatatatatagaaatatcaacaaatatatggtttgtttgaagtactttttaagactaatctacacatatggtttttatatttttaagataaatattttagaaattatttgtagtcaaagattttaaagtttgactttacccttatccaaaacgactaatattatcagtccggagggagtatcttcttggggattcctagttggtgcgtgcgtgtcagcaacgcgcacgcggcccaacccttgtgcgacaacccacgattaacgttgtaattagcgccataactagttttgatttctcggtaatttgccgtgtcctaattttttaattttttttaagtaacagactaaaaacagatctacacgtgaagtcaaattttgaaaactttcaatctagatttaaaaacttttcaactcgaaatttgaatttttgaaatcaaaatttgaaaactttcaacttctcatctcaaatttgaaaaactttcaactagggtttgaaaactttcaactcgagatttgaaaactttcaactcgagattttgaaaactttcaactcaagagcaactcgagattttaaaaactttcaactcggattcgaaaactttcaagtcgagatttaaaaatttttaaattaattaagatttaaaaattttcaagtacagtcaatatttaaaaactttcaacacaaaaaattgaaaacacttgctgctggaagattaaaaagtagtgggaaaaaacgcaaaaaaaaagggaaagcgaaaaaaatcacggaaaaaagaaagcagaaaataagaagattaaaaaagtaataagaaaaaagcgaaaaaaagatgagctgcgcgaaaaaaagtaagattaaaaagtattaagaaaaaacgcaaaaaaaaaggaaagcgaaaaaatatcaagcgagaaaaaagagaaaaggaacagatgggctgcgtgaggggtgggccgcgtgcgagcatgggccaggaacacgcgttgatagtgcgtacgcgctaattaggaaaattgtatcttcttggctgtgtgaggcagcattaacaaattgagtgaatatgcaatgttcaggaaattccaaaatcatctaatggcttaatgcaacgacaattattttgatctacagtgtcagaaggcaatataatttgataagttaatttggacctcaaaatagcatgagttacttcgtattcactgccaaactgcatgcaaaaaataaacgtataacatgtcttggtcagaaattggtgtggggatgaaagctatatataacaaaaaatggcagcggctctgagcctctgatacttcctaagataaagagcatatgatttcagttattggtcactgcaagtataacaagtacataagtggttaataaaccctatcatcagttaattatgcttaaagtcatgcatattaaccatgaacacagtacatcagaataagaaaaaaagaagaattaaacttgttccgaagagcaagagatctcgtcaaaacatcaactcccttcgcagcgcttccttggttattaagtgatgccaacttgatttctttctcccgaaggttcatataacggaaaaaaaagtgaatacaccccccttatctactacttaaaatgttagtaatggtggtgtctatttccaaccacccctagcattgatatgtaggcttcacaatctatactattacattacctctcgaaaagtcctttcccgtttcactattgactcttctcaaacttcaaaatcacgtacttattcaataagaaaaattatagtattactaggactaaataagtgctcattaattgatttaataaggtaaaaacttaatgtgttttctgttgcaacgcaccagctctaggctagtcgaatataaacatttgcatgttataggtggaaatgaaaagtatacagcttcatgttggtagttccttcaccaattggaggctcttctactgtaacctgccatatgcgtacattctgatgtcttcatccacaattcctgccatggagaacaaatcaatttcactaatccatgaacaattgagcagatgaagaaccagggatatcaaacatgaccgctgaatcaaaaatccattcatcttgctgaatctaaatcgattgattctacttctgtttttgcattgagcaactgatgaacacattctttctccctcaattccttcatcaccttggctgccacgccttctccctccacatagcaacctgaaccaaatcaccaagaaacaagcatcaacccaagtcaaaaggaataaccaaacacgagattcaccaaatgggaacagcaccgctcgccatagcgttgagtttctggatcctatcgtgctgctcgtcgagcaccctgtcgagggaggtggccttctactccagccggtcaacctcggcgacgagctcttccgggtcggccccggcccgcgcatcgggctcctgccgccgtgccgcgtgggaggagccgacctgtgtggggcacggcacgctccggtgacctggaagaagaggcaggtcgggtgtgggcgacgccacacggctacttgcagatggggcaggtgatgagtgaacttattctcctctctcgggcagtactccagccattgctccaggctgcccaagattaaaccatcatcattcggaaatcgattcgaagaataaggagaaatttcataatataccattcaattcgcagcaccatcaggaattaccacctaattcgtagcactttcagaacataccactgagaacgcgaattgttccattccgtgacactccgtcccttcgcaagtcacgccgccccgacgcccttcatgtgtcgtccatcccttcatcttccgtcgctgtcgagcttctcctctcccacgccggcagctcctcctccccacgccgtccttcccctccccacccggcggctcctcctccccacgtcggcggctcctccccacaccggcgagccccacgccggcggcacctccccacgccggcgaacttctcccaacacatgccggcaatctccccacaccggcgagatcttacccccatgccgacaagcttctcctccgcactgccggcaagctcttcctctccgcggtggagcttctcctcgcgcatgtccccatcctcacaacgccggcaaacctcgacggctggatccacatcagccaccgccggcgctcgtcgtcccctcgttgcctcccgcaaggtgatgttgctcctgccgacgtggggaggagccgccggcatggggaggaggagaagctcgccggcggcggaagatgaaggggatggacggcgcgtgaagggtgtcggggcggtgtgacttgcgaagggacggagtgtcacggaatggaacaattcgcgtcctcagtggtatgttctgaaattgctgcgaattgggtggtaattcctgatggtgctgcgaattgaatggtatattctgaaaattctcaagaataagaggatgaaatggatttgggatggagggcgaaccacaggatgtggaagatgtgactccccgccaacggatccaaactccctgccaccgtagccacatcttttcgtcgccgaggtgcccacgaaaccatggtaagtggaggcaaaggggataaaggtgcggcggggagaggaggtcatggcggcggcgaggcaagagaggaggaaaccgagtgaagtgggaatttgggattgactgattttgaaaaaaaaaaaaccctcaaacttcgtatatacaacaaggtccaccgcagcgatctctcaccgttgatctaagctggaatcgcgcagggccacgtggaggggctatttgcacgtggatccgcatagatttcgatatttagagattcacagtgtcctaccgagagctaacggtgggacccacagaataaacgatcacactttctctttttttttccacctcaatcccttctcttgcatgttctgacaagtgggacaaacaattactccagtttattccataacaccggttgcttcggctaggatcgactcttctcttctcagcacatgttattt

SEQ ID NO: 14827 - DNA, 16034 bp, Oryza sativa
agctgtatatgctttccgatgtttgtttatctgtgtgtgtgtgcgcgcttctttccttgtgcagaagagcataggaattgagtgatttgtaacagtcttaattagtcgtagatgctgatcaaatcaagaaatgggttgcatattactttcaaattagcaaattgtacattcatgaaagtggtagaactaaagaagcatacataagctcaaagagaaattctcgacctcactaaaatcctattgaaaacccaccaggatttcaatcctattaaaggaaaatgagcaattctaaggcacaaatctaatgaaccaatggtagcatcttgtccctgattgcaagaaatcatggacaagctcaaaatcgcggcgaacatggttagcacttagtagctagtacgaaacacctagaaaaactttgaaagaaatacaatcttggctaaccgaatgcacacttttggagaaggtgaggagccatacctacatgggcgcgacatggcttgaacaggaggacaacacagcagcatgccgacggcgtgatgattcgatgatggcacgcatgggcgtcacaggacacagcttaggaagaagaaatggtgtgtgccgtctcaggtcatcatggagtagtacatgatgtttgctttgctaggggtatttgagaagagtgtgttttcttgtcttgaactgttgatgttgggggagaaactgtatttgtcggatctgctacagtactagtactcctactcttactccgtaggccggtacatttctgttgggtggaaatgggaggaagacttccggacccatcatttcgcttattcgcggaataagccaagcggcacatttgcaagcgaaaaataatttgtgaataaaatttttatatttgtagctatgcttatctctgaagtcgatatccggcgtcttgtcttggcgcatgttggcttgtatgttgatattgtatcttgatctattgtttcatgtcccctctcctcctagggggccttatatttatactcataggtatccccttgttcaagtagaactagggaaaccaatatggatacaatccgagtagtccttgtcgtttccatgtagaactctattcatccttccttatgcggaactcctcctatatccgaaggttgtttccgtataagacatggtatgtggtgggtcctgccaagatttagtcaactactataaggtatgtggtatccataacattgacaatgtgttcttagcgatccaaaagaaaatgctgaaaaataagcttcgatgaaaaaaaaaacctcaaaatcagctccaaatgtaacattgaaaattcaaatttggctgataagcataagcataagtaaaaatatgaggcccttcctctctgttctcataaaaaccggtactcggtaggagggatgcagcggttgataagaaaagtaaaatgtgtttgaaactcacaacgcgggaaaagatgtagtgcaaactacatatatagtggaaacatgaaaactaccattagaacgtaaaatggatgttcaatattcgtccacgtatgagtaaaatttttactcctgataatgtggacgaatatcagacgttcatttgatccaacgatagttttcagattcccactacatatgtagtttccaccctatattttccccttactacgcagcaaacatgtgacatagaggaaatccaaaatcagaaaatggaaatgctaacgcatttagaaatgattagactcatttcttagacacgcaaacaataataagagagtaaagcacgagagctgtcttgtttgtttgtgtaggccgaaattcaggcccacccatttgtatgccagaattgggcccatcaagacgaggccaaggttagctagtgggttgggctggtgtgggatgcttccaggtgatatttataaggcaataagttcatattgattcccttaactagtaattgaatctgattcgtatcctataccggatatctcgatcctcaactattaaaacggctacaatttgaccccatcgataattttagagggtggttttgccaacgtggctcctacgtagtgattttgatctagtcttcgtggtgcatggtggtggtttttttttcctttcctagctaatgcctattaagaatcaccgcaccatctggtgttagtcgtcgtaaaaaaaaaaaccggtagattctcgttagcgaacttgtaccagaactgctccgtccgtgtgaagcgcaggtcgggggcgtcaaagaagaatcggcatgagctcgatctcaaagcagaaaaatcgccatgcctgcgccgtctccacgcactcgaacgtcaccgacgaccccggcagccgatccacgaatggccgccagaggcaccacgtacgagtcgtacgacaacacacccttcgaagctcccccaggaggacgaacacaattagaagtataatagtataatagtgagttataagcctactataagtttacgtggatgagagaggtaacaaaaaaaatcaagagtgtaatggctctcatgcaagagctagcttaacacaaactccaagacaatacattaaatgtataagtgagagatagagagaggaaaagaaaaattgtagccgaccttataactaatctattatatatgttggctttaaaatggactaatagtatgaagtgagctctactaccatctttgctcttagctgcaccgggttcctggaaggacctgatcacggagttgatggaaggacctcttgttggttcttttctccaacaagagagagttggatgaagattaagatttttgtggcacgcttttcaaactgataaacggtacgtttcgttctatatgaaagttgctctaaaatatcatattaatttattttttaagtttgtaataattaaaactcaatcaatcatacgctaataccacctcgttttgcgtaaaaaacttaatattcatcttcatcttcagaagaaaagaacaccactatatatactatatgtgtcggttcttaatctaaaaccatcacctatattttaagaataggtgataataatttagaaaaaaccagtatctatacggagagaaatatagctgtcggttccagccccaaaccaacatctataatatattataggtgttatttttcttaaaaaacagcacctatacgaaaccgagccgagccaagccaaggagagggatcattttccacccgcccccgcagctcgaccctatcgttttatccgcatcttagcgctctctctcccttcccttttttcagagagtagcatagcgctgtccctttccgtccttctcttctccttcttctcttctggcaaggtgtccacggcggtggccaagggcaaggatagcagcggcgggtgggacgaggagtcctccacgtggtggtggtggccaaggacattggcggtggccaagggtggtggcggcaacagtggtggtggtggaggtggccctctctctgcattcgtcttcccccttctcctcctccagatctgccagccgacagcagtggcgatggtggtggaggtggcccttcttctgcatccgcctccccccttctcctccaaatccagtgacggtggtggagaaagctggcgcagagagtgaggtggcagccggaagcctaaaaggaggtggtggtggaggccgtcacactcctccccccctcgccaagcacttcgttgttggctccattgggccttttttttattatctcattgaatactatacatgttggttgtggggtaagaactaatacctataatttctgtatgtactggtttcagaactcctaggtatagatgccaataaattagtgtcggcttgaaaactgacacttactggcttttaaccagtacctatgttggtttctgtcgtagtggcggccatgccctcgatcttgtggaggagtctcgtgctcgccggccactgtgctggtggaagatcgagcagagaaaagcagcaaagcagcactgaattcctccttgcgtgacgccattagcgccatagttgcaaaataacccacgcagccgttgcaaagattaacccgtgctgagctcccccccccccccaaaaaaaaaaaaaatctttctcttgagcttgttggtgctagcatctgaatggagcctcgctgaagaatgagccggtggaactcattggtgcaggcagagctcaagctagtgctcgggtccgttgtgctgcacggctcatcgtacgctctggaatctggatgcctcgcacagggcagacagagagggagcgaagagaagcagaaggaaagaggaagaagaaggccctgaaaagctggctctccattactttatttttttttctaaccaggcataccaagtagacgaaaaccacgcaaatgctttgcgccgagcgtccgatgcaagaagctatcgtcggacgcgcgcggcttcgttacatatctacatagatatatgtttgatgatgtcacagtatacaacatgcaaagaaatagctacaaacttgattttcaaacaacattttctcccgtactatttattcgatttacgatttgattgcaccgttatattcgttacaattaaatctctataacaagatctcacatgatcatattccgatgaaatatatatatatatatatatgtttcaatcgttataattatatgtttcacgtatgagaaataaatgttccaattaggatttcactttgttgcaatttttaaattttctattgcaaccgatctttatttaatgtcaccgatagtattgttaagatgtttcaacatgtatttttcaatgtttcactattgcattcataaatattacctacaatgcatttgtcgagacatgcaagaaacacctcgtgcaacattcacaaatgaaataatgaaacatcacaaaatacctatttgaaacatcctgtgtgtgcaacactaaaaaacaccattgttaaaaagacatgaaaaatatacaacattgtcgagttccagctgaaacatttgttactcattcatgaaacattgaattataatgctggaaacatatatttttttaatcaaaatataatcatttgagatgttattgtaaagatttaattataaagatttaattataataaatgacatgaaaagtaagtcacctaaaaggtttctaaatgctaatataatactaatcaatacatgttagacttgttacaggatttgctgcatatagtgcacacgctgacacgcatgttgcatgctacagagttacaatcacaggcgcacggcaggatggcatgcatatgtcagcactcagcagcaagcaaaccaggcatccgatattaggaaaaatatcggacgtccgatgcggagtcgcctcccgaaaaccactctaatttggtaaaaactatcttagaagtgtaaattaaactgtattgatagttgagagcgtacgatatcaggttttaaatttaaagggtgtgatttagacaaacgtgatagtttgggatgtaaaatgggcttatcccttatcgctcaccttcaagagtcttgatgacattacgattcattctcatttagaaccctagctactttccaccccaaaatcttccttggtgccaccgcgcatcccctcctttcctcctcctccgaccactgtgcctcccctcctccttcggccaccgcacctcccctcctccttttctggccaccgcatctcccctcatcctccaaagctctggtggcgtggattgatgtttggttttgcaaatcgagcttggtagcgtgaatcgatctccgagggcgctagtcagacgctagcggatgatcgagctcgggtggtgtgaatcgatctccggccatgcaaatcgagcaccggtggtggatctagaccaagcggtgtggcaggtcgatcatgggcggagcagagaagtggacgatggcgagctcctctgcgcggcggtgtagtttgggggacggcgagctccctcccaggtctccatgatgagctccctcaccggccaccaagatgagctccctctcttccctctctccctttccttgcagtgcgggtcacaaactataggctagaactgacgaatcctagcacatcccaacgaggaacttgtgcccaaactaggatccgcgtacttcgcagagtaacgagggacgcagacgtggcatagaatctttgacatagctcgttgggggtagaatgacacctaatcacactgtgaaaagccctaacaagtgaaatatcacttgtccttataaacaccgtgctgttacggtggagttgtggatagatgtcttcactcactaagttcaaatcctgatgcttaaacatattatgcacacaaaggtgagctttaactaaaattttagcgagttgaaagatgtgccgctagactccatttctttaagtttatgtgagaagacaaatttgtgagtgtatacgtacgatgctacgtgtgtaatagtgtgtgtgcatgtgcgtatgacatgtaagtggaagaaactttacttgtccttggagtgccctgttattctttgtccttccccattcctcacctcaaacttaaacatccgcacggtcaccaaaaggacaacacgggaggaaaatgactgaatcccaaatcttgcttccctatgtttaaattgtagttttaaatttattgccaacaaatcttgcttaccgatataacctattatctccattttgaaatataaatgcttctaacatttaaaattagtactagatataaacacctctagcactattaggagtgcgtactatttgtctcgttaatcacgtctaatttattttttctaccttatgtccaatcacctttcgacttccaaccaaaccaactatctcttattaatattttttttctcattctgcatttatgctgaaaaatcttattcaataacatgtattaatatttatttttcacgttcttaatctatgctgaccaatctagagataagaactgaaaaattgatagctcctgatgagaataaaagattcatgtgtgatgcagacagtcatacatctcgacataaggaatactttatctgtcccatgaaaaatcaatctagtaattgtataagattcttcttagtaaaataaataaggaatactttatctgtcccatgaaaaatcaatctagtaattgtataagattcttcttagtaaaataaatgtggatagactcatatctaaattcattatagcagaaaatatctcatttaatactaagtttggtttttgtcgggtgagtaccggagtagaacgcagacagctctccttcccgcacctttcggtggtcggccaacccagccgtacggcactgtggcgaccgccggatgtgccgtgagttcgcaatcaacgagtcctcctgcgtaataattcacgatgtaattggacagaacaagcaaagctgcacgtactccattcgtcccgtataaatcaaatctactaggacagtacagcactccctccgtcctaaaataaatataattttacattgttcatatttatatatgtttgactatttgttttatttgataatcttttataattaatatttttattgttattagataataaaacatgaatggtactttatgcgtgactactttttctaatttttcaaataagatgaacggtcaaacgttggacacagataccaacggctgcacttattttgggacagaggtagtactaagagcaagtttaatagtatatctaacaaccggctccaaatcatttgtagtcaattttataggcaattcatacaatagttacctataaacatatactgtacaattaataagtctcacctgtcatacacacatgcatcttagagtccatgctaaagttggctataaatctgtagccctctactcttttctctccttttttacctcctcaaaatatgtttataactggcttataagctgctaccgtcagcagcgcgacatgcacaataaaacatgtattgtggtgcacggtgaatggcaattaattaagccgatgactgctgccgtaccccccaccctcccgactaaaaaacctaaactagaatttggatggatgataatctaatacaacgaattcgacatgtataatccaaatccaaatcctaggttagttttttttaatggagttttttttaattggacatctagctagggatgaaaacggtcggaaacgatacattattttattatttttttcgaaaacggacgaaaacggtcgggaaattttcatacttatgaattcatctatttagtgtcaatttcaatgccacgctgacagaaattaaaaacactaaattttgaaaacgataaccatcgctaaaaatattattattattatatagttttacggaaacggtgtatatacggtccgaaaatttttataccgttttcaccctgcagccttgatgttaccagtcacttgacttaatggctggcaggcaggcttatcacttgagtcgacgtacagccccatgatcaacagttcaaccttagtactccaaagaagtttattttgacttctttatgtaaatctaaaataatttttatttttatcaattattacatgagagtttgtaaaaataaaaaataaatatattgagagtagataaagtagaaaataattatattgagatttatccaatttaatataatcattataactaaatactctatgtcctattaaaaaacaacttccggggatgaacctggataagcatttatccagatccatccctacaagttttttttcattttttttcttggacggagggtgtaactcagaggattatattttgctcaaagaaatatgcatgtttcaatagcaaaatttcggttactaaaaatcaaaattcggttttttgcaatcatggaggttggagacttaaaaaaaaccctgtaaaacaaggcaactaagagagattttgctttaatttaagctcgcaacaagcagccaaagaataatggcactagcaggtacctctcctaggccaaaataagttgatttgtatattagttaaagtttatctagctcaattggttgtttgtcagatttcttgtggtgaaaccagtccaaatagatgcaagacctaaacttgataagagtgttcgttaattagttttttcagtagtcactattacataacatctaataagggacatctcatatatgacttataggtgtcagttgggagacataaccgacatcaatgttacttaagaggcccgcatataaaaatctattttcgcaaatagacctctaaatacacctgtatacaaaaacaagcctattttcgtagacggaacttttaagcagccacatgagaaaatgcattttcacatgcaggcctctcaaagccccacctacaagtctgacctttgtcctctcttccctctccactctcagcgccttcaaaatgtttaagtctcatccttatctcctcaccttctctccctcacctttaatttttccgtagtcttatttcctctctctctctctctctgtcacactccaatccggcaccgccgtacaacggcacctgacaggagcgtgtcgtaggaaaaacggcgcgaaccgcttcctacgaaaccgcaattatagtaccagtcccaggacatagtgctggtacccacggtgacaaatatgaatcattgcaatccttaaaataaataaaggacttatttaccttaacttatgttgtagcttagaacagcccgagaatgcaaccgacgatgcggacgaggaaaacaccaacagcagcagcagcagcggaaccaacggactaacacccaacaccacaggcgatggctgggaaccaggacgaaaccctaatcttcacttcacgatggaggaactatatatatatatatatatatatatatatatatatatatatatatatatatttatatagagcaagggtgagtactttcgtactcagcaagtcacgggaatcaggtgtttaatgcaagcttggaagagaggcaagattgttttacaaatcctttgtttgaaatcattttgaaatcactaagtgatttatttctttctaagtttgggtcgaaaaggagacttgcgtctcgattcgacttaagagatgctgttcaacaactcaattggtaatgtattgacctcccgggtcaaatcattacttcctggctcccagagccatttcacttgattaagcggctcccagagcctttttcattttctcggactcccagagtccagctgcccagcagcacaacaatccgcttccactcgggaagcctaatctatgatgcccgcaaacattccgaatcacacagattcgtttctgaccactcaggtcatccatctgccatgtaggctgattctggtgacgattcccaatccacaacaacttttcataaagcacaggcaaacaaatctacgcaacggaaaccacctcacatccgcccatgaccgtgggcacggctgttcgaacagttagttaacctctgcagaggggtacactttacccacaagatacgaacttattccgaacacccgtcggtatcggaggttcgcaacaaagcctttcccaagccgacccagggttacctcatgccacatagaagcatcaaatcctcacataaatataggccattttagttttcacaaatcaaactccaaccacctcgatcggtaatctggcaagcttcgcgttcttgccttaccaggaacccgggttggctccaaccgaccccgccccggcgttcccaactattggcatgcgaggtttccctgaaccgactagttacttagctagggtgtcccataccaccttgtggttgcactttgttatacttgatgagtttcccacaggaatcggtccttatatgcgaatacgggacaacgccatgcaggcaccacccccacatcgcgagttttcataattcatttatttttaaacacaccgacaccacatgtcgggttttcaaggcttctcaaacccatttcccaatttttcgacagtcaacggtgtatgtgggatatttggtatacgcgctcagagagcacggatacggaagtaccacaagggtggagcggcaaggaatcagggtagtacaatctacaggaattagtgcgactactgggtaggtccgtcggtttggcacgcaaaccgaggccaagcaaattaagtgtgtgattctaataatgcaagttacaaacaaaataataatgattttccaattatatgagcaattggtcaaagggtgacttgccttgctcaagatcttcacgaagcttcatgaatctacgagaaatccctgatcgacgaaaatccggtaaccgcggctatacgcaaacagtcaaaacctaaatgaaagactaaaagaaagaccctatttagactaattaatagtgccattaaatagatctcaattttacaggagtactggaagttgacggagtcaatcggagctacggattgagagatatgaattttggaagctcgaatgggattttctggactaggaaatgatttatctgaattttctggaatgaaaggaatggtttatggaatttatagaaataatattctcaagaatattattgacagtcactgacgtgcggggccaagggaaatgatttatggagcaaaggaaaaaggaattgatttatgaaaaagggaaaaaggatttattaaatcctttttggaaaagaaaagaaggatggatgtgatttagacttgggccgagcgaagggggcggggcccaggacatttgcggcgcggctgaggaaagtgggccggcgcacgggtgaggcggtccaaggccgggcgcggcccgcgtgagagggagccgaccgggcggaccgcggtccaccacgcgggatccggggcgggcccgcttgtcagcggctcggctcaccgatggcggggtgcatgcgagcgggacgctagggttagggggaggggcgcggtgcgcggtggacgcgggtgcggcgggcccacgcgcagcctctcggctcgcggtggaccgcgcgcgcgcgagcgggagtggagggaggcggctgaccggggtcagcccgacccaatccacgccgaggtggcgccaacgtggcgccttcgtggctgccatgcgggccggcgagaggaggaagacgaggccggccggaaaatggacggcgggcggcggccgacttcaccggaagcactacgcggcgattcgatcgagagggagtttaccgtacaagggggagcacggcaggggatgagccaacggctcggattcttcgaaaaggggccggcgacgacgaatcgcggcggcgcacgccggcggcaagaaaagggggaaacggcggaggggcgatgaggattcaattcaaggaggtgggagcatctccggggttcaaggagcccatttccggcgtcggatggggtggaagagcaccgaggagggccagcgacgagcggcggcctccgggagcgggcggcaacggcggcgaggccatgccgggcggcggcggggctaggggcagcgtctacgtgcgttcgagagtctagctgagctaccacgcgagccaaggaggggcgagggcgagcgagaaaaaggaacgggaggaaggcactaccgagccgggcgggcagtgatgggcggtcgacggcgcgtggcgagctctccagccttggacctgggaaggggaagaagaggtgcctggagtcctcgtctcgcgtccccgcacgcaccggtttccctagtgcttcggcgacggacggtgagggcgactgtagggcaggggcggcaacaatggcgcggtggtggcgacgagggaaaacgaatgagggagatggggcgactgctgttttataggcgcggggtggggcatcgaggagaaggaactgacattggggcggtcaaggggagcgagctggcggtcgtgctcggagctagcggccaaacagcagtggaggtgcggtggctgaggttggaaaaagagaaaaagaagggggaaagaggagcttgaccatgccgtttcggggagggagagaagcgggagcgagagctctggctcctggttttggacgggtgcgggtggagcggcttgggcacgcgctgcagagctccatggaacgccatggataggtaggtaggtcaatcgatggacatacatatagttggatttgagaaaccgatagttagttcgagtaggttgatagagcgataggtagataggtcgatggatagatagatagatgggtagatggttagataggttagataagcggatagatcgatcgatggacagggaaggattcaaggacggatttgacattctcggaatccggagaagtattggcaaggaattcaaggacaggattgaattccggtgtttgatttcggaagttgaatcggaattggaatcttcaggtggaggattttgatggcgatgagagggaacaacaggatttgaattgagatccagggcatgacttagactcacactcaaagaacgaaaattttcgcaattaggattttctcaaactagtttttaacgtctcacgaaaagcggagcgttacagatccaccccccttacaagaatcttgaccccaagatttgaaggtggaccacacacacgaaaccaaaaaggggatcttcagacttcatctcagcttcatactctgttggtctttcttcatctcatggttgcacactagccacaaaacgatctggtactctcactcacttaacatgcttcatcttactgtgggtttgtttcttcctgcggattctgttcttcagcttgctcgagattcataacttttccttttgtttccacttgcacatggttcagatgactttgtccaacaggcggtgaggttagcgagacagatccactgtttggtgactttgagctttttggtccgggtacgctagggaggctcgctgttggttgaacttgctttgacttgactttctgagggcagtaccatgaatagtgtcccatctcatggcagatgaaacattcgactcctgccttatgaccacgtcttttcggaggtggagggcatgacacggagttacttccttcaaggcttttactgttgatcactgtggtttgctgactagattctgacattgtcgagcgagacgtagaaccgaaaccattggaatactgaaatactctctgatagtactgtgctggcgagtttgttttttttgacacaaaccttcttttgcttgaatctctaaggatattactttgcgtctcttctattcttgcatctcttattctgcatcttctagtaacaaggacttatcgaccatttgctgaaacatcgagaagtcgtgagccaaaagtttcactcgcagtttcgcatccattccttttaaaaatcttctgatcttctttttatcagtgtctgcatcttctagggcatatcgggccaatctgttgaagcgactcaaatactcgttgataccagaggatccttgcctgatatttgcaaattcttccttcttcaaatcaattatgctttcaaggatgtgtgctgagcgaaagacttatgcaaattctgcccagacgatggtaccagcatctgtatggttagcacaatagttatcccaccaatctgcggtaggtcctctcaactgatgagcagcgtaaagggtcttctcatacggagtacactgtaccagatttaatctcctttccacatctttgatccaatcgtcaccttcaataggctcagttgtttgagagaactccggcggacgtgatgtcaagaaatcattcagttttgatcgcccattatcttgaaccatatggggttgacgctcttgtgtgtgttgttgttgcatagcaattatattctgaatcattccttgtaatatctgagtttgcatggctaggatttggtgaaggtccatgggtgggggttgattacctcttgcattattaactgattcggaagcaaccgtatgatcactctcagcttcttgctcatctgcttggttaactggttgatcgggaatctctgactgaactggctcttcttcaaaaccaaagcgattaggagcacgggtttgacgggtagaacgacgagccatctacttcaaagcgactgagatctgaccgaaccagaaatgggataagaaaaggaggaaaacaaaaacactagatcaaaacgtttttcgaaatcgcagaagacataggtggtgtattccagccggtaacccaactggtctaacacctgaacacgggctaccaaacaaaactcacacacgcactagttcaccacaactcctaccgagcgggtgacggagctagggttgcctaccaacaagggcttaactaagacgcctagaggcttgagcacacctttcttcaactgggcgtgaagacaggtttactctaggataacatgtcaaaacaaacgactagcttctacttttggacacaaaaacatttttcgcaaaactagagctaaaggggacaacgacaccttagctttcacaaatagtttttgtactcaattaatgccatcctattcaggggtttcgatcctagggccaactaatgctctgataccatctctgtcacaccccgatccggcaccgccgtacaacggcacctgacaggagcgtgtcgtaggaaaaacggcgtgaaccgcttcctacgaaaccgcgattacagtaccagtcccaggacatagtgctggtacccacggtgacaaatatgaatcattgcaatccttaaaataaataaatgacttatttaccttaacttaggttgtagctcagaacagcccgagaatgcaaccgacgacgcggacgaggaaaacaccaacagcagcagcagcagcggaaccaacggactaacacccaacaccacaggcgacggctgggaaccaggacgaaaccctaatcttcacttcacatcatcttcacttcacgacggaggaactatatatatatttatatagagaaagggtgagtactttcgtactcagcaagtcacgggaattaggtgttta

SEQ ID NO: 14828 - DNA, 1998 bp, Oryza sativa
  unsure (1)..(1998): unsure at all n locations
gagcccattggattcactggacctttanaacctgacataccctggnaaagncgaattgcagaagaggaagcaacagaggtgaatgaggcaaggagtcaggtagttccgatagttggaaatcatgttgatgatgataatgaaatggcagatggatcaatggggggaggtggagaaaagcgtacaacggatgctcaattagcatccttggtgcggttctgttttcgagacaaaatatatactcggagggagtgtgaggagactttgttgatgaatggattgagtgttgatttgttgcaccaacattcaaaggagtatgatgacacacatgaagaggagggatatgaagtttagtatgccgtaaactcagatgacgatcatctagtagccaaaatgtctcaagaagaaagggaggtgtttgagaaattagttggaccccattcagacgttgttcacttcgaggatgttagcgattatgagctaccagctgttgatggaggagttacatacaatggcatcatcgatgcaatgggtgaagacccaaaaaatggtttggaatttaaatctcttgagctattacagatattgctgcagagttactcgatcagggtgcatccgtccattccatgtgaagcactccaacgcttctaaaaagtacacggtggcttgcatcgaagaatcatgcgaatggcaggttcgtgcatggaagactaatgatgggaggtggagagttaccggtgtaggcaaagagcacacatgttgtagtgctgaggcttctggcaatcacttgcaactaacttctaagttcatcggtaataggttgcaaccatttgtccgagctgagccgacattgactcatgttgctatagttgaggctgtggaggccatatggcactatcgtccttcgtacggtaaagcttggcgtgcaaagcaggtggccatgaagaacatatggggagattgggatgaggcatatgttcggctcccaacgcttctaaatgctattaaggctaagaaccccacaatgcattatgttgttgagcctcacccagagaggtcgaggccagtggatggggtaatgagacgtgtatttgggcgtgccgcatggatctttcggccggcatggactctagctggcatagctacagatcccgaggatgttgaggagatgaacgagtatgacacccacactcgagcaagagcgacggtcaagtacgggcctatacgtgaccgagtggtgagtattaaggctcagagttgttcatttcacattacacctacatgttctcacaatattaaatccacttgcagacacgtgagctgatgaggtccgtgaacgacgtgggtgttgcccttggcacacccgctgggtcagagaatgaagttgggatacttcggagcgcacttcaagtaattaaccaattagttcaatccatgaatcatttcacttgcctctaactaatttgttttgttcttgcagaggctaaaacaacgaagtcggatgttagcggcaagacttggttgtaggtccacagacgcagttgacccacaaccaagactaatgtggacacaggccggagaaacaagtcaacaaagagctgaagaggaaggggaggaagaatatgatgaaagggaaagagaagatggacagagtgacgaataggaagaggaacaacccgaagaaatcgggtcatctcagcttgcaggtgccccgcagccatcgcaaccttcccagggtcgcccgcaaagaaagagggccccggtggaccggtacacacctttcactagtgcccgaagaggtcggcactagtggattactttgtacttaacactctaggcagcgttagacttatatccaactctagatcatggttgatggatgtccctgaactctatattttgtgatgggtgatggatgtgaataactcctaatacaatgatggtttgagggatgttcttgttgctttgaagtggtaaatattgggtggctggcaaattttg

SEQ ID NO: 14829 - DNA, 5157 bp, Oryza sativa
  unsure (1)..(5157): unsure at all n locations
cccccagttgagcgcctgtgaagatggagccgtaggcccgctagtccgctgctgtttatttttattgtcaggcctgaggcgcctttgtaataatgtaaatattatcgatataataaagatgtgtcttttatatcatgtttgtgtggtgtaccccggcttttcctgggacggggattaatacactagcgttcgggaaaaggcaattttcccggtcgcgacagcatgcggcagcggcgcaagacggcggccgacggcgaccgaccggcggcggagagcggcggcgtcgcggcgaagcggcagctacgcggctaagcggcggcgcgacggctaaacagtgcgggagagagagagaaagaggaggagagacctcaccgacaacgatcgacgacggcgagcgacggagaacgatggcgacggtgggacgagctccggaacctcctaacgaacaaaaggagaggggttagagggagagaggagagtgcgagagggcgagggcgccggcgcacgacggggatggggctccggcggcgaacattgacggaggaggggtggacgaggtggacctcggccgcgcgaacccaacggcggcgacggcgcggtgcggcggcgagtgtaacggcggctagaggcggccggagtagcgggagaggcggcggcggatgggcgcacggcgcgggagcaatggagggcacgggagagagcggtggaaaaagaaaaaaggtggaggggagtgcgggcatgctttataggggctcgggagagacggacgtggccgaggcgagcccgatttcgccggcaacgtgggaggttggaggtgggggagagagagaaagagcggcgggattcaaaatttgaatcccggccatctcggttgagggcgcggcaagagaaaaagggggagtgggtgcggaaggcncggcgcacgcacgggcatggccgacgtggaccggaggaggcggggtgcggcggtttcagcggcgatggcgacgtgggcgggcggccggaggttggggaagggcccgacaggtgggccccacctgtcggcgaccccggggagaggagggaggcggccggcctggctgggcctcggcctgcggccggcccagcagggaggaaggggaggaaggagagaatgggccggcggcccattcgaaaaaaggaggaaaaaagggaggaaaaagaaaaagaaaaaggaaaaaggattttccctggaattaaaatattgcttgctcaattttaaatggttaaaattatttctagagctctgaaaattccactaaaaatcctgttaatgaatttcgacatgtagaactcaagaaaaattccacatgtcaaatccgattattatttgcattactttcttagggttttctcttgattgcacctgcattttcttggggtcgtttataaattaaattttaggcttgggaggagaacttcggggtgtgacagccgggccccacaacaatcgcgaaagatcccgtgcgtagccgatagaactagcaccgggcttctccttcccctccggacagcgcgtggcccatctccgggttgactgcgcgcgcatgtcgacgttcggccgccgatcatgctttcctcttccgtggtcacctggtctgtggctcctctccactccgctcaaccttcgcgattgattcttggatttctcaatcggtccgtggaggtcatgcccgatccctatcaattcggagaacaactcgcggtttcctttttggcgtaaatctagtcgaagtcagcctctgatttgtttgaattggacgacgacgtgaggtgcctcgctgagtagtggtcatcgatcgctgctgcagctgcgagcacgagcagtgccgttgctgccgcggagagcgccatgagcaccacctcccaatgtgctccctcggccaggtccgagcaagtcagcctcctcaggatctacacatagaacaaacaaaatgcaagtgccttggcaagcttggcgttggaaagcttttgtgtgtcacagactgggaagaaaatttggtaagactgaagtcttacgctcctgcaaaagacttaatcccttgtgcaacacgtgtcccgtcacaatctcaaagcacagaactccctcaaaccctcttaactatgcatcctgacgtcgttagcacgtgagaagacgaacggacgcggcgcacgttgctgtggggagatggacgagcgcggcgcaggagatgaaccggtgctcctgcgtgaggtgcggcaagtgggcgaatcaaaccctgaagccggcgaagcaagccaaggtgagaagatgcttgtttttactatccatctgctgttgattcttccatatggctaatagattgatgacttaaacacgatttttgtttcaatttgattccatctagtgttggtagtaaccggttttatgttcaactctattggccatcatgctatgggtgaaagctcggattgcaatcttgagggtcataatgtagagttcagatcagattgtgagaaatttgaacaatttgctcaatcaaatataaaggtaagatgctctttttataacaaattgaccacatccgtgtagaagtcatctataaactcattcaagaaaatattcgatttaatatatgcttccattgtacttataggctaccaatcagaatgctccttgcgagcaagtgccaaaggttggcatgacctttcaatctgaggatgatgcatacaatttctacaattcatatgctagaagagtgggctttagtgtaagaaagtgccattgggctttagtgtaagaaagtgccatgttaactacagagcagatggtactttatcatccaagtacatggtttgtagtaatgaaggtcacaagaacagtaatccaacacaccagcctaagaaagaacgtgcttgtacaagaatagattgcaaggttcgtgttcagttctttatttcccgggaaggtatttggaaggtgcagaaagttgaattggcacacaatcacccttttgtaagtcctgacaaggcacacatgcttagatcacaacggcgtatgtcaaatgccgatgaacatataattagcatgatgcaacaagcaggagttaagccagctgagatatttgaattttttcaacggtggtcagatggagatgaaaatgtgccattcttacaaatggattgcaataactttattggttgagagcgcaaaaaatatttggaaacacaagatgcacaaacattattggagtacttggataacaaacaagcagaagacccttctttcttttattctttgcaattggacaaagaggatggtcgaatttgtagtttcttctggacagatggtcaggccattgtagattatgcttgttttggggatgttctctccattgacacaacatttcaaacaaacaattctaaaatgccatttgctcctattattggaacaattcatcacaggcaaactattctttttggagctacattattattcgatgaaagtgctgattcatttgtttggctatttagaaactttctgaaagcaatgtctggaaagcaacctgaaacaattttcacagatcagtgtgctgcaatggcaaaggcgattaggattgtattcctaagctcaagtcaccgtctttgcctatggcatatcactacagaaaagtaatctttagttaccgtatattttgttaccaacgaatttggtagctacatgtgtatcaatagttaccagtatctaattccctggtgactaaaagatctacaggaattcacaccaacttgtccttcacaaaattgataaacgtgataaccatgggccttctagggccttttgtcaccgaggctaaggccttttctcttcagacctaaacctagcaagcacaaaaaaacccgaggtggaggaggcggctgcgncggccgcgcgaggtggtggcggcggctgcggtgcgtgcgcgaggtgaagaaggcggctccggcggccgcgcgaggtgaaggcggcggctccggcggccccgcgaggtgtaggagacggctccgtcggccacgcgaggtgtaggagacggctccggtggcccatccggctgcatcaggaccagcatcgtgagtccagtgagatccattggtagtggttgcggctagttcggagatccatctgcagcggctgcagcaagctcaggcaaggagaagcatcctgtttcacagctacatcgacgggttcacgatcccttttctaggtttgtgattcaaattacatacattaattttattattaactgaactgattttgagcaccatagaaatgctttgaactgatatttgaatggttgttttactcttgcacgtttgatttcctaagtactatggttttgtggattgattttgttgtaatcatgttgaagaaattggtgctgctatgtctaatgagagccttgaactacaatagtttggcaaatgcctcagtttaggtgctcacttgccccaatttttggtttgggtgtgatatgattgaatttgttgtgtgatgagtggttactgattattggcccactactcaccatacgcctaacagtaataattagtggtgacaaatttctagtccgaatttaattaaagccattcactgcttccatgccctgttttgatttggttgtgagaaatgttttcctagtagatgacactagaataagagaatatactacagaccaatatagacctatatatggtcttgcaatatttaatacttgtgttagttcagctatgtataacataagaaaattgcttggtctacttacaaatatatattaattagtgacatatatatgatattatatttcagtccacaaattaatgatagctagggtgcttgtgcaggactttaggatatggataagagttggatgaatttgcctgataggttctcacaaggttatatagccggtgtgaatgcatttaccgaattttcctgtcagcaaaatagagacaaggatgcactgctttgtccttgcgaaaggtgtatgaatataagccaaaaacctatcaatgaagtccgaactcatctagtattatatggcatacaagtttcatacaagcattgggtttttcatggtgaacaagtggacctagatattgatccagttgatgagcctatcaatgatgaagatgatgaggatt

SEQ ID NO: 14830 - DNA, 758 bp, Oryza sativa
cctgcagcccgggaggccaggccaagaacaaaaaaatagaaccttgtcttttgaaccatgaaaacaacatactttgcaagcaaggaaacaaaaattggtgtcgtctttgcattttacatctatttaagttggtctaggaaactgaaaagaaatgttcctcaactatgctaacatctgtcccttgcaggaaatttacgcctggtaagcataaaaagagaaatcacacaattttatgcctaaatgttctgagtcagaattatagaagcttctttctctcaaagaagttcttcagatgccacaactgcaaccccgccactgacaggcagatagctagtgagaagaaaccaagccaagccatccttgagtttgttctcctgttcagttcctgcatctcctcctccctagagaaatgaaacacggataataatgatttaagagatcatattgaatttcacaaagaaatgttttatcattgcaagccataccttgcgcgaagataaaacatttcttcatggatagagttgatagtatcctccagcttcttgagctcaacctccatcatctgccacatatcaaaagataaatgtgtgaacaaaagatatatttctgcaaatactacaatatggaggtgattttgcatgtccacattaacatattagtttacaatgtgtaatactgctgataatgagttgcatgataagacccattgtgatgctacagtcaccagttagagagagaagggaggggatatgattgaa

SEQ ID NO: 14831 - DNA, 5681 bp, Oryza sativa
taggcatataattttacatattttacaaaagtttttgaataagacgaacggtcaaacatgtgctaaaaagtcaacagtatcaaacatttcgaaacggagggagtattgtgatggggccagtgagaggattccaaatgcttcatatttgtcatatatagaaaagtcagaaaaaacagaaaaatatatatttggaatattcctactaaggaaacgatgataaaatccatgtttttgaatttttgaaatattataacatgctaattcaatatcatgctggtgcggaacatgtcatctatgtcgtacttaaaccgtcatttgtgatagtgaagggtctagtcattgatgaatgatcaataatgtgaaaaacttatctgtatcagatcagctgtcgtaaccaataatatcatacacctttaacgagttgcaataacaacctcaccttaaggtgcgtgcgaaaaactcagcctaaggccagtcacaatgggggtttcactggtgtgtcatgcacatttaataggggtaagactgaataaaaaatgattatttgcatgaaatggggatgagagagaaggaaagagtttcatcctggtgaaactcgtcagcgtcgtttccaagtcctcggtaacagagtgaaacccccgttgaggccgattcgtttcattcaccggatctcttgcgtccgcctccgccgtgcgacctccgcattctcccgcgccgcgccggattttgggtacaaatgatcccagcaacttgtatcaattaaatgctttgcttagtcttggaaacgtcaaagtgaaacccctccactgtggggattgtttcataaaagatttcatttgagagaagatggtataatattttgggtagccgtgcaatgacactagccattgtgactggcctaagggtgcgtttggcagcttgtgttcacaactacacctcctctgttttccacgcacatgcttcacaaactgctaaacggtgtgttttttcaaaaaaaattctatacaaaagttgctttaaaaaatcatattaatctatttttcagaaaaaatagctaatacttaattaatcacgtgctaatgaaccatctcgttttacgtgtttggagggagagttcccaactcccctaccgaacacaacctaagtgtattcatcaacgtctttttatgttggaagtgcatatttttaagaaatagagctttaaatgaaaaaaaaatacaaacctttgcgccattggtaagagggagcttacaaatggctgcctgggtgcaaactacggtagaatccaaagccacagcatgcttgctctccagctgcccccagctttccaaacctctcatctgcacatattcaccatggcatggatgcatcataatgtcagagaagtaatcactaaaggatcaattttgacggacaaatatcgaactgaacaaaaacatgtactcctatgtatcaacctgagaagaaagtacggaattcaacttgattttgagcttctctttctcgagttgtacacgcctccttgccactttaccttgcagctctgatatcctagcccatgcacccatgaattccacctatatacacataggttaggagtaaaataaaacataacgacataatataccatttgatgaattgatgtttaatttccaaaggcggcctaaagcacatacatacgtacatttaagcatatgcaggtataccatgtatctcaatttgggaaaaaaaattaaccactgcaaattttgttaacacattaagaaaaaacactattaggctcgttttcatttcgtcgaatacttgagaatttcactgttcactgagctgcaggtgttcgacgctgagagtttgggctgaaatccaacaaactaggtatgtcaccaaactgaacaaattttagttattatataggctcacaaattataagtgtgggtacttataatattgatgtgaacggtgcattcttgatatatatatacctcgaaaatagacagcttgttcttgctgacggcttctgccttggcatttgcgaagcgccactgcaacagccggcagtgcatcatcttcatctgatggccgatctccctattaccacctccaccgctccgccgcgacgccggcgaggacagtgttgccgttgcttgcgctccggtggccgtttccgccgccgccgccttcctccggctaaagagatggccccatccaaggcctattaggctcttcgtcttgcccttgagctccggcaccgtcgccagcgtcgtcttcagcggcgagccgctccgtcgccccggcgacagcgcccactgcgtgttgctggacccgagcaggcgggtggagttggttcgcgctatcaacggcgagggcggcggcttgggcagcttcgtcgtcgtcctcggtgtggagccgccgccgcccctggaggcgtcgctgcactccgacccggagctggcgacgtcggcgccggcgtcgagcctgcggaggtcggacggcgcgacgcggcccggggtgagtgtgacgccggctggcctcgtggacgggaggagccgcatggagcggccgatcgcgctcgcgtggccgcccgacctggcgacgacgaccttcctcgcctcggcgtccgcgtcggcgaagcgcgggagctcggtgcagctccgctgccgcgagagcgcagcaggcggcgcgtccagagagtcttcggcgaggtggtcggcgagcgtggtggccacagacgaggaggaggagggggttgacgcggctggcgcaggggacgagggcgacggcgacgccttcctagtgctcgtgttgccactgttagaggaggaggaggaaggccatatcgtgcgggcgatggatggcgccggatcggggcgcgacacggcgggggagcggcgggcgctcgggcggacgggggagagcgcggcggcggggagaggcgaccggccggcggacgacaggtccgtaacggaggccgacgcccaccgcctcgacgacgacgacgacgacatgcctgcgttgcttgatctctagctagcttgttcgtagcttattaacaaacacgcacgacgtctctgtaacggaggcatgcgtgcgcgcacaaatacgtacttgttggtgtgtgtgcgtgcgttgcgccggcggcggccggcggtggcagctgcacgcacgtagcgatcgagagcgaagccagccggcagggcaaaggtttttgggcgtgcaggacagcgtccgatgcgcgcgagacaaatggaagagcaaggggactacctatacaataaaaatgatctcgtgataagttgttgatgcgagtttatttgttgcatggtcagttactggtttttaaagtataaattaatgtggcttaatcgtggattctaatccctcgaggggatatctcccctcgtatacctgtttcttccaaattcgatgtaaatagttgtgaaaaattctaaaaaaaattgataatgtagagtataatgatacctacttgtccaccaaaattcatattcaaattcgatctacacatcgagaaacaaaaaagacaaatttagatataaacagtacgctactatttatacgctgaatttgtcttttttatatctcgacgtgtgagttgagtttggagttaagattttgtggagttgtatatatgtgttgtatgaatgttgtcaaatttttccagaatttttcataaccgtttagatgttttttgagcaaacgagggaacatcccctcgagggattagaatagtttccgcttaatcctagcccctgaaatatatatggaatggcacatatttggccaacttcacccggtagagttatacccaactctaggggatctggatcccatccacacccgctctacatccgcttaaaaaaatgatgttggatatggtatgaccaatgtccgtccgaatccgctccattttcacccctacgtagccacttttctcatcggtttcagagctagtggattagacaaaaatactatccatcttaccccttttatgtttatttccatggtggttattgttagtagaatcaatcacgatcttatatcatttctccttcaatgagtcatttataattatttctactggtggtagagtactttttaattaaactaatagtttagataatttttgcaggtaatcatgcatcggtagatcgatagcactgcaaaagtactatatatatacttgatgcctaactcgcagtgagctggctgatgtttatcgggtaaaccaacggcggggatccatcaaacgcaaccttggtgagtctcttggccgtgatctccgtcggatggacgatgtcccagaacatgtagcttgttcggttggcgcagtacgagcttgccggagtgcactggaacatggcgttgttgtcccctaggccgcagcatgctgctttcacctcagtataacctaaaaaaaataaaagaaaaaacaccaaaatggcattggattaattcataggagatgtatttttaatatgaaatataaaatattaattatagagtaaattacaccaaattacatatttaaaaccttgtatcacaataaaatggaccgtagatttagtgacaaatttatcagaaaattacaaattatagaccaaatatcacaaactacatctttactattaaagttactacaaaactacggattccaatctttaaatccttaccactaccgttatatatgttggagttataagttgtagttttgttattgaattggtacatgtagttctatggtaaatctactatttaatctttatttttatgacacttcatcataaatttatagttattttataagaaattttgtatgaaatctttaattttgtgatgcaacaataccttaaattttatagctttattattatttgattaaagcatcggaagctttgtgaaaatattcattcttaattatattttcatgtgagcactcatacgtactaaatatgttcagatattccggtatatacactgattgctctttagtctatgtactgcgttctatgattaaatgggcacatatagttccatgaaaaatctgctatttaatatttattttttgacacttcatcttaaatttataattttatgagaaatttcgcattaaatctatatttttttatataacaatatcttagatttatagttttatgataatttgattaaagtatccatagttctatgaaattcactcttaattagtatagactgattgctctatcctttctccgtcacataaaaatcaaatctaagatcggacgtgacacatcctaatactatgaatctggacagatatatctctactatattcgtagtattagaatgtgtcatatgtagtacttcctccgtattttagtgtatgacgctgttgactttttgaccaacgtttgattatccgttttatttacaaaaattatgtaattatcattcattttattttgactttgtttatcatcaaatattccttaagcatgaaataaatatttttatatttgcacaaaaattttgaataagatgaatagtcaaacattagtaaaaaaagtcaacggtattatatactccctccgtattttaatgtatgacgccgttgactttttgactaacgtttgaccactagtcttattcaaaatttttgtgcaaatgtaaaaatacttatatca

SEQ ID NO: 14832 - DNA, 4564 bp, Oryza sativa
aattttataccctgtcacatcgaacgtttgaacacctacatgaagtattaaatataggctaaaaaataactaattgcgcagattgcagctaatttgcgagacgaatcttttaagcctaattgcttcatgatttgacaatgtgatgctacagtaaatatttgctaatgatggattaattaggcttaataaatttgtctcgttatttactgacagattttgtaattagtttttttattagtgtccgaacacccccatgcgacatcatatataatacctgatgtgacacgacaaaactttacactccgtatctaaacacccccttattttatacgcaacatagattttgaaagcacgagagatgaatataaaaatcagtggccaaatgataggctgctagcgatatgcgtggcctatttctttttagaatcttcatagcttcccgagatatcagcacatgctcatgctcttagtcactctagagtctattactatacgctccctccatctctaaatataagtgattttggttggatgtgacacatatggagggagcagttactactaagttaaaaagaacaaacatatatacaaacctattttttatgagatggagagggtactctttctgttccaaaataattcaacttaagataaaatatgatctatcctaaaacaacaaatttgtattatcttagaatatgttattttgggatggaggaaatagttatccttgcgatctactccctccatctaaaaagggcaacctgcaaaaagatgtgaaacaatatagtacgatgaatctggatatagaggttcagagttattatactatattgtgtcatatcctctcatagtcctttttttagatggatggagcatattatagtgatatagtcatcccagttggctataattggaagtgattaatctggtcaaatcaaataaaagagaatatcccgtcttaaaaataacaagtcattttgaacttctcgagacccattttagaattttgactacctagttcagtataatcattatcataaaaaagttatttagtttgttcttattttttgcataagtgtaatattatgaaagctcttgttaggataaagttgaatatatcattttcatatacccaaaaagatattttgaatggtttttatggttaaaattaactctttttgaatgttcgtatttcaagcaacttgtttttgagagcgggggtatgttacttatttatttgtcatatcggatctagcccaaggaaaactttccttttatattggatcaatcacaaaaaaagcgaaacgtcgaactgaacgcaaatagtgtttctcctttcccttttcttcggtttgactacaggagtgataaaagcatatcggtccaaaatatctttcctacaatcatatttgtctcgcacaacagccaaaacatagcaaaattctaattttcattaccatgttcatatagaaaggcaatgtcgaaagcttcagataccaacgatacatttgaaaagtttaaaagttggattgaaacactcaatttttattttggtacaaagtgacagagcgagagacaaaaattactcgcacatctgaaatgtgaccaattcgatagattgctgcaccattttcatataaaattcgaactaaagcagtttgcacgcaccaaacacatgactagttgactactagcaatcactgcccactcatacataatcccggcaatggcggccgaggcgaccaacccctccacctcgcctcaccaacctcctccacgactccggggaactcgaatcccgccccggatagtcgccgccgagatcgatccatggcggccgaggaagcccaccgcctcgccgacgccagcgccaccgcgccgcccaagaacgccgccgccgtcgatggcgtcgccgtggcggcgccggcggccggcggcgggcatgggagggcgccggggaacaagctgtcgctggtgccgctgatattcttgatcttcttcgaggtcgccggcgggccgtacggcgcggagccggcggtgcagtcggcggggcccctgttcgcgctgctcggcttcctcgtcttccccttcatctgggccgtcccggagtcgctcgtcaccgccgagctcgccacggcgatgcccgggaacggcgggttcgtgctctgggcggaccgcgcgttcgggcccttcgccggttcgctcatgggcacgtggaagtacgtctccggcgcgatcaacggcgccgcgttcccggcgctgtgcgccgactacgtcgcgcgcgtcgccccggccgtgtcgggcggcggcgcccgcgtcgccgccatcgtcgccttcaacgtcgcgatctcggtgctcaactacacgggcctcagcatcgtcgggtggaccgccgtggcgctcggcgtcgcgtcgctgtccccgttcgcgctcatgttcggcgccgcgctccccaagatccggccgcgccggtggcgcgccacggcggcggacaaggactggaagctcttcttcaacacgctcttctggaacctcaactactgggacagcgcgagcaccatggccggcgaggtggagcggcccgggaggacgttcccgcgggcgctgctctccgccgtcgccatgaccacgctcggctacctgctgccgctcttggccgccacgggcgccatcgacgcggcgcccgaggactggggcaacggcttcttcgccgacgccgcaggtaaattcttccgatcaccaacaacgccatcgaatcgaatccagtaatcagatcacgttcttgcataatcacaaacacctagcacgcgcgccacgccgagattcttgattgattgatttatttattactttttgctcttttccattgacattggtacacgattccatcgaacgtgtggaccatggaaaacaaaaaagatttttttttctttttgcggggaaatcaatcttttttagtgttgttgtgattgtcatgagccatggcaagttaacaacgtgggaaagaggagaccaagcaattaggcagaaaggaacaattagatgatgatattattgtcgtcgaagaaaatctctataaagtcaattccccttagaacaatatggcaatatctttacagtactgtcagtacagctacctctccaagaacagtacaaaagattatgtgtcagtgtcaatgacatatactcctgtttagagctagtcaaatcctataaattaattcatatatcttactgtattatcttaatttggtgttccatttggacaatgataatgatgcccaacatttctaccattcttcagctgcacagatgaaattaattacgcgctgcatgttccataaaaagaatacaacaaagaatacaacataaatagtagattgtaacgacgcataattaccttatacctctctctttctcagaatttaaggcctgatcaaacttgacaatagtctccaaaactaatatttttttcgcatgtactacctctatttcaaaatatctgttgttttagattatttagtaaagattaatgcttaaaaggaaatgaccatagcgccccctattaaatgatgtatgatggggagtgtgtcggtagtttagagtaggatagagaaaattttcaattagaggtaactaatgtaacaaaaggtacttttaagtgacaaagctttttgacaaaatttaaatcctaaagcgtcaatattttggtacggaggaattactacactgtctataggaacagagtcatagctataagaaagtatattcaaatgtcaatcccgaatccaataataccgttgtcaacaagtaaaatttaatttacatcaaactaattgtcagtaaaatattatattgtgatgaggaggagtgagtattttccaagcttcacacaacaatcgatttacgcggcgcattaatttaacgatctctgcatctgcattgcactactgtggatggttgatcattttgattgatcactttctctgcaaacgcatgaacacgtacgcaggcatgatcgccgggggttggctcaagtactggatcgaggtgggcgccgtgctctccaccatcggcctctactcggcgacgctgagcagcgccgcgttccagctcctcggcatggcggacctgggcctcctcccgcgcgccttcgcgctccgggcgccggtgttcgacacgccctgggtcggcatcctcgccaccgccgccatcaccctcgccatgtcgttcaccagcttcgacaccatcgtcgcctccgccaacttcctctacagcctcggcatgctgctcgagttcgccgccttcgtccgcctccgcgccaggctccccgccatgcccaggccctacgccgtgccgctccggggcctgcccgccgccgccgccctctgcgccgtcccctcggcgttcctcgtcttcgtcatggccatcgccgggtggaaggtgtacgccatcagcgccgtcttcaccgccgccggcgtcgcggtgtactacctcatggacctctgcaaggccagagggtggctcacgttcagcgccgctgccgcagaccgcgcaggca

SEQ ID NO: 14833 - DNA, 5574 bp, Oryza sativa
tagtatcttaaaatcctgactactatctccatcccaaaatataaaggattttagctggatatgacacattctaatacaataaatctggataggtagtctgtctagattcattgtacttggatatatcacattcacccaaaatcatttatattttaagacggatagaatattataatccgagttgcacaaaatcatagtgattttagcacgtggcaagtaaaacggataatagggtagttttgtaaaattttagaaccataatattcggttacgtgacttgataaaatcactgtggttttgtacaatttggatcaataaaaaacttaataaactaggatgaaattttaaaatcaactttaaaattatattttaaaattcaaattgtagtcttataacccgaaaggcaaacggtggacgactaaaaaattgaaggcagcatatgtcacgagattagcctgtgatctcttcctccctttcgaaacgaaactgtgcattcgtacagcgggtggaatgtgctacgtacaggttcggttaagcagaaacagagagggggcagtagtagtatcatggagcggcgtgcgcgttaacaaggtacagcagcgtgtgggtgcatcacgagctgtaccccccgctacgtgttttttctttctttcacggcgagacgtgacactgctgctcgttttcccactggcgcgacgcaagcaaaagtttcccaaagccggcggccggaggcgcaggggaccagggacatccagccccgtgcccgcgcccgcgcgccacgcacgaaatcagcgtgtaccccccggtcccgtgacgttactggactagcagcagcggcaaggagtaaatctgttgcgatgccggtacacgaacacgaacgtactggtggtacggagtctacggactgcgtggtggtacacgggacgagtaatattctcatgcatgctgctgctggtggtggcgcgcgatggatcaatcacgttgcacgcgcctcgacgcgacgccagcggatacgtacgtctttccggtggcgcggcaggggcagcggcagcagcaacaatccggtgccgcgagcgcctcgtgatccgcgaggcaatacaagtattccttccctatactcgctcatcacaagtggaggaggggaggcggggcaatagctgctgctgatatcggagactgttccgcgggtcacatgccgcggcttttgaccggacgcgtcgtcgtcgtcgtcgtcgttgtcgatggtgtggtgtgttgttgatgggtgatgggtttgcgccgctgcatgccagtgcgaggcagagcggcagcgagcctgcgacgctgcggctagttccccctgcgacgctggatctccggtcatgttagcatgacgtagaaggcgcggaacagtcactagtcgggggtcgtcattgccatatatgacgcgcctgctcgctcgattcgacgcctgttccaaggaaggaccccggtcaccaacccactcggggccggggcatcttcctcatccccttgcctgcatccattcgtcatttgattcgcttctctgagggcacccacgatagttatctataggctctttataagagatatatatcagcatatttttctacttggaagagattaaatgaaaagagagagcaaagctagctactaatctgtagatagtttatagagaaaaacgagacaatagattagagagctatagatacccatatagatatactattaaggtggtttactattaatattgtctattaccgacatgtacatgttttatagagagcaccttattttaccattacgggtgctctgagtatctactactcatacaaaaaaatatatgaatatctactattttcatctcataaaaaaaataacctactagtgaatgtgaaacattttattaatataaaaacatatccaggtttatatagtattagaatatatcatatttgatactaagttgatttttatacaacagaggaagtacatatgtccaggacttaccaaatcgtttgggatagggttaccgtcacaccacggtttgaccgttaccgcgagttataccctggtttcaaaaattaaaaaaggttattgcacatcataaccatgatatatcagcacggttttgtaaatcctctctctatctctatggaatactactcttccaatttttccattacatcaaaactttcctatacatataaattttcaacttttccatcacatcgttccaatttcaaccaaacttttaattttggcgtgaactaaatgcaccctcaatctactatgggtcaagtagagacatgccctataaatatcaacatatttagaaatacgataattaccatattataagaaactgtaattttcacaagaatacggtaaatacggaaacgaacggtaaaacagtaaaactatttccgtttttattttcatatatttttttatcgattatcattttcatatagctcgactgatagaaagtcaaaaacggaccctccctacttgtactccgtacgttgtagtacgagtacactcctacgtctctctctttctccgtgtcttcgggcgtggatggtgtgcgctagctatagtagagctccgggataagtgcggcgtcgcagatggcagagacggggtgatatcgcagcggtctgcctcgaccagtcagtccatctagtcgagcctcagcctgaacctgccgccctgtcacacacagcgcttcgcaccagccgctcactcattggctactcgctgtactccacccctttgcatgccttcgcatctgttctcgtgcacacacgccctttccacccctatattcgttccatcatcatagcctagcttaaccagcatctcgttgcaatctcaggaggtgttttgattcaggagcttgaaattttaacgtgttacagtgcattggatatcggatattatgttcagatactaataaaaaattaattacagaattgattaataaaccacgaaacaaatttattaagtctaattaatctgttactcataaattattaaatcatggagtaattaggattaaaaattttgtctcgtaaatttagtcgttatatgtgtaatagatgtttttagcctatatttaatactttatatatgtgtttaaacgtttgatatgatagggtgaaaaattacgggcgggatcgcctcagattatctcagccatatcctatataacctatgctagctgctcttctagtccaactggtagagtgttgtgaatagccagttcagttcatcagttgataggagccatgcttcaccattactacagcggcggcgccggccatcatcaggacgtcgctgcagctggtagccccggcgacatggcttcctccaccttctcgctcttcttcccgatgtccaatgggcagtgttggccgccgtcgacggtggaggagtccgcggcctacgacgaccacagcaccgtcaccacctctccttcctcgccttcgtcgtcctccaccggctccgtcgactgcacgctctcgctcggcacgccgtcgtctcgccgcgccgagcccgtcgcggcggcggcgccagcggcaaaccatgggcgcccgtgccggcgcattatccgtcgctgtcagcggcgaccgtgtcctgggacgcgactgccgagtcgtactattgtggccagcaggggaggccggccaccggcgccgccaagtgcgccgccggcgccgggcacgacgcgctcctcgaccgccgctgcgccaactgcggcaccgcgtccacgccgctctggaggaacggccctcgcggacccaaggttcgtcgccggcgacgctcgctctcgccgtcgctgttctctatctctgcagttcacttcgcggtttcgccgacgtacgtcgtgtcgctgacattgccgccgtcgtacgtttctctgcagtcgctgtgcaacgcgtgcgggatcaggtacaagaaggaggagcggcgcgcggcggcgacgacgacgacggccgacggcgccgccggatgcggcttcatcaccgcgcagcgtggacgcgggtcgaccgcggccaaggcggcgcccgccgtgacgacgtgcggcgaggagacgtcaccgtacgtcgtcggcggcggcggcggcggcggcgaggtcgcggacgcggcgtatctcgcctggcggctcaacgtcgtcccaccggcggcgacggcgacggcgttctcggtgtggccggagcgagctagcctctaccactacaactagctataggcgattaactagtgtagcattagcgttggggagaagggaagctgcaccgtttttttggggaacattttgtacggtcgcacgctcccggattgatcgaactgtatgcatctgctgtgctgtgttgcacgctagctagctagatgactctgatcttgaaacgaaccgtgatcatttcattcatttggaatgaacatgtagctgtgcaaggtcatcttgctcggaaaattcataatcttccaatctcttgtgctgctactactgctgcatctcaattctgacgcgccaataagcaagtgaagagaaaaggaaaatgttttaaaccttttttggctactatacttggttttcaaggctaaatagattaggagaaaatggcccaattgggccggaaactccatcgagcccaatggttatgtgggctgcacagaatgggctgtcccagtagatcggaagtacggaacggctgaaatcttgtaaaccgaaggggttcgaagattaaaactcggaccctcctagccttgattttctttcgcggattgacacgccgagtgattagaattcaggattagcgagttggaggctgagtacaaaccctttttgcctcttggacagcgctaggaattttcagcatcgtgcaccgactattctaccctgaacttctgaagagcgacgagagcctgaacttcgaagcggtgttattttaaacccttttttttccttaagaccttcgaatttaagaccttattttttccttcacattttaaatttaagagtcttaagaccttcgaacttgcaaccagtagagaggaaaatcaaatgcacataatcagaactaacaaccctcagctatatatttgctcaaaattcatcatacggcatgacatattggcatcttcattgttccatccatccacatggcgtgcgtgacaacttgcaatggtccattatattgtctcttgctactgctccattctatatttctattgcacatacatgaacacatgatacaaaattacaaatgcaaccaatacacgcttgccttagatacacatgaactcaagaattcaaatcttgatgcctaatccgatagctcacggagccaaatctgttgccgactgacgtgcaccaggctgatcgccagacaacgttggcctgagcttcaccggaaagaaaatgcaatttcctcaagtgttcttcctttagtctccggcacccacaggcatacgaaaacgagggtcccggcacacacagcagcatagatagcaaatgttcctgaaaaaaaaaaaagagcatacatagtgacatgagcctggaaggaa

SEQ ID NO: 14834 - DNA, 2946 bp, Oryza sativa
  unsure (1)..(2946): unsure at all n locations
tgatcatcgttatcactggggggatactttgggatttattattcatacatcacatatactcattcaacttttanggataatatgttttatgaacactttcncntccncnccccnccnccggttttgattgcttgtacgctcggttcccacaaagatngaagngtccaacttcaggaaagcacaggtgaggatgctataacaacaatagagcatatcggccaatttattgaacaatgtggtaaggctggtagggatggggggctaaaaatgaaggggggggggctttccttgtcaaaatatgcatttaaatggatttgaacactggcttcttaattaatttgaacattagggcgtgacaaccaacaaaaccatgcacccacagcccaccatgtgatttattttaattgacccacaccgaagcggtggcattaatccaacattaccattagaacctacagtctatacattaataggattttccccattgtgtgctagttgaactaagcatggctaagcaatccctagtccaatatctagtcatgttatatcccaagctaacaaaggagcatggtaccaaaatagcatggctgtaacagtaggtaaacatctcatagtattactgtaaaacaatgcagtatttgatggaaaacattagaacatttgcaatataggatcaacatgttcaagtgacaagcatgacttgccttgctctgctgctggaggaacctcggcgactatctcaaagtacaccggaaggtcaggagagccggaatctaagcgacatacaaggcaaacaatacaaacaggctataagactactgaaacaaagaacaaaaccatttttaatggattctacacatttttcttgatttactgagacttgaatggacttaaacggagctcggatgaattagttatgattttaagaagattctctgtgtttttactagaaaagaaaagtccttaatgaattattgcgcaataaagcatcccagggctgacgtcatcacgggaagcgggcggcgccgacatgcgggccccatgggtcagcggctcgggagagagaggaaggggcgccggcacgtgggccccactggcagagacacaaggcgggagggggtgcggctaacaagcaggccccacgggcgcggctccaagggggggcgagacgccggcctggcccggcatcaagccggccggcctgccatggcaagggcggcggcgcgcgcgtcgctggcgacggcaaccggcggcggaagacggcggcgcgaaggcggcggcgcatggcagaagcggcggctcgacccggctcggctaggagggagagggaggggaaaagaggaggagggatgcctcaccgtgagttggccggtgcggggaaggacgacggcgaacggcgatggcgactaccggggaacgacggtgaacggcgatgacctccgagacaccctaagagagggaaattgagagaggggagggagagagggagtccacggcgagcagcaaccgtggccgatggcggcggttatggagagactcactggcgcacgaccgaagcggccttcgatggcggaactcggcggaggaggggtggaccaggtggagctcggcctcgcgaacccgacggcggcgacggctcggtgcggtggctaccctaacggcggctagaggcggccggagcaacgaaaaaggcgacggcgggtgggagcgcggtgtgggagcgatggggagcacgggagaggccggtggaaaaaaggaaaatgtggaggaggacgcggggacgaattatataggggcggagaggtcgggaacagccgggagtggctcgatttcgcacgagttagtgggggaagttggaggtggggagagagagagagagtggcgggattcgaagtcgaatcccgcccatttttggggcgcgcgagggcgggagacccagggaaagccggtgacatgggctcagcgcgcggagtggggcgaaaagggcgcggaagaaccgaagggggtgggcccggcggtttcggcggctgttgccgtcgtggggcgggcggccggaggaaggggatgaccccgacaggtggggcccacctgtcggcgtcctagagagaggagggaggggcgcatgggccggcccaagaaggaaaagggcgcgcgcggcggtggggtggactgggccgacggcccaagaagaggaaaaaggagggaaaagaaaaagaaaaggaagaaagggtttttcctgggattaaaaattgcatgtgctcaattttaattggttaaaattatttctagggctctgaaaattccactaaaaatcttgttagtaaatttcgacatgtagaactcaagaaaaattccacatgccaattccgattattatttgcattggtttattagggtttactcttgcttttacaccgatattttcttgggaccatttataaattcaatttaggtttgggaggagaacttcagggtgtgacaatgcggctctcactcgtcgatgactaaatctcaatcgttgtcagggttacgggtcaggcataccctctacccttcgatatacgttacgtatcaacatggcatacccacgcgtacgcggatatttcctttatgatctaaggaaacctttcacgaaatcaatagacgggaagagtccttctcggataagaactgggttacctacgtattgagctgggtctggtgtgttcgagtcctactcggagaccaccagacctgcgatataaaagggaccccccggggagggcatagaggatcgaatctcagagccaacacaacccacacaggctacgaagccggagcctgcgaggggccacgtcgtcaagagctagtcgaatcaactcgactttaatctcgccggattcgacaagttccatctttcctttgtaacctgtgttttccaccatataatcccatatcaaatggatt

SEQ ID NO: 14835 - DNA, 812 bp, Oryza sativa
cgcggggcaggagcggcgcgggcgtgctcgggcgccggccgacgggaggagaggagcggcgcttttgcgcagtcagcgtgccgaaagaaaagggggggacgccagtgttcattacggggatcagagaattctgctacgttaagatgccttgcggactgataaccaccgggaatactttccagcgtacggtccagggcgcacttagcaaccagcttggcaacaatgtcgaggcttacgtcgacgacatcgttgtcaaaaccaagacaagtgactcattgattgacgacctgcgggaaacgttcgacaacctcggacgatatcgcctcatgctcaatctagagaagtgcacgttcgaagtaccgtcgggcaagctactcggattccttgtttctggcagaggaatataggcgaatcccgagatgatcaaagcaatcgagaacatgaagccgcccacatgtctcaaggaggtgcagaagctacccggatgcatcgcagcattaagcaaattcgtccctaggatggcagaacgaggtacagcctttcttcgccttattgaaagaacaagacaaatttgtatggacacaggaagccgaagaggcatttattgcactcaagcgctacctatcaaacccccctgtactcgttgccccccaacttaatgaacaattattcctttatattaccgccacgccatattcagtgagcaccgtcattgtggtcgaggcacagataattcagctcccagttgattacgccagcgaagctctccatgaggcaaagtctagatatccgcagatccaatatctgctata

SEQ ID NO: 14836 - DNA, 525 bp, Oryza sativa
gacggcgccatcgccaggtaccccaacgccggcaagttcatgagggtgaaggacaggttcgatcccgacggcgtcttctccagcgagtggagcgaccaggtgctcggcgtcggcggggcgagcccggtcatcgtcggcgacggctgcgccatggaggggctctgcgtgtgctccgacgactcgcactgcgcgccggagaagggctacttctgccggccggggaaggtgttcacggcggcgagggtgtgctcgccgtcgccgcgaggcgctgcgaatggcggcgacgacgacgacgaaatatcggacgttggcgatgagtagtggcatgcgtcatgtgcgtggcaacgtcgatgtgtcagtcagtgtaagcagtgtggacgtaaagcattctcgtgttgcatgctgatcataagatcgttgcgctgaggtttgactgttgcgacaaatggatgtggggtccacttttttatggcatcttataactaagtggttattaaaaatctaaaaaaatatatattacttgaa

SEQ ID NO: 14837 - DNA, 774 bp, Oryza sativa
tggcttccggtagacgaagcaaaagcaaagcgtttgcaactcagagccacgaagtataagatggtctcgggtcagctttaccgctccggggtacttcaacccttacttcgttgcatctctttttccgaaggtgaagaaatggcaaaggagacacaccaggggctatgtggcgcgcaccaggctgcaagaacagtggcctccaaagtatttagacaaggagtttattggcccactgtgttgaaagtctgtgttgagcaaatcaagaagtgcgaaagttgccagcgtcatggccgaagccaagccgcgccccagtatgatctgcagcccattgcgccaatatggcccttcgccagatggggactggacatcattaggcccttcccgatggggcgaaacgggtataaattcgcaattgtagctgtggaatatttctctcgatggattgaagtcgaaccccttggggcaatcacttcggcagcagtacagaagtttgtatggaaaaacattgtttgctatttcagagtgccaaaagagttcattactgacaacggtaagcagtttgactctgataagttcagagaaatgtgcgaagggcttaacctgtaaatcaggttcgcgtcagtcacgcacccgcagtggtatggggctgtcgaacgtacaaatggcaagatcctagaagcactaaagaaaagactcgagggggcagtgaaaggcaaatggccagaggaattgctatcggttctctgggcccttcggacgacccccacaagacca

SEQ ID NO: 14838 - DNA, 667 bp, Oryza sativa
ttcggcaaaccgtcaacctcttcgccttgatcaactctgacttgccatgactgggagaggggaaagatgcgaagcatacagaattcctccaataagtcacggcagctaaggcgggagcaaaccttccgcagcagaacgaaccgcgcctccatgaaaaaggcaagcgagtacgcgtggtcgagaaagatgcggaggcgactgctccagaatcggattcagcatatccagactctgaccttcgtgtctcacacattttcggaagttctacaacgtaatcctcaaagcgagaatacaagaaagtggaacgagaagtctgttcgacatggcagggggctgcacccaagatgaagtggtctgaacagaagatagaattttcggaagaagaccatcccatgactgccgttatcccaggacgttattcgatcgtggtcgaacccactattcggaacatcaaggtcgcgcaggttctcatcgacggtggcagctcaatcaaccttttcttcgccagcaccttggacgtgatgggaatccaacgaagcgagttgacacccaccgatcaaccctttcatggaatcactccccagtcctcgtccaaaccattgggcaaaattacgttgcatgtgattttgccccaagcaaaccaacttccgacggagccagatcacct

SEQ ID NO: 14839 - DNA, 569 bp, Oryza sativa
aacatatatacacgtataaaaagatatacaaactttgtatatgtacattatcgacgggtgatacccgtagactggatatagagaatattggggtacgttggtacaaggatctacgtaatacgacatcaagcaaacaaaaagacgagcattatactggttcaggccccttgataggtaatagccctaatccagttgatatgggattatatgatggaaaatcataggttacaaagggaacgatggaactcgatgacaccggcgagattgtaatcgagttggttcgactagatctcccggcgatttggctcctgcaggcttcgacttcgtaggctgtggtcgttgtgttggctatgagattcgatgccttaagtcctcccagggggtcccttttatatcgcaggtcaagcggtttccaagtagaactcggagacatcagaccctatacgatacattgacgacccagtcttgtccgagtaggactcttattttctgcaaactccgtgaagaatttccttagtatatgcagagaatgttcatatatgcgcgggcatgccatatcgatatgtaac

SEQ ID NO: 14840 - DNA, 638 bp, Oryza sativa
gccccacgaagtcgggaggcgacgccccatggcctatctggtgatcttgggcctgttcgcggcccgcctgccgatgtcctcagctggggggagctccaagtcgggatggggcacctcctcgaagctggcgctcgcgggataagtcgcgatattgccgaggcgaggacagtggcggcgtcggcctgtactcagctcgaaggcgtcggcctgcgcattgacgaagccctgaagcaggaatgccgtcgatcgagccgatatgctggagggcatgtgttggcttgcatatgagatcatcatccgcaattgcacctcgagtttctccatgaagggttcgctcgttctcggaggactccggcggagatagaccacctggcgaagtcgatggcgccgctggcggaaaaagttttccagtctatggactggcgttggccttcttggtagtctttgtaccctgtgatagatatcttagaaaaaatgtatatgggtttggacttgtgtaaagttggtaagaaagattttgcgaaatagaaaagaaatctatcctgatgaaatcttttactctggatataatcgggaagaatgttttctcagttcacgactttggtcagtcgttgagtcgtacacttttcctagcccca

SEQ ID NO: 14841 - DNA, 525 bp, Oryza sativa
ggaggtggggatgtgcccgtctttctccatggcgcccgtgcacaagctcgacgcctggatgcggtgctggtagcccaccaccgggtaccccgtgaaggcctcgccgtcgttggtgagcccgtagttgaggtgctcgagcgtcgccggcatcacgcgcgacgccgcgcaccgggcggggtcgctccctgatctctactccagccactcctccgcgagcctgctggcgacgaggggtagcgtcggcgtctgccggaacgccgggtagtcgctgcggtcgtcgccgggcgtcgcgacgtcgacgcggtcgtcctcgcggtacacgggcacgcgccgtcgtggcagccacgccacgtcgccgaactcgtggaggcggccccacgcggcgaccgtgtcggcgacgtccgagtcgttgcgggtcacgaacgccaccgaccgcttgaacagcggctgcagctcgagggtgacctgggagatggcgccgaggactccgagggagaccttgggcgcgtctaggtacgggtcgcc

SEQ ID NO: 14842 - DNA, 551 bp, Oryza sativa
atgttttgctaaatgctgcttttgcaaacgagcctatattatgccatcctttggtatccttgtgcacttgcatatttgctgtgtggcttgttgagtatgtcatatgctcattcttgcaataatcaatcaacctcagttgaagaaaaaggatccagaaggagaagacgtttggcttataccccagttgagctgcctgtgggagtggagctgaagccatcgctagaccgttattccgctgctgttttcttttcttttgtaagtgtgtaacgttattattatgatggatttgtatattaaattgtcagtttgtgtacctcggctgattcctagacgaggattttatgcacaaattagttcggaaattattagtgaatttccgggcgtgacaggggagctgttcgactctaccccagtcttgttgtgactgggacttggggtaggagtgtagccgggggtgtcgacacggtcttcgatcgcctcgtccgcggccttatcagccacggcctcctcctctttctcctctgcttcctgctcgccgtcgcgtacttcgg

SEQ ID NO: 14843 - DNA, 2911 bp, Oryza sativa
tcatggctttaagcttatctcctacgcgtcggaaatggatcagtcagaacatcactgccggcgtactgtcgtcaccgccgtctggtgtctcgcctacacggttggatggtcacatgactgttgatgggcgtctacgtcttcaccaccggcttgcctttgccgctgccactagtgtcctcgcctatacggtttggttgtcatatcaccgttgttgggcatcaacgtcttcaccgtcggcctgcctacttccgctgccgactggtgtccttgattacacggttggatggttacaccaccgttgttgggcgtctacatctttactgaccggttgccttcactgtcgccatctgctgtctccgcctctacaagttgttggtcacacaactgttgtttggcatctacatattcaccgaccggctgcctgcgccaccgctgattggtgtctccgtctatacggttggctggtcacaccgccattgatgggcatctacgtcttcaccaccggcttgcctccgctgccgtcgactggtgttttcacctacatggctggttgatcgcactgccgtcgatgggcgtcattgtattcaccgcaagcttgccttcgccaccgctccgccgatagcagctgcgtcgcctcccgcgccatcagcggcggcgcccgtggagccccgtgcgctcggtgaggagaggaggggaggagaggaaagaggccgctcagtgaggggaggaaagaggaagagagagaaaggagagagaggggaggggaggagagagggtgtgaaaaatttgaagtgcgtgagagggaaaataggaagggatattttatatggctgtgcggttcacttaaaaagcccacacgcgaaaatcgatttttctgtgcgatccacttaagtcaaccgcacgggataatgaggattatcctgtgcggttggattaagatgcccgcactggataatctattttcccgtgcgggcgtccgcccggcgccggttgccccattatctcatgcggtcccaatcatggtccgcctagaaacaacagggcccagcgtacaagaatatcatttatgtagtagtgtgatggattctacggtggtgcactggagtggagaccaaacttgaggaggagaggaaagagatatgttagggaagagaccaggacagcaggattataggggtgggcataaaaaattgacaaccgaaagccgaaccggaccgcaccgtaacagaaccaaactgtcggtttttcggtgatcggtcttttctttcggtttctgtttttattactagaaaaaatgcctgtgcattgcaatgggaaaaaacatgagaaatttaagaaaaggttgagaaatatttacattatgtaattaattaaaatataaaatcgcaactatagatgtatccgatgtttttttactggaatacatttatacgatgttgaagaaaagaaagggtcataaaagtcacggtaaatgtggaaatagaattttccaaataaactatggctggatttaatttttattaaattctccatgattaattacactatgtgaaaaattttcagtattttcagagctccattgctaattttaataatacaaacattattttagcatttatttaaatgaaaatctaaatgaaaaccctcttttctcctgggccattttgagcccattttttctttagcccatactcctcccttccacctcggcctgaaagcgcgcatctggcccatcaaacaaccagaaagtctaatcagaatcccttctcctctccctgtcacgtgggtcccaatgtcacgtgggtcccaatgccacagtgtcgtctcctacctctgtccgactccacagcttcccgacgccgctagaaaccaccgcctccttcgatgaaatccatccgcattcgcggagataatccgaaattgattgaggggttttgatccttatctccttctatttcccttttccaagaattagagcaaaatcgcatcgtatcgatctcggaatcaagccatatagcaaaccctagagttgtccgtttcacatactggagggaatcagactgcgcgacgtatgaaagtcttcggcaaaaatatcttaaaacttttataataggtgaagattcggtgttcggattcatgtgttttaatatgtggagaccgaagaaatcggaaaaccgatcaatgtaagtctcataattaaattcattatattttatctatagaaaaaaattcttacaattttaagagtaatgatatgtcagaattttatccattttgttacggctattagaaaaatgtgcacgaagtgtgttgggaaaacctatgtgtataagatattttcctcacttattagtagactgacatgattgtttgtgctaagataccagaaagcaagctggtcgttgagctattcgatggactctttggaatcttgttattgaggagtattaaacgtagattactaacaaaacctattttataagtcctaggctattttgtaagacgaatctaacgaggtatattaatccatgatttgctacaatgatgctacagtaatcatccactaattatggattaatatacctcgttagattcgtctcgcaaaataacctagaggttatggaatgagttttgttagtaatttacgtttaatactactaaatagcaagattctgtaaggatatttaatagcctgaagaatccaaacatgcccataatgtgactttgcttggcagctactggtactatatataaaagaaatgttaatcatggtaacttggtaagcgagcaattttttttttagctagggatggagacggattgtgaaatattaatcctttggctctgttgttgaattgattattagtggctgatgagtgatatttggtaggaggggtgaacaggtagctca

SEQ ID NO: 14844 - DNA, 3076 bp, Oryza sativa
cgttgagaaaatatgcatcgggtagcgaaaaaaggaaacagaaaaagcgtttgagatgttcaagcatattagagatgtggattgttatcctaatctctccattgcttatcagaatagttctatttgaagttttaaaatgttatatatagataaatttatcacatcgaatattaaatgttgtgtttttatgagactataaatatatatattagtttatgtgtatatatatataaatgggcctcccctggtccgcatagttctgaaaggactgcagtttttaccacgactccatcaatcctatagctgtggaaaacaaaacgttctggctgaagatacactcccacaatgcagtgacattagggaaaagaggaaattcctagtgcttcccattctaacgatgcacaactgtttgagaccggcagtacagatacggatgcagcatttgtaattccaaagaacttcacaggaaaaatatcatgtggcctttttgccttgaatatttcttacacaaaaaccggtgcctactatttatgccaatatacactagccataaactgcgcagcaagaacccataaaacttcttatgcatagtttagtactacctccatccccgaatatttgcatttcactattaaaattttgtaaaaaaatgttatttctattgagatgggacctaataaattaattagattgatatactaattccctcacccttgttattagtcaagtttgcaagtatgtaatgtgtgcgtgcagtgtggtcatttatatgtggtgctaatctgtatgtaatatcctagaaatgcaattattcttggacatagatagtataatctttcaatttcacacctataaactataattcaaaccacatctttcaaacagaattaatagcataaaaattttgttccaccaaaaataaagaaacaattaataccaacatatttattttctcaatcttacgcgtcatatttttttccacgataaaataagattcaactttcacatctccacgatgaccttacccgggcatggccgccatgctcttctcccacgcctgcgccgccttctcgaacggacaccgcgagtcgaccaccgtcctgagcttcccttctccgacgagctccatcagaaacctcatctcctccttccccagcgacatgagggccatcatggttatcttcttcctggcaaacatggtcagcatcgccgcgacgtagttcccggggtttggtgttatgtccaccaccctaccacggctgctcagggtcggcttcatcgccgaccagttgacgttcatggcggtgttgatgatgtagtcgtacttctcgtcggaggccgagctcgtcagggcggcgccttggggggtattgtagtcgaggacctcgtcggcgccgagggagcggacgaggtccatgttgcgggcgccgcatgtggcggtgacgcggtggttgccgagcttggcgagctggacggcgtacgtgccgacgccgccggaggcagcggtgatcagcacgttggcgccggtgccgccggtgccgtcgaatttggtcccgatggacatgagggccttgagagctgtgaggcctgcgaccggcagcccggccgcgtcgacggcggaaactccggcggggcggacgacggtgaggctctccggtgcagcgacatactcagcgaggcctcctcctttctgtattgcaattattattctggtgagaattgatcattttcttgatgagaaggttaagcaataaaattgttacaaactctatttttttaatgtacgacggcgttaacttttttataaaaattagattatttggcttattaaaaaattttgatgataaattaagtcataataaaataaatgattttataaacattagattatttggcttattaaaaaattttgatgataaattaagtcataataaaataaatgataattaaattttttagatataacggatggtcaaacatatctaaaaagttaacgacgtcatgtattaaaaaacggagggagtattaaagaagaaatgcatcagaaaattcaggtgctatacatgagatgaatcatgaacaaactggatgtttgaaattacccagaagttcagtttggacaaaactttgtcaccaactttgagctcatgtactgcagaaccagcctccacaatctccccggcaacatcagtcactgtttcatggagtaaattgagagatgaactaaataatattagattatccattggtgttatatacttcatcaccggtcaaaaactgaattatcttcataactaagagtgtgcattactgaaatagacccgttcatttgcaatcaattgcacataaatatatgtgttgtacgaagagtaccttttgaattagtacttctgtctagtttcataaacaaatggtccttactaatgggtaaacacctggaataaatggaaacttgggaagaaatgggcgtagcatccctttctgaatactccaatcaatcgggttaacgcttgcagcttcgactttaataagaacttcatgtttcttcaccgaaggaacagggatttccacgtgctgaagtgaaactaaactgtatttaaatcaataatagaataaacaaattttacatacacatatggtgtgttcaatattttcttcaaaaaatcattgctagctatatattctcactttgatgaaaatgttcagataagtcatgtcctggaagtgtcgtctatttcttggaagcaactagactcatgaattacagatgaatcggaaaattgtactagaaataaacaaagttcaatataatcgacaaatgcaatttttccaggacaaaacgaaaaagaacatgatcaaattttatgtcagagcagtagtgcagaatatcctacgaactcgatcactcgtagagcattaaatcaggaggaagaagaagatagcaaaccttgagggcaccggcgccgccgccgtagccggtgtactgcaccgcgcgcatggtggccggaatcccgccgccggcggccataatcccgagcaattcctgaatttctcctgttgtctgaacaagtcaatc

SEQ ID NO: 14845 - DNA, 3054 bp, Oryza sativa
cggacgtccatttctcgatccaacggtagtttccaagtttctactacatatgtggtttgcactacatattttcctcagataagtcaaatattattcacagcataatacttgggccgaggatggctgttggtctgggcttccagtcacgccaaaacggcccacagagtccactcataggatagctaccattattgttcagagtttcagatacgaaaatacaaagtctacaagtcaatgcagttatgtcagataaagttgatgccgtgtgattggcgatggcgatggcgatgttctcgtcctctccagggagaatggtttgggagcttggaatcatctgttatccaccttgtcaatgcgtctcaaaatcgatcagcatcatcttcagaaattcgccaaaaacgtgtaaacagatatgtgaccttataatagcattccagatcatacatactttattaaaaaaaattattactatgcagagcatctgaatgacatagcacacagaactacttagaccctgtttagatgggactaaaacttttaagtccctatcacatcagatgtttgaaaattaattataaatattaaacgtggactattaataaaacccatccataatcttggactaattcacgagacgaatctattaagcctaattaatccatgattagcctatgtgatgctacagtaaacattctctaattatggattaatcaggcttaaaaaaaattgtctcgtaaattagctttcatttatgtaattagttttataagtagtctatatttaatactataaattagtgtctaaatacagggactaaagttaagtccctggatccaaacaccaccttagtacaaaaatgaagcaaacctgacatactactagacttgactacagacacggagaacgcaatattacattacacagtacagtagagactcgattacactacaactgaactcgatgaagctaggaacggttagatatatatccaatctaaatttgatcaagaaattaattaaacacagccgagataatatccaaacccattccgatgctaccccaaatgcatgatgaagaaatccattatccatgtgttatgtgtatcatcacttggtccatggatttcaggatgcccaaatatatgcaatgaaaatgaagctttgatccgttcgggaaatcatgcagtaccctttgtacttgatctcgaccagctctcgccggcgccgctacgattcttacgatttcgccacggcggcgccgccgccaccgtcgccatcacaggtggtgatggatatatcaagcacgagctgcgccccgcgcagccgccggagctcagatgcttgcatggcttcctccgtccgtggctcacatcacggagcaggaggtgggatcctcctccatcgaggggtagaatgggacgccgccgccggcgccggcgcgggggcgaaactgcggctgctgcggcggcggcggcggcccggccgccttcttgcctctcctccgtttgcctcccttccctccgttctgctgctgcccgccgcccttgttccatccaccattgttgttgccgttcttgccggtgttgaagatctcccgctgcgactgcgtcgacgaaccaatggagaagaagattggtcagctcagctcgatcaattggataaagaaaaaaactaggattagtttgatgattcatcatccatgtgtcttactgagttgtttgcgcggcgttgattaggttgatcgcgagagccagcggcgacggcgagcttgtcgagcttcttctcgatgcggctgccgttcgcggcctggcggtcgatcttctcctcgatgcggacgccattggcggcctggaggtcgacgaggcagttgctgatcctggcgttgacgtcggcgaacttggcggcgagcccgtcgccggtgacgagcatgagcggccaggacaggcagccgccgccgctctggcaggactcgacaagctggagcgcgtcgtcgagggcgcccctgagccggcgcaggatgttcgccgccgtcgcgtcgcccctcgccaccgccttggagttggagtccggtaggatcttggcgacctgctgggcgcgctcggcgagctccttgcagctcgccgcgttccggcgagccgtgctcaccgccttcgagatcgcctgcaccactttcacgatcgcgcccaccgagtccatctcttgatgacttgctgatcaacgatcacctgctgcttggtttcgctaatgttgttgggtgttcttgcaagaggtggaagacgagtagcgctcaacttattgtcatgttgccattgacggctgggccacacggagttggtgctacgacggcacaacgctaacgccagaatgggaaatttaactattcgccactcttatgacatggcaattaacgatttgccacaccctgtcaatgacatgtgggccctcgtatgtctatgacatgtggacctagtggcaaatcgttaagcaacatccgtaagagtggcaaatagttaaaagcccccgccagaattggggttgggatagtaggtaatttttcgtttaccattaacacttttatataagagatttgttctagtccaataaaatatatctgaaggtatcgatacctcacggtacggtacgaaattgttttcgatgactggtacctcaagactctcttcgtgtatttgcattttgccgtgcgatgcaggaccgtctccaaatgatgagaaagctatgacccgtgatcaagtatagtgttgcataagacaagacactgtgacggagtatttggactgacgtttactcactcagtggaaaatcagtgggctgagtagaggatgactacaagtcaacggtcaatggagcttcggctacgcggtggttagttttggttgcttgctttccccgcggtttcttgagaaaatttgcaaattgccaaggagacgggcatggagtagtttaacaattattctatttcgccacgtttacttcagtgaggatgataggagtacggggcatgagcttactaaaactagcaataatttttttaata

SEQ ID NO: 14846 - DNA, 1193 bp, Oryza sativa
ctcacaacggcgacgaacaacttttctcttgacagaaagattggtcaaggcgccttcgctacggtgtacatgggtaggcttcccgacggacgcgaggtggccatcgaacgcacgctcgaaacatccggcatagggaaaatagacatcatgagagagctcagtatcctccgctccattagccaccagcacatcgtccgcgtctttggcagctgtgtgaaggagaagcgccagctcctgccaccgtttcggaaaaaggaggaagagatcctactcgtcctcgagtatattgagaacgacacccttgacaaacacctgcacggcccacggtcgtcgtcgccggtgatgacgtcctggaagacgcgcatcgagatactgctaggtgtgtcgagggccatcgagtacatgcagtcctacggtgagcggccggtgatccaccgtgacgtcaagccgtccaacatcctgctcgatgcgagctgggcgccgcacttgacggacttcctttgggcgctcacatgggaaggcccaggccatcaggagaatattattggcacctatggatacttggccccggagtgcgttatagcaggcactctaaacccgacagtcgatgtctacagtttgggtggtgggatgctggaggtattgacggggaaaaaaccatatttctctaaagaagaatgggaaaaggagaagacagaagaacgtgtggaaggaggagaagagagaaaaatgtgagcaagatggaaagaacacagaagaggacaaggaggagagtgaacgagaagaagaggagaagacaacagaagaacaacatgagtggcaaaagcgggacgggtggtctagtggtcacagcttggcgtctttaacgccactgattgaggcgggggaggtgtggaaggtgctggacaggcggccggcagcggagccaacggcgaggcagctggaggcggcggaactggtggcgcagacggcagctcgctgcctgcggctgcggtgggaggagcgtccagccatttcggaagtcgtggccaatctagagaaggcgctcgagctcgtccgttgcgacgggtaggcggtagcatagcgtgggctcccgagacatcttatgtgaataattgggcaatgtatattctcatcatgtaataattaacgctgttgcttctcttctcttttttttttgtgcgcatacacaa

SEQ ID NO: 14847 - DNA, 616 bp, Oryza sativa
tgggctttgttgcacaaagctgttcttaaggactccttcggcaatataatttccaaatgaagaagcctacacacaaaatctaccgcacaaccaattggcccgcatataaccgagctctcattaatcgtgggaatattgccatttggttcgatccaaaaacacaatggtatgcagaacctcaaggcaaacaaggtcgaagtcaaacctactccgacatagcgattcaatgctgtttgatgatcaaatctctatttagactcactttacgcatggtcactggctttgttcagagcctcattaaactttgtagattagattggacagcaccagattattcgactatttgtagaagacaaaagcatattgatattgcgataagctatcagaaaagtcgtgatggtctccacctactcgtcgactctactggcttgaagtttttaggtgaaggtgaatggaaacgtaagaaacatcagctgaatatcgtcgccaatggcgtaaacttcacattggtatagatgctgaaacgctgcaaatacgggccgttcagctcacgacaaacaatgtcagtgattcacaagtactcgaagatttacttgatcaaattccacttgatgag

SEQ ID NO: 14848 - DNA, 685 bp, Oryza sativa
ggtaaacaaaatatgtccaatgagttcatgaaatggacgtgactaccacgttaccgtatactggattgtcataacagcgacctcactctcaaatcaggtggctactactacacccaacttacaatcattgcatgtcttttttatgtgtgtcagggttatggatactacatacctaatagtagttgactaaatctcgacaggacacaccacataccatgtcctatacggaaacaacctgcggatatatgaggagttctggataagggaagacaaccagagttttacatggaaacgacaaggactactcggattgttggtttccctagttctacttggacagggggacacctatgaatataaatacaaggtcccctaggaggagaggggacaaccccacaatcaacggacacccaccatagaagagacagacaacatacaagccaacatacgacaagacaagacgtcggatatcgacttcggagataggcacggctagtcccctacggtgtctccggatactgataggagagacattgcgctgtctctgatctcgccgggcacgaactcgagaaggaagactaccctgttgtcgactacgagtcagactttcagaccgccatgtcgacaacagttagataggctaccccaaatattatactggtgtgattatggtgaataagagcaa

SEQ ID NO: 14849 - DNA, 2921 bp, Oryza sativa
ttgtagtcttaattagacttagcatatacgcacgaaacacttagcatatacatgactattttagtcttagcatgtaatattatttgagttttaatataagattattttatttgtaattagacttagtatataattatttactagctagggttgtataatatacgtcacctagatttagcttacatcacgatttgtaattagacttagcacgtaaggttgtgtagggttctaatgtacgacatttacacttagcatacatgacttagattgttaaaacataaatgtctcgtgacttagcagatgtttcttgtatcaacagatggctgaccgcgatgaggaacagatattgtacgatacaatcgcggagggaagcagccagtactggaatgaagaagaggggaacgaggatccaaaccagtacttgaacgaggaagggaacgtggagagggatgcggaggggaaccagtaggggcacgtggaaagggatgtggaggggaaccaggaggaggaggctagtggtagtcaaccctccgttggacagaagagggcacgcgggcaacgaggtgcagcgaagaagcttgagggtcggcacatcataacggaagtggaagaagatggacgtcctagtgccccggccgaagccgccaagaactatgtacgtcacagcggttgggttgtgcgggataacgtgcctgtcagtacggtgtactggagaagaacaagggcacgcggagatcatgagagctttgtcccagattcggagaaagagatgctgtggaccacaatgctcgagacattcacccttcctgcgggtacagaggacaaagtgaaaaggtggactctgaagaaaatggcagaacagtttcagagcttcaagggagatctgtaccagaagtatatactaaaagggcagacaccgaacttcgacacattcccaaagctaagggatcactgggacgagttcgttgcatataagacaggtaaacaagggcaggcgatgatagaaagaaacaaagaaaatgcgccaagaagaagtaccatcaccacttggggtaaggaggctatagcgtcgcgatgccgaagtgggagcagatggaggctagcttgattgagaggggtatcgaaccggcaacagccaattggccggaacgatcgaagttctggtactatgttcacggtggaacgctcaacccagctgatggctcactggtcttcggcgatcagatacgagaggctgcgcgatgactaacagatgcagtggaagcctcctctcagggcacgttccgaccatacagagatagggacgagctgacactcgccctgcagactccagagcatccaggacgaacacgagggaaaggggtgattccttggaagattggtttcaaggaggacatccacacgtacaggagtcggatgaggagcaagagagataccgaggcgaagattgcagacctagagttccgggtatcgagctatgaactcaacatgtaagaggaggtggcaaggaaggttgatgaacgcatggccgcacatcggtcccatgatccccagccgaccattcctcctgcaatggtgagcccgtcaggaaaccgtagcagctgcgcctcaacggggcaggtaggatcacagagcatggacgccatgcaaacacaggacgaattgacctgtcccgttgatgacatcactcagcggacaccatgtgagctgcatattcctttcaagaacttatcaataaaggtaagatttagccattccgctagttgctgcttatatatgttgattactaataaataatctctcccaacatgaaggtggcgtcgggcatggccatcccaacggacccttcaggtacttaccaccgcaggccgattccagcagaatactcgaaggtcgaagttgagttggtcgaaggcgcgtacgaggacctcgagctggattaccctggaggagacggtgagacgcatctacgagacacatgccatgccattattctatggcgcaggcggtacatcatcctccctgggcgacaagtggcgtctcgtgcaccatctcctccggctccgccatctcctcctcaggatcctgcaccgtctcctcctcatgctccgccagcaccgtctccacctcaggctccagcatcgactcctcctcaggatcctgcaccgactcctcctcgtgctcctacacctactcccccgcaagctcctcttccggcaccttcaaagtcaagggcccccccagctccaccgcctgcccacacaagggcaacgaagaaggcgaaagttgacgccgccaagaacaaggacccggggtacgattgcacgcaagaggatcttgacgcttacgttgcatcagaagtcaagagacaattcaagcctcaaagtccagaaaagaagattcctatagaccccagtgtcaggaacttcttcaggggtatgtctgcatctgtcaaggaggccatcaagctatcggactatgagcgaacgctgaagaaagcatcttctggaaagtccaaaccagtccctcagcttggagagcaaccaaaccaggagatcgagccgttggtgaccggtaaagaaatgacgatagaacagtttattactgacaccggtctaactacggatcaattgctaggagtcgcaccaatcgaaaaggcggaagtgaaatacatgtacgaactcggtaaaccgcttgtcaagcctgagctgctgcagtccctacccacacaaatgtacaagttccatcagctgtacatggagatgagcgccaccggtagagagatgatcggagcgaggatcagggacacggacttcttgcaaggagatgacattctctggatcaatttcaggggaatctacgaactataccagctggacgccctcgacgtctctattatgagttgctggattttgtaagta

SEQ ID NO: 14850 - DNA, 513 bp, Oryza sativa
cagacggatcgctcgctcgatcgaatctctgctggacctctccacgatgtcgatcgaggaggcgttaggtcgcctcaaggtcgtcgatggtgatgagccacagcctctctcggggcccatcaccatcggcgggaagctccacctcactcgggagcagtgggaggcctctcagggtgacgggaggaagggggagtcatcttccccgacaggcggccgtaagccgcgcaaggcgcggggaggtgtccagctacggtgggcgcgaagacgtgccgagggtggcgcccgcagaggcgcccagggcgttgccaccggcaaccacaagccggcacgagacgacacctgccgcaactgtggcaagcttggccattgggccaaagactgtcgacagccacgacgcggccaggcccacgtcgcacgggtggaggaggaagagccggctctgctcctagctcacgcaagcatcgagctacctccagcggcaccggccgcagcggctttcctccaccttgatga

SEQ ID NO: 14851 - DNA, 696 bp, Oryza sativa
ctgtctatcatatgcttaattatattttgcaggaaatatacactattagatggagcccaacaggaccaggaacaaataatcccaatcaacagttgcttttggcaaggtaaataatttgtgcaaataattaaatacctatattgcgtcagtggctcgggttcacggtggaccgggtgcacagcggcggtctacggaaacgaacggccgggatcaaccctatccaaaacagacggccgagatctaatcggtctaccgcggctcacgggaaacgacgacgatgacgtcggcgatgacgtcaccaccggcggcggctcgggcgcgcatgctcgccggcgaacaacggcgcggtggcgcaaacggagggcctctatgcgtagtggacgatgcagcgatccttaccgaggcacgaacggcggcggacggcgacgaggaagaagcggcggcgacggtcggcttgacgacgacggcggtcttccggcgatcctcggcgacgacggaggggtggacgaggacggcgacggcttggtgaacccggcgttgtccttcccaagcgacgatgacgaccggagcgacggcgtcgcacggctggacttgcggcagcgacagcggtgcaagagctcacggtgctagagctctaccggccatggaaggcgaggcgagggtggcggcgggtagaggagagctcgggggtccttt

SEQ ID NO: 14852 - DNA, 2925 bp, Oryza sativa
agctaagcacaggagtaggatattatgcttctcaacggcccaaacctgtataaacccctttatctcattgttcttgaggggcccaacaccctctacaccacacttctcaccgagtcctcgaatctcacccgctgtccccggccaaaccaacaaagggggcctcactgtcccccgcttgcggagttcaccctccgacagtcagccttctcatctccatgcctccttccttacttttcttataagcccttgactatgcaaatctaaaggatagggggttgttcacaatgccaccctctggttccccatcctctgctggtaaagagaggaaggggattcaccctgccaatagatctagtagtttggttagatttttctctaaataaagttttaattttttgttttgcctcatcgacgtcaatggcggtggcgatgccacaatggtggatcttctagtgttggtccctatccatcttgtctcggtggtctattttatggggtgtgattggctatgggcttcgtttcacctagcttcgtcgcatgggtgaaaatgatggcgttctttgtaataacagtcctccaattctatctctttgcttcaccggtggtccatctggcactagtgaagggattgtgagggtcgtgtggttgcgccgatggatggtggagcggaggagcaaatctggtttgggtttgggtgtaacatacccaaattttagaccttaaaaatttcctgtcaaaatagttggaagttaagttttttatttttgggagccaaaaatttccattttaaacctaggtaaactttgatctaactcttgcatgaataaaatttgagaacaaactttttcatctttaacctatagcatagatgcaaacacaagtgtaagcatgcatacttgcataaaacatattttaacttgagtcttctttatgcatttggatttttggttggcattgcatattaggacccatgagcataaataaaagataaagattcactaagcaaacctataaccacacttgagcaataattataaagacatgaaaatgaagtcaaatgataccacctcaggtcaagagtagtctaaataaatttcttacaactatgtagatccatttataaattggaaacctatataaagaaaagtcttgctaattatctaaaataatttgtgcaagataaaatcatgggaaaattcatgtaggctctacttaaaacatgcaactcatagtaattttggtacaatttaataactaaatttaatatctcaaataaatcagtcaaaccagtcaaataatagtttaattataatccttaatcggctaaaaacctaccctcactaattgtgcattaaactgcatggaagtgtataggggaaataatttattcaaatattaggttaattatcatgaataaatataattttttcagaatttatcttctctacttagttctcctaaaaattcaaattagtttccaataagcccatcttcttttaatttctgtaatttctgtgagcaatctatccataatttttgagtagaaaacgttaactaggtacattcatttacctccaataaaatccacacgacctcatatgcaacacgaattaatctatgaattaacaagttagggaagagaaaataatctgaaaattcgtccaaaaatctctttcacacagttttctacccatccccacactccagcctagtgtacttcgccctgggcccacctgacggtgtcacaagctagctccaactctgtgcagaaccttcccaccgatctaaagactgagagaaaaagagagaacgagagagagagagagagccgaccgagctctggggcgcgtcgacgcgtggccgagacgtgtcgccgctccaaacccaacatctcttgatctcttccctcccagccgcttcacccatcactactcctcactctcaaaccgaagaagccgagggagaaggctctctgctcctccggcgctctcaatctcgtaaccggccgcgaagaagaaggacggcagcaatcgtcgtcgagccgcggtcatctcctcccttcatgcgttcccttgtctactcaggatgccggcttcattcctctaagtttcatcccatttggtgcagcggatcgtcgggaacgcggacctcaccatcgttgctccggagcgcgcaccgagtgccgccgtcgggttctcgtcgtcgttccgaccgctgtagaccaagccaagccgagccgtcgcgccaacatattctccttgaagtcctcctcaaaacccttcaagaatcccaggcaatggcgcagcaagtgcggagatcggccaccgtcttcttcacctccggtcgccgtcgccattgtcgattccgcctcctccggtgagccattattagattactcgcgcacacaccatctctctggcctcactaacctcatggacacacatgcatgatagttcttggagccgattgagccgtcgccgttcaccccggaggttcttgccgccgccgagccgttacacgagccgccgtcgtcaacctagcttcgccagccttgttttacatctcggtgagcacactggactccttagaaaagcacatgcatgcactcccttagtcgattcgcgcctatggcacaacatgcctacccatgccaaaacatcctccgctcggactcgccgccggcgttactccgatgtccactaaccgagaaaagtataggaatggaatcacaataacatgatcttcatttttattttggtcgtacccccaaacgagtcatcgtttgccgccggcgagctcgagatcgagctcggccatggcgctctgttctcgcagggacttcgttttgagaatttaaataaatataacgttcatgagaatttatttatttaaatataacgtttaaataaataaatttaaataaac

SEQ ID NO: 14853 - DNA, 1378 bp, Oryza sativa
gttggatgtttcatagagtggtagatatcctatataatctaggccaacgttgttacttaacctaatcggctacctttcaatgatagatgtagccgattgaaggttagataacaatattgtcaggtattatatagaatatatgataactcgacaacttacatagacaatattagagtatcataaagatggaagcactaatcccgagaacgcaggccgccataacaagtttttcctctagttgaagatcgaaaccgatgcagctcaacccgaaagcaagaactcgtcgaaacaaaacgaaagtaaaagggtggcgatgcgccgagattgttattgaacatgtgttatcgattacatgggactcggggtctatttatacccgagattacataatatgtccatatcggacacgactcttatttctaacaaactctaagataccataagtctttactgcagacttttgcccgaacatatctctaaggaaattacataaaatatcctaattatagatacaattgccttttcaggactcaatctgtgcatggcaatccatgtgaagcactttaacctaacccgatgtcatgtatcgagtcatattgtcggaaccggcttaatcggctaaccttgtccgatttgaactctgccgattctaatcgtagccgattcggactttagccgattcttgctctgtttccagaacgatctccatcttggatttcgcttcggttttatcttcatctccgatacttgaattaccaaatttggttgttaacagaggtctagctttgcagcgagcattttcatctccttgacggtgtgcattcctcgctaacaggtccggagtcgttcctcgctccagcccaaattggagaccatcttttctataagatcgacggctcctttaaccgtcttagaaaagaaagctcctgcagctgccgcgtccaggtggtcacgggatgtgggagtgagtccattatagaagttctacaggatcagccagttgtccatcccatgatgagaacaggcggccatgtactcctgtagtgattcccacgcctcgggaatagactcatctctcgtctgctgtaaacttgaaattctcccgcgtagggcgttggttttgcccattgggaagaactttgataggattgccattgagcatttgtcctaggtgttgatcatatcatggttggcatagaaccactgcttagctttccctagagagaaaatgggaatagtcggagcctgacggcgtcaggactgacgcccttcattgtgtacgtgctgcagatttccaggaactgctgcagatgtgcattggcatcctcgtttggcttgccacggaacaggctagcctacgccatcatgatgaggctgg

SEQ ID NO: 14854 - DNA, 706 bp, Oryza sativa
ggcctaggagatctgcttagttccagtgcaggtccaaatcttgataagatgcaggcgtgccagtcagtttgatcttacaactgacaagatatacaaatagcagatcaatgaaccaatcgactgacaagccgatagattaattccagctgatgccgataccagctgatagcgatagagttttgagctatcggttatatgtttgatgtagataacaatataaaggcaatcggctaatgatgatgtaacaacataacaataatataatccagtagaaaccaatcggctaacaatgacatgatagaataaacactgatccgaaggttaaagcatacatcggctgaaggtccgatgccataaaatccaaacgattagataaacagtaaaatctttgttgcgatcggctaaatccattatgtatgcaatcgttgtaagccgatgcaatgtccagataactcatcagctgaaaccccgatgaaacccttattagcaatcaagaaacaagctagagattatggttctaaacatgacttagtagatcaaacttaattgatgcagcactaagtatgaaaagaaacataatatctagacaatcaaacccttaactgattttcggggtggtagatatctaagtcaatctaatctagcaagacgatttagccgataccggcagaaaccctaaagcgagaagcagccgatagagctaaat

SEQ ID NO: 14855 - DNA, 1113 bp, Oryza sativa
acccatgaattcagaaaccccagaagtccgcacattcctcaaatacaaagcacttccctagttagatgtaggttagacttcccgttcgagaaactctaccttctacctgccctcaatttatgcacgattaatgaatgccacctgggtggaagcgagaggtggaaatggaaggtcttagttcggaggtgggatctctacctgatagttgcattgccattcatgatgatcccctggcattcgtccattcagccattcaccattcacccattcaactggaattttggttgaatgccggaattgtgtccacaaattgtggatggatagttggttggctggctggatggctggctggatggctggctggatggatggtgaatggctggcggcggttcggttgctttgaagcatttgttgctatctaaattccatttaaggtcgtaccttatcgcccagcatcatcttattctctatttgtattccctccatctttcagatacggatgtagccttggatgtgcccgtgcccaatgaagaggaagagcgcaacatgaaacgtaagtacaaaagtaccggacacccacccagatcccaatagaatccgccaaatcctgcgggaaattgtaatcccattcaccagctcctacatttaattaacaagagaactattgtatttatctaacacctggattatctccacctttcatttgatccctatttatagattacgctgcgttgctaacgggccgcacctcctatttcctcaagggtgaggaaatgaagtccatgtacaccacctacaatccgcagaatgtggtggccaccgcccgtttcctgttccacaagaagaatctatactactccttctacacctcatcgcgaatcggtcgtccgcgtgccattcaattcgttgatgatgcgggtgtaatcctggaggagcatcaactggagccaccttggcgggcactctcagtgtctatcagaatgccacgggcaagatctgcggtgtctggcgacgagttccacgtgattacaagcgcatcctgcgcgacgatcgtctccatgttgtcctcctctggggcaacaaacagcaggccgagttggctctggccggaaa

SEQ ID NO: 14856 - DNA, 610 bp, Oryza sativa
aaattcattaacaggatttttagtggaattttcagagctctagaaataattttaaccaattaaaattgagcaagcaatattttaattccagggaaaatcctttttcctttttctttttctttttcctctctttttcctcttttttccgaatgggccgccggcccattctctcctttcttccccctcctccttgttgggccagccgcaggccgaggcccatccaggccgtcccgcctccctcctctctcggggtcgccgacaggtggggcccacctgtcgggcccgtctccctcctccagccgacgccgcgcccgcaaccgccgcgcccgcaaccgccgacgcgtcgcctccgcctcctccgggccacgtcgaccacgcccgcgcgtgcgccgcgttccccgcgcccactcccctttttcttccgctcgcgcccgcgcccgagatggccgggattcgattttcgaatcccgcctctctctcctcccccacttctcccacgttggccggcgaaatcccgcctctcccggccacgtccggccctcccctcccctatttaagcttccccgtcactccctctcgctttttccttttctcgccgaactccctcgtg

SEQ ID NO: 14857 - DNA, 1274 bp, Oryza sativa
acatccaccacaaggtaaagtaatgcaacttttgtttcaaatctttccatcattttaacttgtacctatatgcctcattgtgtgtttgtatatgcagggaagtactatgtggttgatgcggggtacctaaactgcccgggctacctttcaccgtatagatgcactaggtatcatgtggagcaatggaaaaacggcccccgccacaaggtatgaaagaaacctttaaccatgcacattcccggattaggaatgtcatagagcggtcttttggtgtgttgaagatgaagtggaggatgttgttggacatgccatcgttttcggaaaaaaaacaaactagaataattgttgcttgcatggttcttcacaatttcattcgagagagcaaaattagggatagggaatttgctaggtgtgatgcggatgcagattattttccaatgcctacatcacctcactctgactggtcagaagatgaacctcttgttgaggatagcaacatgaatttcttccgcgatgacttggcaaatgctttgtttaatggattgtaatttttttttacggtttgaggactttaatatttatgtgagataattgttgtatggactttaatatttatgtgagacaattgttgtatggactttaatatttatgtgagacaattgttttatgtaattgtatatttatgtgagacgattgttgtatggaattgtatcttttatgtgacatgattgttttacatacttgcttatatatttgagacaaattatgtgtttgggcttgtaaggaattgtgtatgcttgtatgtgcctgtattggattagccatagaagatccggctgctgtatacttttagtggaggcaaatgattgggatggtacaataatagctaaatagcctttggatccaaacagcaagagggctattttggtagggggctattttggtgggataatctttaacccaaaaaatatccctgggatagttctccaaataggccctatatatacagaacaactacagtagctttactaaacgtttttctccagacatacctaaattttacgctaaattttttttatcttgacatacttagtacctaaagatactaaattttatactagaaaatataatacctcttggtatgataaaattaattatcctattcctatgcatgagcgctcaatatgaaggttaactaaaagtaattaactgaacaatataatgaagattcctttgcacgagctagcgatcgatggtcgatcggaaggcacgtt

SEQ ID NO: 14858 - DNA, 540 bp, Oryza sativa
tgcacgggctctccctctccggcgagctccggaggcggcacaggtacaccgtcccgatgtcgccgccgccgatgcgccgcacgagcttgaagtcccgcgggcctagcggcgccgcggaggtcgtcgaagccgcgcggatggccgcccacgcgacgtcgccggacctgtgcggccgcaacagcaccgacgcccgcggcggcgagcacgacgtcgccgccgccgccacggcggccgacggcgagcagtcgaacgacaggcgcgacaggctcgagcaccgcgcgaggctccccgtgctgctcgccgccgagctaaggctcgagttcggcgccgtcgtgtcggcgtcggaggagtacctctccatcgccgccggcgagagctccaccatcttcggctttaccggggcgcgcaccgccgcaccatgaacgtgagcacgtgacactgtcgtcggccgtcgtcgtctacctcttcggcgaaagctcttcgcggcgagctcgctgtgccgtggtgaagtggcaggagcggtttcccgggcgatttata

SEQ ID NO: 14859 - DNA, 1203 bp, Oryza sativa
ggtatgagcgaggggtagtataacctgactgcccataaacccgctggtctttaagcctggaactgcatatgggctggctcgcaaagaagcagcagaataagcatcaacaccaggatcagcccattcagaacgatgctccctcagaaatcgcacaagtagagcaggaggtacattctacattataaaaaaaatgacattttgtaaagcttaattctttgatttggaacaattttggtcaaagtgaaacaaagatagagacaatctataattagctgagcaactaaatagagcctatgtcaacctgaagtagcattgatgcctttgcgcacaagatgccacctccaacagtagaaaacagagggttcgggctgacatgggatccaacaagcttgtttggagacgagtttactgaaattgtaatgtcctcactaccatcactgctcaacaaagaccacccatcatctggaaatccactaacagcatcattgaaacctctgcaaattagagtatggagttcagatgcgtgagcaatgagacatgcatggaactgtgtcatatgacagtatgccaattggttctaatacatgggaaccctcaaatagctacagacctgctgagcctttgactgaaggtcctgaaaacagcaggctggcgaccagcaccgtaggggatttcaccgcttgactcatgcgcaatttgcctaatgtgtcgcaatgcctgaacagaatgaaccatgtcattggtgataagaaaagttatgcactcacaatcaccatgaggtgaccaagtgctcttcaacaacagaataaaacagtgcacatactgcaatggtcatcttctgtgcaaggatctttggagattcatagagcggtcgaagaacctcaggcacactccaagcctgtaaaatacacaggattaataagatatgtatctcaaaactattcaatattacactagttaatgtgaaaacactattgttacttacatccaaatcaacatgatcaacaatgtaaatcatggagccacctccctcacatggtcgaatcagataaccactgggaagtacctcggctctgataaaattcggagtgttaggcccagatgggccaccagtggactgagtcaatgacctttcacagatctacagaacaggaatggtgtcaaacaatatttaatacaacagaaactacacttcagttgaaa

SEQ ID NO: 14860 - DNA, 6430 bp, Oryza sativa
aataatttatctagctataggtagtagtaagcttggatttagcgtagaaggtttcggccaggttcttgatgactaaaactgcgaacaaaagttcaggaccagcttctccaatagctccaacggcgccggcgtagacggcgagcccaccgacggcgaagccaccgacggcggcggccgccgcgatgacacggtcgatccgacggctagtctcgtcccacacgaagtatcccgttccgatcacccgcgtcctgaactccctcgccgacgagcgcgacgcctcggcccaggccatggagaggagcgtgcacgacgcgacgacgaacacgctatggatcagcagctcgtggatcaggccgggatccaccagcagcttcgacggcggcgtgacgtagtagacgaggccgcccaccgggtaggcggcgccgccgccggcgtccttccacctgccgagcaggttgacgacgaaaccgccgccgccgccgccgctgctgtggaggtggagctggtgcgagactcgacgcagaacgccgagacggcggaggcgtgcagcatgatgggcatcgcggaggtgtagagcagcttgattgggacgaactcgtcggtgccgcggcgcggtctggagcggtacagccgccggaggtgggtctcgtcgaggcgcacggcgaggacgaacataacgcaggtggtcatgtagttggagaggttgggaggtccaggcggagcagcgtgaagaggagcgccccggccttgtgccgccacgacggcggcgcggcggccacgcggtgggtgacggcgaacacgggcccctcgaactccgggccggcgccggcgaggcggagcttcacggggctgaacaggtgcgacaccgcgcgctcgcaggcgttggtggcgatgagcaaggaggcggcggagacgccctccacgccgtagcccgtctcgtggaggaggtcggccagcacgacgaccacgccgccggcgaagagctggagcacgacgagcgccgcgttgcccgctccgccgctcccgcacatcccaagcgccgccgcgatcccgatcaccaaccgcgacgcgttcctacgagagaccgtgacgtgtgtaaagccggagagaacgtgacgtgacgtaagcgaggcatcgagctagtaactcacaggaggccacggtggttgaggagtcggagtcgaagaggagggcggcgaggaggcgcaccaccacccacgacgtgacgacgggggcgacgccgagctccatcactgtgccgcggggcgcggcgaggaggggccgcgcccagaacagcgggtcggggtcggcgtcgccggcgccggcgtagagcgggacgtggctcagcgagagcaggagcagcagcgacgccgccgccgtgttccgcacctggccgcggaacggcaccgccgcttccctcctcctctgcatccgcggccccagcacgcaagcggccggagcagccgccacagcgccgtgccgcgagcccgtgacttctcctccgccgtgcgagccatatccgccgccgcgatggctcgccggcgatctcttctgcctcgtcgttgattcggactgttcgatcgataggccgagttgatataacatgacatccgcgcatgtgcgtaggccgagttgggctgcaattgggcccaaggaggggaataagttcaatttttgaccctcaaaagtggtcgaaatctaatccgtgaccccaaactacaaaactggatatctcgaccccctaactctcgaaatcggtacaatttgactccctgggtggttttagagcgcggtttcgctgacgtggcacctacgtaacggtgttggctcggtcttctttccacgtggcgcttacgtgacattagaaataaaaaatatttgggacccatttgtcatacacacaggaaaaatgtgggagtcactgttatgtggagcccacataatcctctcctccccgtcttcctcctcccttctctcctctccacggacgatggagtctgcgccgactcgccgccggccaccgccttggccgccgtcacagacggcatcaccaacgcccctcccccgcgggttgtcgtcggcctcccccacccctccccgcggagccgttgctagcgcacccggcggcgggcgggagggcgggcgctggagctgctgcgacgacgaccccttgtctcttgctctccttccttcttcaagcggtgtggcgacgaggagcagccgcggagcatgattcctgcggcggagatggcgatgacgcggtggaggccggtcggcctcgaggtagcgcgccgtggcggcgcacggggtgaggcaggcgtggaggacacggtggaccgggtggaggaagaggtggaacgcgtgcgggggcgcaggaggaagcgaccagcatcaattatcacgacgagctgctttgggtgtccgtccacgccgacatcggctactgcttttctgactcgcgccgcctcagcctgccataactccaatccaacatccaggtacagctcttactatacaattaaattaaatctgccattagttagtaactaagcttgataatatttgataatcagcgagatgtacagaggatcttggccatctccgagatatacagcggtgacgcctgcatgacaatcatcggtgagatgaatcaactgatatagaatttctccggtatctgcgccacagctcagagaaaggcacccgcccgccgccgccggaatcatgctccgcggctgctcctcgtcgccacaccgctcctactcgtcgtttctgtttcgccggaacatctccgccgctgacccccgtcccacggccgcagctcgccaacggaagagagaggggggagaggatgatttatgtgggccccacatatcagtgggttccacccatacttttggtgaatgacaaatgagttccacgtatatttttttatttctaatgccacctaagcgccacgtcaacgccacatgaaaagaagtccgagtcaataccaccacgtaggctatcagcgaaaccgccctccaaaaccactaagcgagttaaattgcaccggtttcgagagttagggggtcgagatatccggttttgtgatttacggttacggattagatttcgatcacttttgagggtcacgaagtgaacttattccccaaggaggacgcgaccgttggatcctattcgcagcccagctcggcgaagcaaatggattatttatttatttatttatttttattattactacaataaaaatgcccgtgcgttgcaatggatgaatgctattttaattttattattgttgtacggtttagctagaatgaaattcactttggcaattcgcctagatatttgatgaactaagtctgattttcattttaagttagcagtatttttaaagagatttttatatttccaaaagtaaacgaatttaaaatccgactcaaacacggatctgtattttaaaaagcgaacgaaattaaaaaccgactcaaatacggatgacgtacgaaaataccagcaaaaacatattcaatttttataatagtagagatagagattggattgtaatgagaaacgtaaagctattcttttgttatctgaaaagtatgtctcatattttcattgctcgttggcttattaattgcagcccaattttaaaatatgaaacttaattttagagttgtttttctcattgtaatttgtttttcaacgttggctttaaattattaagaacacgacataaaattgtactcataaattattttcgattgattatctattaattgccgcctccgcctccacgccctcggcgaagcgctccaccaccttctcctcctcctcgctgctgctcatgtcttcttcttggcattcttcctcctccagctgctgatctgtgtccatggcagagatcgccggagaagagatcgctcgacttgaggcccgcggcgtcggcgtcagcgccggctgcgaggcaggaggtggtggatcgacagacatccgcgcacgtgcgtgggccggtgataggctgagttgggctgcaactgggcccaaacaagacacgattctattcgtggccgagatcagtgagcaggacgtagcactgagaaaagtctatttgggctccctcaactatgtaccacaatcagcaaaggataatggtttaagctgagagcataatgagccggttttgataggtagaaacgcttttgttttagtttaacggtggaggaatacgaatcacattcagcaaatacttccttcagctacatatgcatcaacaatggttcagcacggcataaaccaaccaaggtaactcaatgccgattgctcaaagcatacacacatcacacaattcatagcattagcatagatagatagagatacataggtcctgaaacttgttcatccacacagcagcagaaaaaaaaaaaccagggttctaaaattttaagcttcaaacatggagagaccatacacacaggtgctagcactagctaggataaagcaagcaccatgcatgtatggacgcatatgtttaatacaatacggtggtggtattcaggtctttgttcagtttgccacaatggcacaaaagcaaaagcactagctggaagctggaaaccatggatggtggatcacatgaaggtccagttgacgagcatgaaggcgaggcagtgcggcgcgtcgtcgtcgctaagaaccttccacgccaccgcctgctcatacgatgcctgccgccccatgctcgacttgcagacgcctccagggagataggtgaaaccctgaaagaagatagacagaccccaaacaggcttgatcaggaacattgctcatggtctggtagtactctgatggatgcgtcaccgattgtcgcgaggcagggacacggtggttttacctgctgcatgatcttggggaactccgagcacagcgccttccggccctcgtcatccaggatcatctcgagcgagatgtcctggaggttgaccagcgtcgtctcaaggatgtcgaggccggcattgttggcgaaggtgaacataggagcaggctgccagtagataaccaaactgaccattagcaaggtttccagaacatgcatgtgatgaaatgagcataaaattagtgggcagcactactaaccttcagagaacagcacagtattgcgtcgctgtgcttccacaggagcgccaggggagaatcggcatcttcggtatcagaccaacggatatctgctccggtgtgagccctgaaagatccacggaaataactagtgcattaacatcattgatcacaacttcagatgtggcaatgtgtaggtggttctgatgatgaagaacctgagatagacttttgctaaaaataagtattttacttacctatagctcctaccaatccagctagcaagtgtaagcgcctcaggagaggctggagggtgcttcattccgatctggggtccaagtcgagaaggagctattgccacagccaccctctgcacggatgccatcacagctctgacataactcctagccattgccgccacgctctcacgaaggtggttctcgtatgagaattggaaagcaatggtcaggactgatctgttacatgtgccagatgcttcaactgaagcacgcgaagctccacctggtccaacctcaagggcggatgcaaggtcgagcgtgcgtgttgcagatggcccatcctgcaggtttgagtgcataacggttaattggtgagccaacatgggaaagacaaggcctctggaataagattatggaccagtcataccatttttgtatctagtggtatcacacggaatcctgagggtaaaagtggtgcatcatcagcaaaagattcgtcaataggagcaaagacaagctgtgcagatgcactagtagcattctcatcaaccccgctgcaaagctgcatagaaagcaatctctcagaaccaggaaaatgcaacaaacaggtacaacttaaggcaattgtcatgagcaaggattatgtggagaagaatcgggatgaatggggatagattggattatagtagatgaaataacaaggaatacggtcctgaacctaaacggcgcgacgctctccgtcgcactgagaaggcaggccgatgggcactaagataaatcttgatctaatgcctaattgacctgagataggatccctccttatatagatggaggactccttaatctaatcctaacaaaccttatctaatcctaacaaaccctaatcctatccaatggacttaggacgcccggcccaaagcccatgacattactcccccctttttgagcagctcgtcctcgagctgcagcacaccctgctagactaacgaagcaccataacctaaactaagactcttaaaccttttacatctcagcttttattatgaacaaaaataaaaaagggctgcaggaat

SEQ ID NO: 14861 - DNA, 850 bp, Oryza sativa
tacggctctataccccaacccaacttgctctggcccttggtcctcccgcatctcttcctcggtaagcggaccgtggaagctggggggtatccgcttgggactgatagagaacagcatatcttttttgtccctcctgacccctaaaaaaaatatagttgaagtccggtcgacgttgttatccttatatattctgtcaaagaaagtccctcgcgtaaattgctttgaataggtaaatcaatcatttgtccttgaggatccgccattaatcctcgcatacctactaattggtgtacctgagatgcatttcctctagctcctgaaaaagacattagatagactggattagaaggatctgttatccgaaaattcgaattcatttcttgtttcaaatattcacttgtagcataccagatttcaacggattggcgtaatttttctaccgcgtgtacagccccataataatagtgtttttccaaaataaaactctgttgttccgcatcttggactaaccatcccttagagggtattgttaaaagatcctcgattcctaatgaaatcgatgtagtagtggcttgatggaagcccagcgtttttatttgatccagtatatgggatgtatatcccattccgaaatgatctattaatctgctaataagtccgcctttttcatcttccgtaggggcctttagtcttttgattagagtagaggtcgcgacagagcagagcgtaccgccctgccatagtcgcgaggatcttaatagtcggtcgcgactgttgtcatagtcaacgacggttgaaacttccaggaaaaaacttcgaattgggagggcgatcctcccggtgagctgac

SEQ ID NO: 14862 - DNA, 1379 bp, Oryza sativa
tgcaggtacaggggcccaagtgcaattatctgaggcacgatatgaactatgaggtgttgcatcatatccaaaaatgatggagggaaacacatctcaagctcgcacactgtctgtatagtgaaagcctggagaggacataactctttaggatcaattactttctgagatatggaattgaagaaataacacagcttagtgatgaccagctttacgtgaactggttcgactgctctagttgcaatggcaaggaatactgtgagcattacatgacagttatgagaattgtagcctgaaagcgacagatccttcatcgacactagtcgcttaatgtttgaggagaaggcagtaggcactctcaccccatgtagggatttgcacaatgcaattttgtcctctcttgtcaaggtgtagcaagcaggcggaaggtactctttccttatttgcatatccacgaggtccttacgtgatttcagcctatccttggtcttagttggtatgtccagtatagtcccaatggtgctatcgaagacatttttctctaggtgcatgacatcgatagaatggcgtatgtctaaatctttccagtacggaaggtacttaaagaaaatggagtgcttcttgaatggcacgctagggcttgttggcacttcggcattatttctcttccgcttatttgtttccttcttttttaccttcccaaaaacaaccttcaggtttttggtcattctgaacactttatcacccttccatggttctggtgcatcaccttcctcaacagtaccatcgaaatattctgcttaggagcggtacgagtgattctttctcaagaaatgctagtgccgcatgtacactagcttcttcgatcccttaagatacctgtacatggtaccatccacacaaataacgcaacccgtctttcccttgatttgtcccaatagggaaaacagtgtaggcaagtcgttgacggtgacaatgataattacatgtagcgtgaagtactcccacaggaattcgtcccaaactcggatcccgtgttcccacaaatcgcgcatatcctccaacaaaggctccagaaacacatccatgtcattgccaggttgtcgtggtccctgtacaaggatggtcaacaagatatacttccttttcggacacagccacgttgggaggttgttgttgagattatagacatataatgatttaatctattccataaataaatcatgacattacagatgaaaactagcatgaacgcatcattagatctatacatgtaaactacacagtataacatgaacagatcaaatatgcgcaacatattgaacacgtaccgaggtgacggaaagatcggttgcttggtcgaaacttttcgcaggtgtcta

SEQ ID NO: 14863 - DNA, 812 bp, Oryza sativa
gattgcttctactcgaacgccactgttttggcatgcactcattttgtctttcgcttttgtgtaaaacgtgtatccatttagatcatatgcttgccacgaggtatacacacttgatggcccatcagccagcattttgattgttcttttttccatggtatggccatctggtagatcgaggttcttgaaccattcagtaaagtgatgcttgtgtttcttcatgatccatgcattagatcgccccacatttgttgcttgtaattcatgcaggtgttgctctatgtacggctccactattgcgagttgctgcagcacagtgaaatgagcatctttcacttttttgtagtcattgtcgtggattattttcttcccttttgttcctttcccagataatctaccttcatgtcgagataccggtaaaccaattgctttcccatctttttggtaatcaatgcaacactcaacgacctcctcggttgtgtatccctctatcatggatccctctgggtaggcgcggttccgtacgtaaccttttagaatggacatgtatcgttcgaaaggccacatctgatgcaggtacaggggcccaagtgcaattatctgaggcacgatatgaactatgaggtgttgcatcatatccaaaaatgatggagggaaacacatctcaagctcgcacactgtctgtatagtgaaagcctggagaggacataactctttaggatcaattactttctgagatatggaattgaagaaataacacagcttagtgatgaccagctttacgtgaactggttcgactgctctagttgcaatgg

SEQ ID NO: 14864 - DNA, 657 bp, Oryza sativa
ttcaaaatatttaaactaactaaagttgtattatttttccgcaattaattaattaatgcatagatggcggacagggcatggatgaataaagagagatatcgtgcgtcgtacattgaaggagttgacatattcatgaaagcagctaagaagaatgctgcatctaagaagaccaaagatattagatgtccatgcgtgcactgcaaaaatcagaaaagttggaacgatccatctgtaatcgagcaacacttggtgacgcatggatttgttgaacgctacacaaactggtcacatcatggagagatcccaagcaagcaggttacgaaccaggctacagtacgcgacgaagtgttgagctgggacgaggatgtcattgtagtagctgaagaagaagaggaagtgtatgcagtagaacccgttgatgatgatgatgttgttgatggtggcaatggtcagcacaatacagttgatgatgccgatgatggtaatgtcagcgtagataatggtaattttgcagatttggaagagatgttgcgtcatgctaaacctgaggttgttgctgggtccgctcgtgggttggataactttgatgcattgtaaaaggcagcgaatgatcttttgtacgatgaggcacagggctgtgagaaggatttcacattg

SEQ ID NO: 14865 - DNA, 1968 bp, Oryza sativa
aaataaatcatgacattacagatgaaaactagcatgaacgcatcattagatctatacatgtaaactacacagtataacatgaacagatcaaatatgcgcaacatattgaacacgtaccgaggtgacggaaagatcggttgcttggtcgaaacttttcgcaggtgtctacgaagacacgaaacacgcgagcgaagaggaaggcgagccgtcgtgaacaaaacagggagcagtcgcgcgaagcgcttcccaaaaaccttattgccgccttctcccggtgcaggacgtcgaaggcagaggttccggagacatgctctcccgatcgtcggtgcacgccggcgagcgggatggagtagtctacgagcgacggcgcagtacagagtaggaggcaaaccctagattgatttcgccagtgttgcgtgaagacggcgggtcggtttatatagagaagggtcgcttgatcagggcgcccgcacgatctctactgcgcataaccgaaccagataagtcgcgcgtaacttatccggactccacgccgtttgcacgcaccggatttttcggaacgtttccaaaacaaaaacgaatccgatttgcagcaaaacaaaactgcaaaaggaggctgcatctgcgcaagggtgaggagccaatttttcggaccattcgacgcgtacgtcgtgcacgcgcgccgcctgcccggcccggccaggcgaggcgagcgagcgcgcgtgtgtttcccctcttctctccaccacacatgcttcaagtggctaggaggacatcctcccttttaaggaggtccccctctcctagaataagcaaggtggtactaaactccacatgcatgccatcccatgaggtgggcttttgtgattttccaaagaattaatcttcgagtgggctaaggcccattcattaattccaacagttgtacatggttaggagtactggccacgtgctgtgtgagctgctcaagtcaccgaatggattcattccatcggtgctcaatgcaaaccttacgtttcttgggtcctctgcaaacttatgatactttctgtcaaattccttccactgtcttgcatctgcaggatgtcgaatcatcccatccttttttcgcttttcgtgatgccagcgcatcaattcggcatccctcgggtttgagaacaaacgcttcaaacgatctttcaccggaaggtactgtatgacaagctggggaatcttctttttgttactgtctttgcatggatcagactcttctacatcgtcaagggcaacatccagaccctcggactggctacggcttgttttgtatcgactactcttgcatgttgggcatctgtccaaatcctcgtactctttacggaataggatacagtggttaacacacgcgtgtatctttcgcacacccagtgacaaagggcatataagcttcttcgcttcataggtgcttgttggcagggagttgggttgcggaaaaagtttcttcaacagaaccaacaagtcattagaactactatcggaccaaccatttctggccttcaatctcataagctcaagcaccatccacaacaatgtgaaatccttctcacagccctttgcctcattgtacaatagatcattcaatgcctttttcaatgcatcaaagttatccaacccacgggcggacccagcaacaatcttaggttcagcatgacgcaacatctcttccaaatctgcaaaattaccatcatctacgctgacattaccatcatcggcatcatcaactgtactgtgctgaccattgccaccaacaacatcatcatcatcaacaagttctactgcacttcttcttcttcttcttcttcttcttcttcttcttcttcttcttcagctactacaatgacatcctcgtcccagctcaacacttcgtcgtgtactgtagcctggtttggaacttgcttgcttgggatctttccatgatgtggggtaaaattt

SEQ ID NO: 14866 - DNA, 1567 bp, Oryza sativa
cggcggttcgccccgaggcgcgcttcaggcggtaggcgcccttctgcggcatcccccggtaaacccggtgccggagactcccgttcagcgctggctggacgacgtggccaacttagtcaccactgcccagcggcagttggccacgggtggccgatccgccgccacttatacgtcgcgtaccccggttactctctcctcgtcggcaaggaggagggcccgtcggtcggccacgatctcaaggcggtccacagctccaacatcgtcgggggcctcaggaagccggaggcgttatgacggtctctacgggaagcaggacgctcggatcaacatcaagcgacgctggaacgagtgccgagctgcccgcatgggggaaggcgcctcatcatctggagtgccacgctcctgttcacgaggcggccctccccccacgctcacccttggggggacaggttgtagggccttcgtggcgagtctccggaatgtccggtggcccccgaagttttgccccaacctcacggagaagtatgatggtagcatcaatccctccgagttcctccagatctataccacgattatcgtggcagcggggggagacgaccgggtcatggcgaattactttcccatggccctcaagggtcaggcgcgtggctggttgatgacccagccccccgactccattcactcctgggaggatctatgccagcagttcattacgaacttccagggcacatatccccgcccgggggaagaggcggacctacacgctgtacggcggaaggacgacgagtccctccgctcgtacatacagcgcttctgttgggtccgtaacactattctgtgcattccggcccatgcggttgtgtatgcattccggaacggcgtgcgacacaatcgcatgctggagaagatcgcctccaaggagcccaagaccaccgccgagctcttcgagctggcggacaaggtggcccggaaggaggaggcatgggcctggaactctcctggcgccggtgcggcggccgcggctacccccgagtctgccccccgctctaagcggcgagatagtagaggcaaaaggaaaccggcccgctccgatgacgagggccatgtccttgcggtagatgggcccgtacgggccccacgcaaagggaaggccaccggcgacaagccgagctccaccgctccctccggcgagggccggtcagcagacaagtggtgctcggtgcacaacacttaccgccacagtctcgccgactgtcgctcggtcaagaatttagccgagcgattccgaaaggccgatgaggagaagcggcagggtcgacgggagggcaaagctcccatgacctcaaccggtgaccggcgatcggaggccaagaacaagcccccgctgatgatggcgtgacagtgaggatctggatttccagataccttaggggaccgtcgccacgctcgacgggggggcttgcgctcacacctctcgtcgaggcttcaaggccatgaggcgagagcttctggctgccgttcccacgcacgaggcggtccggaaggcgcgctggtcagaggtgaagct

SEQ ID NO: 14867 - DNA, 1648 bp, Oryza sativa
ggccacgtcgagctcctggtaaccttcggcgactccaccaacttccgcaccgagcggatcgacttcgatgtggcggatctcaatctgccctacaacgcggtcttgggcagacccgcgttggtgaagttcatggccgccacccactatgcctacctccagatgaagatgccgggtcctgctggccccatcaccgtctttggtgatgtcaaagtcgccctcgcctgcgcagagcagcgcgccgacaacctggcggtggccacggagccgcaggccccaggggctttcgcgtcccgcgtctccaagaagcaccttacctcggctgacgaggtgcccgtcaaggagatcccccttggcgatgatccgtccaagaccgccaagattggcggaaccttggacgccaaataggaaagcgcgctcgtctccttcttgtgggcgaattctgacgtcttcgcgtggaagccgtcggatatgcctggggtccccagggaggtgatcgagcaccgccttgccgtacgaccggatgcgcgacccgtccggcaaaaagtgcggcgtcaagccccggagcgacatgccttcatcagggaggaagtggcgcggctcctggaggctgatttcatccgcgaggtgatcaatccggagtggctggcgaacccagtggtcgtcccgaaggccaacggaaagctacggatgtgcatcgactacacagacctcaacaaggcatgccctaaagatcccttccctctaccacgcatagataagatagtcgactccactacggggtgtgaccttttgtgttttctagatgcatactctgggtaccatcagattcgcatggctagggaagatgaggaaaaaactgctttcattactcctgtgggcaccttttgttatacaactatgccttttgggttgaaaaatgcaggccctacttttcagcgcatgacttgcattactttgagtaatcagatagggcacaatgtagaggcgtatgtcgatgacctggtggtaaagacacgccaccaggacacgttgcagcaggacttggccgaaactttcgatagtcttaggtccacgcgcgtaaagctgaaccccgataagtgtgtgttcggtgtgccggcgggcaagcttctcggctttctagtctcttcccgaggcatagaaacaaatcccgagaaaatacgcgcgatagagagcttagggatgtgcagtgcgtcactggatgcatggccgccctgagtcggtttatatcaaggctgggcgagagggcgctgcccctattcaagctcctcaagcgctccgggccgtttgtatggatggaggaagcggagcaagctctcaatcagctgaaagcttacctcacttcccccctgtcttggtagccctggggccggagaaaccattgctactctacttggctgcgaccccccatgtggtgtgtgccaccctagtagttgagcgcgaagaaagtgaacgggaggcccctctggctcgcgatggtccctcgtcctccgaaggcctagtgcccaaagcccctagcccccgggagggccccgaggcccccgagggaggaggggaggctttggcaagtggccccgagcccgaggtgacccgggatccccccggggcccccgagcaggggcgccccggg

SEQ ID NO: 14868 - DNA, 1436 bp, Oryza sativa
ccggtcacgtccggttgaacgggcggccgtgcccccacgccgcctttgtctccggcggagtgggggtaggtatgacccatcacgtcagagcgtcactcgaaggagggctaccacaagtcttcacttatttatgagggaatgacagggctgtcccccgtgtcaggcgggggacggcgctgggacccactcaaggaccggttgctgcttagcttccgggggaaggcacggattgaggccctgtcaaagtggagcggggtccccctcccatggaggggtaggtacaggcggtgcatgtggtatccccttgagctataaaaggaggaccttgcccaccgagacaagaggacgactctcagaaaacctgaactctaggagaaggaaagcgagagtgctctccagagtaaaggatcctttgtaaaactcatccataatcccaaacacaggagtagggtgttacactccatagtggcccgaacctgtataatccgattgtgtgcaagctagccggtagtcttaggggcgaacacgtgttttccaagaggcgagcctcagcccccggccgaactcacgaaaggggggtcttgcgactccccgccatcgaggatcttccctcgacagctggcgcgccaggtagggggagttgcgcgcttcgagaaaaagtcgttttcttccgccccaagtttctctgggccctagacgatcatggtcgaggtcctggaggtggaggaggaggcggtggcgtttatccccaccccgtccgggagtggggattccggcgaaagccgtggccctcgtcaccaccgccgagattctccaactccttcccgccgcgaaccttcgcggtgggaggatcccacccgttcgggtggttcggccctctccccgccccctggcggagggaggccgcgatgcgtcggggaacgccgccgtctcgtctacggagacggcggttcgccccgaggcgcgcttcaggcggcaggcgcccttctgcggcatcccccggtaaacccggtgccggagactcccgttcagcgctggctggacgacgtggccaacttagtcaccactgcccagcggcagttggccacgggtggccgatccgccgccacttatacgtcgcgtaccccggttactctctcctcgtcggcaaggaggagggcccgtcggtcggccacgatctcaaggcggtccacagctccaacatcgtcgggggcctcaggaagccggaggcgttatgacggtctctacgggaagcaggacgctcggatcaacatcaagcgacgctggaacgagtgccgagctgcccgcatgggggaaggcgcctcatcatctggagtgccacgctcctgttcacgaggcggccctccccccacgctcacccttggggggacaggttgtagggccttcgtggcgagtctccggaatgtccggtggcc

SEQ ID NO: 14869 - DNA, 1039 bp, Oryza sativa
ctatagggcgaattcgagctcggtacccaagcaccaccaccaccaccacccgggcggcgcgccgccgcccatgcccatgtacagcgccgcgcccatgggccaccccgtcgccggccacatggtgcccgccgccgtcggcacgccggtggtgttcccgccgggccacgcgccgtacgtcgtgcccgtcggctacccggcgccaccggccaagatgcaccaatgacgcgccatggacggacatgagcagcatttcttcctcctcctttcttgatgtgaatcttgatttgttctttgtgtagtcgccggctcatcgtccctgatcatcttgttcttctcacaatctcactaatgtaaacatacatagatcagatgccaagagtgcagggattggggattaaaggcgaataagtaaagtattttgctgactgtttgcaagtgatcatcacgtacacccggtgaaagcttagctccaaatgtggatgtaattagcagcggccttccgtacgtggtggcgccgatcgatgatcttgcaggggttgcaattagggattgatttccattttgctgatgtaaatttgcctactgtctcattggaccaaaacatatctctctctctctctctctctctctctctctctgccatatatatatcagtgttgatgaatggattggtgttttcctcatgttcatcctctcctcttctatcattggattaacgttttgtgttctggagcatctcatactttcagagaggcgacgtgggttcaatctaaattgtaatattatgtattctcgtgtttccatttaaattcctttgtgtctcattttggagctgatgacattacagtgtgtgcttgcttgcttcttgagtatatgtttcagcttcagtttttcaaagaactgaaatgaggaggctcccaatgcagacattgggtggtgcataaggacgaaccagaggcgttccaaatggtctgaaactctagaataccaggtgatccctcgcgttttgatgcaggatttataaatgagtatatgttaa

SEQ ID NO: 14870 - DNA, 1292 bp, Oryza sativa
caatcgagtcacgtcgccgccatggattcgcaatcgagctgttccgaggaagaagacgaacaacaacagctgctcgtcttgatttccggaatcgcgcgtacctgtgctcttcctccgtccatgggatgcccttgcgcctctcctgctccgccttggagcagctcttgccgccgtcgtacccgccgccgccgcccttgcgctcgtcgcgccggtgtccgccgtccttggacgcggcggcggcggctccggctccgtcgggcggcgccgcggactcctccccggcgtagcgcgggagcgggacgcggcccgcgtcgatggccgcgacgtcctccaccagcgcctcgtagtgcctccgcacctcctccgccgacctcgccccgggcacgctcgcggcgagcgcggcgaaccagtcgtcgtcgggcgcgcctccgtccgcgggcggcggcgccgcgcacgccgcgagcgcgttctcgaacgccttgtcgtcctccctggtccacgccgccgccgccgccgccgtggtcgtcgtcgtcgccgcctgggaggtcatcgggtggtggatctcgcactctcgcctcctcctccctgggccggcgcgcggcggtgagacgtgcggcggccggcgacggcggcggcgtacgataagtatagtaattaagaatggcgggagggagccttatccacaagagtggtagggcgcaaacgaaacgatatatgtactggtggttagtattggttttgcggctggatttagtcgtaatcctgtaaattttgaggccatcattttgtttttctctctacctcctcggttttgctgcacagggaatggtacttctaatttttaaaatatttggacaatttttttttaaaaaagttgacttggtaatttaggcgctatttttcgtgcgtgaacgaggtcccaacctgggaagtgacacatcttactgtgatcaagaggtgacttgattaaccaattcgtcaatgcgctagtgaaactacaaaagcagatgcgatattaattgaaaaaaaaatgtctcgaaatgtccaaaaaaaatgtcaacatttgaaatttatagtttttgaggtgttacgaaacaactccatttgaagatataaaatgctctggttcgtagctagaataattatattttagttttttttaaagatttttagtcaggaatcgacgtcatatttactacttataaaaaataatcagatagtttttacaccataaattacttatacttacattgtaattatacattggattatattggaaggtttagtattca

SEQ ID NO: 14871 - DNA, 1816 bp, Oryza sativa
gcaatcagcgccgcatgctgctcctcctccgtctcccgcatgacggagtccagcgcctggatttcggctagttgggtctggcgcattttgcgccctaacctcaccatatcgtccacggcgcggcacccctcgtcaactcgcgcgtggttcgcagcgagttgtgcccactctgcgtccacagccgttcgctctttcgctagggcttggacttggacgttgagcccctcccgaacagtggagtcggcggcggcgagcacctgcagaagtggctccatactcgccggagtcggagaagaaaaagccacggtccgcccccgggacgacggggtactgctggatcccctgcgagactagggactgtctcggccccccttctgcgagaccagccccgagggcgccccaagcgcaagggggagcggctgtccctctcgccccctgcttcgggtcctcgagtagattcagcctcggccttgggctcgggaccgcccctagcctcggcctcgacctcgggcccggtatgtgtcctgtgggtcccaccgcgaggctgcgaagaccccgcggccttggattggccgggcccggaccactccgatcgttcggatttcgtcccccgcgaagggtccgaccctgagactccatgagaaagaatctcgctacaagagaacccagatcgcgttaacaaagaaaaaaaaaaggagggaacaagaggccgagctgggaaagagcaccgaagtgggtgccagcaatcgtacctgtggggagggcggttgaaagtccacttcgggggctcgatgaagctccctcggcacggctctgtttgccctatcttccggagccgtttcttcttccgtccgacctcgggcccggcaggtcgcttgtggcccgctggcggacgatctatcgcgcgctcggcgccccctccacgcgggggagagggcggccgagattcgggcaccttccgcttcccctttgggtcgccggccgagtcgtctccgggcccgcggctcgggccgggcgcccttgagccgccaccaccgcctagaccacttgtccggcttctgcccggggtcgcgccggcaccacccgcgccgacggtgctaccactggcgctgcctcggctgggctggctcctaccggcaccgacaaccgacatcacagccaagatgctctcccagtcgcggtcgcagcagagggggaggatcccatctgggattagcgtttgctcggcggagtccaggcccagcacccgccggatcaccatcttcgcgtcctcctcccccctgtcccagcgctcgcccacatgcatgcgcatggggtcgttgggaccagtgtattcccacgcgccacgggatcgttcctggagaggtgcgatgcggcggcgaaagtaaacgccaaagaccattgcccccgtgaggcccaggcttcgtaggcccctgaggcgatcccacaccgtgtcgtattcctcgcccagctccgaaaccgccagccatgcggcggatctttcaggaggaccagcaggaactcgaagtcgcgggtggtctggcaatgcggtgtagaaccagtctgtaacataccaaaaattaaccattttctaattctgtatcatgctgagtcttatgttcttaataacttcctaaacctaggaaaatataattagagggaccttttaaaactatcttgcataaaatatctttctggtatttaacttcttttgtgtttttcatttaaaatacatgtggttgaattgaggtatttcttgctttggtttaaaaccttcttttgactaaaatttctttattcaaaattagtttgaaaa

SEQ ID NO: 14872 - DNA, 680 bp, Oryza sativa
aggcggccggtcggtgaagacgtagacgcccaacagcggcggcataaaggccagccgtgcaggcggaaacaccagtcggcggcggcgaaggcggccggtcggtgaagacgtagacgcccaacaacggcggcataaaggccagccgtgcaggcggaaacaccagtcggcggcggcgaaggcggccggtcggtgaagacgtagacgcccaacaacggtagcataataggccagccgtgcaggcggaagcaccagtcggcggcggacgaggcggccggtcggtgaagacgtagacgcccaacaacggcggcataaaggccagccgtgcaggcggaaacaccagtcggcggcggcgaaggcggccggtcggtgaagacgtagacgcccaacaacggcggcataaaggccagccgtgcaggcggaaacaccagtcggcggcggcgaaggcggccggtcggtgaagacgtagacgcccaacaacggtagcataataggccagccgtgcaggcggaagcaccagtcggcggcggacgaggcggccggtcggtgaagacgtagacgcccaacaacggcggcataaaggccagccgtgaaggcggaaacaccagtcggcggcggcgaaggcggccggtcggtgaagacgtagacgcccaacacggcaacataataggccagccggcagg

SEQ ID NO: 14873 - DNA, 546 bp, Oryza sativa
gtcctcgcctatatggttggttggtcacaccaccgttcatgggcgtccacgtcttcaccgccggcctgcctccgtcgccgccgagtggtgccttcgcctacacggctggcctattatgccgccgctgttgggcgtctacgtcttcaccgccggcctgcctccgtcgccgccgagtggtgcctccgcctacacggctggcctattatgccgccgctgttgggcgtctacgacttcaccgccggcctgcctccgtcgccgccgagtggtgcctccgcctacacggctggcctattatgccgccgctgttgggcgtctacgacttcaccgccggcctgcctctgtcgctgccgactggtgtcctcgcctatatggttggttggtcacaccaccgttcatgggcgtccacgtcttcaccgccggcctgcctccgtcgccgccgagtggtgcctgcgcctacacggctggcctattatgccgccgctgttgggcgtctacgtcttcaccgccggcctgcctccgtcgccgccgagtggtgcctccgcctac

SEQ ID NO: 14874 - DNA, 4469 bp, Oryza sativa
  unsure (1)..(4469): unsure at all n locations
ctgctaataagtccgcctttttcatcttccgtaggggcctttagtcttttgattagagtagaggtcgcgacagagcagagcgtaccgccctgccatagtcgcgaggatcttaatagtcggtcgcgactgttgtcatagtcaacgacggttgaaacttccaggaaaaaacttcgaattgggagggcgatcctcccggtgagctgaccgtannnnnnnnnnnnnnnnnnnnnnnnnnnnnnnnnnnnnnnnnnnnnnnnnnnnnccatgtcgaaggaactcggcgggctttgtgtaaatggcttcatgttggtatggggtattaccctattttactcaaaatactgtgtccaaaagcctgctgcttatggtactgctagtctgttatgtacaagtatcttaccgacgaaaaatgagagataacatgctttttttccaaattttttttctaatgtgcatagatcgtaaggggataacagaggagatgctgaggaaagtgttggggattggaatggagtttttcaagttgcctaggatttagagtccaacgcgcaaagctaaagaggatttcaagtcccccgcccgccagaacctaaagattgctttatttatatacgatttattgagttaactaaaaagctggttcattccatagagatcagacttagaaaaggaagctctgctaaaagctaaatcgctaataagttcaaacatcaaaggtacctgtctacatctacctacccgaagctactaaaacatcatcaacaacaacatcggaaactagatgaataattgaaacaatcgggttgaatggaattatcttgaggctattatgcgcaagcttggtttccaccaggtcgaaaaggtgatgaaatgtgtgacgtcggtctctttttcggtgcttttcaatggtggccaactggagaagttgaagccaacgagaggcatccgtcaaggtgaccctatctccccatagtaagccagccaatagtaccctaacttaagaagttctcttagctagcgcatgtccattaatgtgaccaccgcatgcacctgaaaacaatattcaactccatgccttcaagagcataaatgggtaacagccagaaatacatgaagaatcacttctttcgagaatgtgcctgagcacgtgtttcattaagaagatacatgaagaatcacataccagcaaaaatgtcttcacttaaatttataccacaggaagccttgctaatgcctcctcttgtaatgttaaaaatcctgtcgaacacatcaggatgtccatagtgaaatcgtaccctgcacagagaatgaagtatgtcagatacacagcatttagactacaagtctgatgccttctgccctctcagacagtactgccacactttatcccgtcaacatgcttaaacttgaaaagcttcaatgcagaaaaagtttcaagcaatgtagattattgatctaatctgtaacaccttatttacttgtaatctcatacacatgttcatgtgcattttcaagggcagaaagaatatccttaaagggtcatctcgcaatctttttctaggggatagtcaccacagatgctcagcagatccaacatcgtattgcaacatataagacactcagtgtttacagtatgataataatggatattgtttcattccaatatgacataagaaaatgattcatacttactttaatggattagctaggaccctctgtcctattgtcacaaagctggtctcctggttcgacataaaccatgcaagtgacgacacactacaatccagcattctcagaaattagttgctgatttgggaactaaggtgaagaaaatgcaatgataactgcaaagttttcaacctaccttcccgccaagcgggagaaggggcgaagcgagaactcaggaatgaatgaaccaagaagggttcaagacaaaagaattctactcaggatgttgatcttctgaccacgaaactgagcaagaagtccatccgatagtgggggagatcaaaaagtacttttttatgggcttgccctggcgcacaaccactccaatccgcctgggtcttctcgaatgtgtagaacctactttaaaacccgcgtcctcgctgaggagtgcctacgtactttcttcatagaagaaagatcagggttgctttcgtagttctttcgaaatgatttacggtcattcttctttattttattgaatacattacagctagtacccgggaaaaggaatacaactgagcaagataattggattgaaccagatgccgtaaagagtcaaagtaaaatccattagcgcccagaggcagagcaaagagattcggagatagaagagagtgggaccacttcgaagtcaacgggttaaacatagtgcgagttagacagatcccacggagagtctatctcttcactctagattttaacatctaatgcaattcgttgcacacacgaagggaataatataatgaagaagagtgagaatagttgtgaatcaatgagttgatcactaaaaagaagaaaagggaataatataatgaagataactgtcactttaccgggccggaaaagtgacaccgtcacgtctcagagttgtatgcctggaacaagaagggtcgtcgtacaatttcggcgattcaaaaaaagaaggaggcgagctccctatccctctttggggtgcagacaggttcgtcgggggttatgcaagcttcagaggtggggggtacgattgtggaagatcgcgtggaggcaggggttggagatgtgatgcaaggatgcggggaattgggtggaaggacagtcgttaatgtggagtcaggtttgacgggcgtgaggcaagaagtggagggaagtgggatctagattagaagagataaatacgatattcctgatctgatacccgctgacgatccctagcctagcttggcaatcccttgaaaatgcaatgcataggcgtcctcggattggcccgggggatcgaattgattatagaaacatgagtttaattaatcgatttattagtaaacaaggaaaaatattatcgagacgaataaatagattaaccttgaaacaacaacgattaattactcttgctataaaacaggctcgtattttatctttcttaccatttcgtaactatgagaatgagaaacaatttcaagcccagtcaatttcaataattacaggtcctagacccagaaaaaatagacatattcctccattaacacaaaagttcaattccaatcgaaacttaagaaactccaaccagactttaagaaacaacaattggaacttaagttccgattgttgatgttttattcgaaagggccaagttgcattggaatcgagaatgtttcattcataattgcataaaaggagtaaaaatagtggctggggcgcgtcgagggtcaaccttgatatcgaataacctttcgagcctgccccaatggatctctatcctcctttgaaaccaatagaagttcactgaccatccctgttaaacataacccaaggtaggatcgagaggagaagaataggactcttgctagtatcataaccgggagaatgaaaccattagattagtggaaagaagttcgaatgggaaggacatgaccccggatggcatacgtgggcgggcagggggccccactacttcttcattcaggggggctagcctcatgacttcccactgggcgaggggtgcgaaccaagtcatgagcgatagcgaagccgcctataggcgtcgaaggatgaaagtccgttagacctccaagccatagcaacctcttggggaaattacgagcaccgcattgcaaatgcgcgagatcaaagaaatcacaaaccaagcataagtggatagcaacttatactatggaggcagagtctcctcccctcatttctggctgcttattcgtcatcacaaagcaacccggtaccttttcttatgcgagcgactgagacgagagctttcaattatgccgttttggtcaaatcctagggctctttctgatttgattaaatacttctatcatttagatagagagtgaacaagaatagtagtcacagcgagggatgcacataaataagatctgcactggtataagtgataggttttgggtaagctcgctcatatcgaaagaagaattcaaaggaaatgaagcataagctgtcaccactaggagtaggacttggatgttccggaatcctcttgccgagctggaacgacccatctcctatttcagcttccaacgcctacacgttgagtctgagttactcgagaaagacttattcatagtggagatagtcaacctccacgggggctccccggccggggaggcaaaggggattgctatcgtcaccctttctcccggtgtatgtgaaagagaaaaagtgacgaactttttttcttttcggtctgcggggtccaaagaacgagagtcagcttccttaagtccgttcttcctcag

SEQ ID NO: 14875 - DNA, 5058 bp, Oryza sativa
acttggggagatttgattcatcagaattcgaattgatagttatagcttttctgactagcgacccctgttgtccttctctttttttttctaaagacgcagcagaatcgtcaaacgggaaatcaaaagtgggaagttgattgtaggatttctattcctcactctcgttagacggagagtaagcgacttctattagcaccggaccgtcgagtcgaattgatcgtgtcatgtgcaacgtccatcaatggtggttcattaatgtccatagatttagactccttccccctcccttatatgcaaaagatcgagaggggcccaaaccaaaccgagaacgtaaacagaattcgactcactctcgtatggctcgccctcgagccctgggccctatcgaacaaatagaggaaaggacagaaaggggaaaaagtaaagtctaagcgacatatggcacgaaaaggaaatccaatttcggtaagacttgatctgaattgtagttcagatccaagtcggtttagtgagggcgaccgcgaaagtcaccgaatgggttcgacgcctggtccagttagacagggattcgttctccggtagggctaagactccttcgttgtcgaaaaatcacccaagctgatgtgcgcactcacggtggatgaagtagcacatgtccgcctgaatgttgtgaatggaagtatcatcgagctgtttttcagacttggggaattttggaagctgcatcagatcatgacagaattaaggaaattaattattcacaacaatacaagttagcgactaatttaacaagtatttacttacctcgtcgtaattcgcacaatatttcccattaacccttaggaactcacaacattaatatccgcataatactattcccaccggttgcttgtgacactttcaacatcaaaataattataaggtatattaggttattaaatgggaacacacaagcatttatgaaaattaagtagtactgtttggcatccatatgtacttatcggccacttattgcagacgaatatgcgttctcttgagtttttgcgttgtccgcctcgctagtaataccttttaaatgcactgtttgcagatataattaatttacattcgtcagagattaaaacacgtcatgctaatatcttacttacagatcgtgaattcttagaaattcctgataggtgttgctatctttgtcgagggaatccaagacgatgacttcattgtactttagatagagaagaaagactatccaatggtcactgcaaacgaaattgttaatcgagccatgattatatgtatatactcttagtgcatatatattacaacttactcaaaggcatatggggcataaacacactacttgtcctgcgtagattcaagcgcaatagctacgtacgtagcgacatcgagcaccttttcatgatgcctttgtgctacgtaagctttcctctattcgggagtcatcgccttgatgtgttctggtagcttcttctcgtctagcgtgtatgtgtggttcggcttacttatcctgcacgggtttaggtaggcgacaggctttttcatcgcttcggcttccacgtaattcatcctgccaacaatggatatcaaatgagctacgcatataggtgtagtgatctattaacatgttcaagtgtagcacttacagacaccagatggcaatcaaattggcgtctagccttttcctatgatagagggaatgcatatcggagaaatggacttggagtagacaaggaccgctccagaagatgttctcccccacggcatctgtgaatgaatcgatgcctttcatggtgcttgccctaatgtaccaatcgtgccaccttgttagttgccacggtccttctcttagttgccagtcgtaaatgaatggtttgccattctcaaactagtgtggcacgtctggggaattgatatagttgagatagtcatcaaaggtctgcttgaacccttttaattttcagatatcaaattcggtatttacgatatctttgtcccttcctcggaatgctgttaccatataatgtttcttggacgcactttttgctttgtgcttgtgcgtccttaccatcactggcacatcggcacccttaggttcctctggttgcgatggctctggttgcgattgctctggttggtcgggcattggttgctcaggcaccgcttctatttcacccgccactagctttgtaggctctgcttgtacaggctgtgatggttgtgcgggagacatttcccgtattgctagctgtgattgtttctttgcaagcaccaattgttcttttgcatcctttttagtccgagctgatgcaacgggaggctctggtctaggaggtgatgcaactggtggctctggtcctagaggtgatgcaactggtggctctggtctagggggtgaagtaataggactatccctcggactggctacgactggtggacgcgactgtgacaccggtatccttggtggacgatcaattccatccgttgaccctagttcaatatcattcttgtgccatagtatgaattggtcgacggcatctccaaggtacacaatctgctcagtagttggaaagtcgagctcgtgtatccggtaagcctcaatgaccgtccggacctctaccttgacgtagtcatccggaatgtcttggcaatgaaacctgtggcctggtatgaacctcccagttgcaacgagtattttctttcccgccctgccgaccggaatcaagagcttgcatagagtatcctccgttacatcatcgaaaggatagctcagctcaggctctaaaacagcagcaccgtgcatcattttctaactccaatatatattgcattcgtcacaagctgctgccctagcctaagagtcaatctcttccttgtagcgatcacgcttcttgtaggtatgagcatcctgtttgaatccatccttccagctagtctttgaggaaactccccatacacggccagagtgctccggtttgccgaaggcataggttagctcgtcccgatctctatctggcacgaacgtcccggcctattgctgcgtgacgatgttcttcatcttgacagctacctcccggagcttctgatccttgaatactacatcccccttaggggtgaaggccggtgttcttgcacgcacccagttcctgcttcgtgggttgtgatttttcataggaaccggtttcccagccttctccatctcttcatcttgttttgcccatttcttcactgcttaccggtaaccggtcgatcccaaatgatgtggatattcattccttcttgctagctcagccatcttctggctcttctccttttcttccgccgatgtcttaagggcaacaaactcatcccactgggcctgtgttatccttccgtagtccttaaacggcgtgagtcccttctggacatatttcttattcaggtctgttttctagtttcaccacagcttccccattgtcttcaacgcataatccttggctttattgtcgtctgtcccctctggatattcaaacttgctttgcagcaacgtccaacagctgttctttctactctctggaactttctttcaatccttccatgtgatctccatgatatcccagaccaccgccccacattggttgctatacttcgaacatgagtcttccggtgacaggggttcccctgtctcactcatccgcgtcagcacgcttacttccttcaacaacatgttcttccctcgctcgcccctccttttcttaggtttgcttgaagctgttgtgtgcacgacagttgtagcttcagcttcaggttcagttgcggcttgggctttccttttggagcgacgtggagcattcaactattgtttgcaagtcaagtgactttaattaaaatccatagttcgcagttaatatgattggaactaaacaaatattatatgctacgtaccaccggttcggggggaacgtagtcggagtcaacttcattgtcgctactgccctttctcttctttgtaggagaaggatgggggtcactcggcgagtgatacgatccactgcttgattcacttgagctagacgacgaagattcctccgcgattacttgcgtgcaaatatcttcctccatgactagctgagtttccttgcccttgtcacccgtgggttgctcttgggtgggtttgtccattgatatcgcttgaaggtgaattcatgttagttgcgaaatgtaattattttcttattgtaaatccgaaaagaaggcaaaatttagatactaattttgtactacaactataaatattgttaccaatcaatgagattggtaacgacatcaatattacaatccaccaacgctgaccatttcaaactacctaattaagttccttaattatcaatgaatgacataatacaaaatgcatggagaattatggtgtctaggtcggttccgtccatggattacactgaccaatccaccataattccccatgcattttgtattctgtgatggtttgataacctaggaactacattaaatctgcggccaatctatcaattcttccatttgaactaaatttcaaaccctaaacctaattaagttccttaattatcaaagaatgatagaatacaaaatgcatggagaattttggtgtctaggttggttccatccatggactacactgaacaatccaccaaaattccccatgcattttgtattctgtgatggtttgataacctcggaactacattaaatctgcgaccaatctattaattattccatttgaactaaatttcaaaccctaaacctaattaagttccttaattatcaaagaatgacagaatacaaaatgcatggagaattttggtgtctaggtcagttccatccatggactacactgatcaatccaccaaaattccccatgcattttgtattctgtgatggtttgataacctcggaactacatttaatctgcggccaatctatcaattcttccaattgaactaaatttcaaaccctaaacctaattaagttccttaattatcaaagaattacagaatacaaaatgca

SEQ ID NO: 14876 - DNA, 587 bp, Oryza sativa
agacgtagacgcccaacagcggcggcataataggccagccgtgtaggcgcaggcaccactcggcggcgacggaggcaggccggcggtgaagacgtggacgcccatgaacggtggtgtgaccaaccaaccatataggcgaggacaccagtcggcagcgacagaggcaggccggcggtgaagtcgtagacgcccaacagcggcggcataataggccagccgtgtaggcggaggcaccactcggcggcgacggaggcaggccggcggtgaagtcgtagacgcccaacagcggcggcataataggccagccgtgtaggcggaggcaccactcggcggcgacggaggcaggccggcggtgaagacgtagacgcccaacagcggcggcataataggccagccgtgtaggcgaaggcaccactcggcggcgacggaggcaggccggcggtgaagacgtggacgcccatgaacggtggtgtgaccaaccaaccatataggcgaggacaccagtcggcggcgacggaggcaggccggcggtgaagtcgtagacgcccaacagcgacggcataataggccagccgtgtaggcggagg

SEQ ID NO: 14877 - DNA, 577 bp, Oryza sativa
aagattgatcaggtgactcaaattgccgcgcaccgttcatgtggaagatatcgataattggaatgactgatttagttgatctgtgtagataatttgattacattttgtttctcctccatcttgtagtcagctctcaccggtgaatcccttcctgtcacaaaaagaacaggggacatagtgttcactggctcaacatgcaagcatggtgagattgaagctgttgtcattgcaactgggatacactctttctttggcaaggcagctcatctagtggattccactaaggttgttgggcattttcaaaaggtgattcatcgatcttcagactgtaataagaatctcacaagtggatgtgctgtaagctatttctgactactgaattttcaggttcttacctccataggcaacttctgtatctgttcaatcgccatcggtgcgattgttgaggttataatcatgttcccaatccagcaccggtcataccgggatgggatcaacaatgttcttgttcttctgatcggagggataccgatcgcaatgcctactgttctgtcagtcacacttgcaataggttctc

SEQ ID NO: 14878 - DNA, 3233 bp, Oryza sativa
gacgccggcctccaagacgccgcctccccgacctcttctccacgaccgctgaccaggtacgacgccccctcctcctgaacatgagatgatgaatggatgaattgcagtttggatggatgacttgcttaaattgaatggatgaattgcatgattgatgaaatatatgcatatttgagatgtgaaatatatgaggtgatgaatttgcactgtttgtggatgaaatatatgcagttttagagctattaatctttttgtattagatgattttaggattaattttgctgcgttggctgaatgtagcatgattttgaattttttctgcactagtatagattaattttggccagtgatgttatgtggccctgctactgctcttattgtgcctacttgttcatttttttatctacaattgtttatatacatgatttatataccactgctattgttgccccctgtacttcttgttaaatggccaaggatgaattgctcaataacattctatctatacttgttcttttctttatggataagaatagattatctacacttgttgatttatatacccttgttgtctatgtgaatatccctctgttgttgctgtttatgtgaatttccccctgctgttgctgtttatgtgaatttccccctgctgttgctgcccctgtggcatatatacccctactgctgttatatggccctgctactgctcttattgctgctattatatggccctgttgttgctattgctcttattttctgcacttgctcttttctttatggataagaacagatgaactacacttgttctattttatggattgataagaggagactatctacacttgttcttttttctagattgataagaggagactatgtacacttggttcttttttacactttactttgggttgctttttctcctagcacctgatttcctctttttttttgccttcatgcaaatgatggtaattcatgcataatttctgagcaaaactgaggccatatctttcatagtataccccgtattatattggatctaatgctatttagtataatggttggaaatttataagatttttcgcgaaaattagaccatgacaacgcccagcgcaaacccgccctccccaacacctgcgaggatccaggaagaagcaaacccagccacggagacagttgccgaaggttatccctcgacaacgacggtcgaacaacccgaaattcatagtaatttataggataaattttcaccacatgaccacataaattttagctagcaccccttagcatatgttgccttctgtttgtgctgcagaattgccgcaggaacaacatacgtcgatgtcaggcgggacaactgcaagtaggtcgagtagaaatccgcggtcacaaaatatatggccgaccacagtgcaagttataagagaggttgacgctagtggtaggcccacggcgcccaggactgtcattggaagatggtctaactactgcgggctggcggcacgtgagaacttcgggatcctccataaagatatcggcaaggtcacagaagccgagaaagagtgagcttggacggcaatggagaaatggttcacatttccagctgaagcaaaggataggctcaagcggaaggcattccagaagatgggcaaagcttggaagaattggaagtcgaagctcttcaccgagtttgtcaacccgcccggcaatcatacgccgttcgatgaataccctcaaataactgaagcggtgtgggaggaattctgctctctcaagaacccaagagtttagggaatcaagcgaggcacatcgcctactgcaatagcggaatgagcacccatatcggctgggcactgcagggtacatcggcaaggaggcaatatgggcccaagaagatgcagccactgcagcagcaaatgtccctgccccgttttcagacatccctgaacaaagagctcgcaactgggtgtgggcaaggggtaaagtcaacccggacggctctgtcacatttgagaacaaaagtgatgttgtcgtctatcaggaactggtgagttcactacttaacctaactaatttccgttcgtataaagtagaagttcgtataaacgactcttttttttctagttgggcttggttgctgaacaagcttcacaaagcgaggttgagtccgcgctgaggaggcgcgaagatgacatcctcacaaaggcgctcggaaccaaataacatcctgggcggactaggggaattggtagcgatgtgccctggaagcatggactcccgcagtacagctcccaatacaggaaacggaaagtctccaaggaagagagggacgctcgtttgaaggccgaacttaaggttgtggtcattcaagaactagaagctagcatgaacgctagggtggaagaaagggttaacaaggtcctcgccgacatgaatataccccgaggcacaacacctgctgtgcatccaactcctcgtgcacaacacgacacgagtccatcacagcataggagtagttgtgcatccacagaggtgccggcccctggtctcctggtcgcaccactagctgcagtggaccacatagaggtaattgatgttatacaatccatatctattaaaaaaaacctttacacgttccaatattaaattcagactttcacatatgcagggtgtagtacagtgtgtcctactggcgagggtccacctaactttcgctcccaaagtcactgagggcatggcgttcaagccctcggttacagacaaggtccacggcgcagacctgctagctgggtatgccaaggtgtccatcgatacagtaaaggacacctggtcaggctatccgctgcacgtgccccccaatgatgaaatcatgactttgggcgatgcgcgcaagacgttcatacaatggcccaaagaagacatagttgtgaagatgactcctcgtccaagtcgaccgatggagctcacacctcccaagtctaagctatcaattgaggctcctcgtggaccagcattgtcggtacctcattctcctggtggagctgatatggacttggcagatatagctcaaagcttggctccaataaagaccacaagaaaggccaatagctccccaccacttgtcaagggccagaagcgtgaatgcggcaaggggaaggtcggggagttggcgccggagccaaaaaggggcaaggctgcgacgtcgatgccgatgagcaaagcggggaaggtcg

SEQ ID NO: 14879 - DNA, 1772 bp, Oryza sativa
cacgatccagcggttgtgttccttcttccatgcaatcggctagaagatcattgatcccgagggactagatgaactccaagcagaacttgtgagaaccctatgtcatcttgagatgtactttcctccaactttctttgacataatgaaacatcttcccgtgcaccttgtgaggcaaacaaagtgctgtggtctagcattcatggctcgcagatgtatccttatgaaaggtacctggggatccttaagggttatgtacggaaccgttcacaccccgaggggagtatcatcgagagttacaccaccgaagaggtcatcgatttttgtgtgaactacatgtcagaaacatcttcaattggattaccacgatctcatcacgaagggaggcttgatggtgttggtactgttggaagaaaaactgttaggttggatcagaaggtgtacgataaagctcatttcacggtgctgcagcatatgactgaggtggtgtcgtacattgacgaacaccttgcagttctccgacaggagaacctaggccaatcagagagttgggtcagaaataagcacatgtcttctttcaacgagtggctgaagaacccaattgccaggtttgcagaacttgtctagtgaaacacttcagtggttgtcacagggtcctgaatggagtgccaccacctggcaaggatatgacataaatggatatacctttcacacggtaaagcaagacagcaaatgcacagtgcaaaacagtgggttacgcattgaggctgctagtgacagtggtcgtcgtgatcaatactatggtagagttgagcaaatattggagctagattacttgaagttcaaagtcccgttgtttcgttgtcgatgggtcgatcttcgcaatgtaaaagttgacaatgaaggtttcaccactgtcaacttggctaacaacgcgtacaaggatgaaccgtttgttctcgccaaacaagttgttcaagtgttctacatagttgactcgtgtaacaagaaactacatgttgttcatgaagggaaaaggagaattgttggattggacaatattgcagacgaggatgattacaaccagcacgtccacagcatatgtcaagaaatacctctagaagaggaggaagaagaagatgacgttcaatatgcacgcgtcgaccatgaggaaggattatttttgtaatttatgtacgtagtttatgtctacatgtcttatctatatgactctaataagttcgcaatgatcaatagtatattgctgatgaaatagtcaaataaaataattaagtgaagcacccactagaagtgaaataaaataattaaattagtataaccattggaaataaaataataaaattagtaaaataattattgtgcaattactactgttagtgaaataaaataattaagaataacaaagatattagtgtatgtggaaatatgttaaggaaaataaaagaactaagtgaaataaaataaaataaaattgttgtaggcaaactcacctgtgacgggctcttattgcggggccgtcacaggtgacctcacctgtgatggcccagactgttgggcctgtcacaggtgatgtcacctgtgacggctccacagttggggcccgtcacaggtgacatcacctgtgacggccccatcgttggcgcccgtcacaggtgagtttgactagggttgacctagggttggacctcttctagatctatccagatccggcacccactctcactcactcactctctcgaccaccgccgccctct

SEQ ID NO: 14880 - DNA, 561 bp, Oryza sativa
caccaaacagggccaaatttcttcttagatggtcaaatttgttcctgctgatcactgatcagacttgagactcgagaggcaaaagcagatcatatttgggcccggcccacaagtgacttgggcccgcttgcttgtgggttgactaggggtactactggacaggctggtggctggcctcgccggaaggcttggaagcccgcgttgactagtggcggttggattggcggcggcggcggcaactcaactatgggcggcggcatgagggtggtggtcacgggcacgacggggtacctcggcggccgcctgtgcgcggcgctggcgaccgccggccacgccgtgcgcgcgttcgcccgccgctccagcgacgcctccgggctcccggcatccgtcgagctggcctacggggacgtcaccgacgaggggtccctcgccaccgccttcgacgggtgcgacgcggtcttccacgtcgccgccgccgtcgagccgtggctccccgacccctcggttttcaccaccgtacgcgtgctgattcatttctgatgttttcctgtggcaagtaga

SEQ ID NO: 14881 - DNA, 14414 bp, Oryza sativa
tacaatgttgccatcaacactgaatacactgaatacataaaagtaggaagaacatgaaggccttatttcatcatcttttcatctttattcatagtagaagaaactgtaatagaaataccatcttttcatctttattcatagtagaagcaactgtaccatcttttcatctttattcatagtagaagcaactgtaccatcttttcatctttattcatagtagaagcaactgtaatagaaatacctcccaagttcctttcatctttattcatagtagaagcactgtaatagaaatacctcccaagcaggaggagcagcatcaacaatccttatccttgacgatcgaaggtaatttgagcgtgaaagtaataccaccattgttgtgttcactgactttgattctcaggtagtttgagcgtgaaagtaataccattgctgtgttcactgacttttcttttcagtttttccagattctgcgggttgcacgttccccccttgagttcgaggtgtgtgagactctgcagcttacggacccctgaaagcttctccatgtgagtgaaggaccaaactatcttttcaagcttatcagggtttcggtaaccaaaggtgacgctgataataatatcatcttcaatgataaggtccatgagattcccaaaactccagaaccggagagcgccttctgcaaatgaatggtagcaaagcctgagatagcgtatgccatcgagcctgctaagtacatcgagggcgccctgattcaaaaaggtgtcacgtagagttatcttggcaaggtgatggagctccttgatcctgggaggcaacctgcttctgatgctacagatgtgtaggctctccagaagctttggaggtctcagtaaaatagcatcaatagcatcccagttacccggtggatccattcggattgacaaggacagaagacctctatggagtttgtcaacctgaaggaataaatctatcaagctagctttcgtgccagatagaaccacacccagcttcttcaggtgctcgagtttgtcaccaatgttgttcagttctgtagcactgttggaaactttgacatgggacaatatctccatcttttccatagttgcaacagcacgaggcacgcagacagtggagaagaattccttggacttgacaatgtctttgcctgggcagacaataatgcacccagcaagcaggtgctttagcattggcagcgctgtgtggaacacctgtacccttgttcctcggatgtcaagtgtctctaagagcctcagctgacctatttgcttgggcagttgggcaacatctgtgttccggagacttagatacttgagtttgtgaatcttgcatacggtatggaggtcgtttgccttgaggcccttacgaccttccaaatcgagtacagtcagcagcaaccttgaagtgctggaaagtgagttcaagaaccttgtgatattagagttagccggatggagttgcatgccgttccggattgagtagaggagatccaagtcaagtggcaactggttgttgagcaataggtcctcaactgtcgaagactccctgtctatcaaatcggcaaccacaggatgcacagtgcagctctttaccttacgtgcaccgctgagtccagaaggaacaataagcttctgtctgagcatggcttcgaaacagtgcccagcttcaatctctgcactcgactgatccacttgggtaatcaagccttgggcaacccatcgtcttagtaaacttgctcttcggacgccatcgggcatgctgattccacgggtgaaaacggttgaataccataagcagttcttgtaattatttggcagtgcttggtagcagaaggccattattctgtcctgcctcccatgatctgtatattctttaccaaggcttgtattcaggacctgcaactggtgttccgtcgtttcaggattgtagtagagggcatggaggaacatcttcatgcagaagacatcagggcagcattgggtgaggatattgcacaaaattcctttcaagtgtctgtcatcgtatctgtggggaagcagggcgagcgctttgttgaggtaaatatcaacgagagagtagattaccggaggcccacatttggcagagtcacagcaatattttgccatcttactatcatttgtgcagagtattactgcactgtcagagcaacccgtcgagctcaacaattccaggacctgatgccataacactgggtaattcaaaccggaaagaacaagcagcacattttcattgctcaatttcttggcaagcctctgcctgtcttctgcctcattgtctgtctccctttctttcgggtgtctcagcttgtcaaccatggcctttgtaatctccgagagaatcggaggtcgttggagagcaacgtggagctcctcatcagtccatggattacgccagtgactcttgtaacgcttgagcatggtctctccaacagcagcttcatccatgccatcttgcacactgattatgacgaccctgatatgctgctgcttgttgccaccgtccgactggggcagcagcggctgctggtcatcaccatccgactggggcagttgctgctgctgcttgatgccgcctcccgactgcagaggcggcggctgctccttgtcaccaccctccgactgcagaggtggcggctgctccttgtcgccaccctccgactgcagaggcagcggctgctccttgtcaccaccctccgactgcagaggcagcggctgctccttgtcaccaccctccgactgcagaggcggcggctgctccttgttgccgccatctgactgcagtggcagtggctggaccttgtcatcctgcttgtcgctgccgtcagactggagtggtggctgcagcttgacacagcctcccgattgcacaggcggcggtggctgctccttgtcatcatgcttgttgccgccatccaacagaggctgcggctgctgcttgtcgtcgctgttcaactcctccggtggcttcacctcaacgtaaagatattctgtgaacggcttgagccgcgagagagcctcatccacgctgccgtagtcgccataccagccatcctcgagtatggcacgccgggaaggattgttccagctgccagcattggtgcgcctctggttgcgcggcctcacactagcatccctgggctccattgtggtggtcacctcgacgggaagctggtgatgagaaacggcaatgccgtacctcgcctgcctctcactaatttcgcgtgcctggatcttgagctcgcggatccgggtgacgacccggtggcgagctaccatttcccagggcagccaaccgcaacgcgcgctaccagactgcgtgtagagctcaacgcaatttctggaatcgaatgcaagctccatgacctgcttcatccacgggcggagctggtagtcaccggcagtggtactccccttgttggccacgatgtggcggagcacgttgttcatgctctccatctcttgcatgatgaactgcaggtcctcacggaccctgccaagcagccgggcctcgtcctggatgaggcccagcaccaagttgacagcgccaaatgctatgtcggccatctcttcttcttagctctagctagcttatcaatgatccgcctatcttccgatcgatcaacagtggcagctggtagctgctaccatccggccatggcatgcaatgcaataggaggtaggagcaggaagcaattcccacgtatggttgataaccctctcctctcgtctcacggcagaacaaaacaggactgcttttgtttctttgtcagcaggatacaattcgtgttccaacattattccagcctacgggccatttggagtccagccatctctcttgtcgtaagctccttgtgctattgcctgcatcttctctgccccttctacaatcattttatgctttgcttgtgatctgcaaaagagcaattcggatggtatctaacagccgcctgcccctgaagcaaaagcagctgcatttcttgctttccaaagataccagcttacagctgaacacccaacagatagctagtccggcccatttggatatcttcaattagaggcagaatcttgaaatttgattaatgctgggatcagtgtattctttcttccagcattaggctgtgtttagttctgcactaaaattggaagtttgactgaaattggaagtttaaagaaaaaagttggaagttggtgtgagtagaaaagttttgatgtgatggaaaagttgtaagtttgaagaaaaaattgggaactaaacaaggccttaatcaagttcatttgtattagtgtatcccagcatcaatcaaaattcatctgtatctattgacagctcactctctccttctatgtctcaagctcctctcgtatttattttccaaggaaaagatgttttgcaaagtgagattgggtgtcaaaatcagggaaaggctcatactaattctcatgctagcactcttttactcttttagctgtaccttccgtgagggaagagggcatcttcgctcttctctattttgatcttctccacgaggtcgccactgaaatgtccacacaaggaggagatgcatttccctatttgcgcctccttgtgattccaagccttgcatctaggtaaagaacaagcatctcaataaaaggagcattccacgctgagtcgctgactgacatcccaaccgctgcctcttacgtgctgattaccgaacagcttagtactcatgttaataacaccaaggtgagttggctcctccaattttcatagcttgcacatttgacaatttggtaccacgccgtgaggatttctcatccgttgaaggacctaagaactgaaatcacaaattcattgtgtgcaacaaatcaataaacagctcgagtcaccgatcccaaatcttcccaaatcaattggagtagaagagagtctaatctactatgtatagaactatagattgttgaataccgaccttcctcttagatcctccatctccatgccccctcggtccgcgccatggccatgggacagtaggaaggccgatgacgggagatgggagggccggtcacccctcgtcgctgggccggcgcccggcggaggcccaccggaggtgtggaggcgtggagaaggacagcagagcgagcgacggcgagggcggcggcggcgaccggcgaaggcctgcacgcctggatgcatggatggaatgcaacgctaggggctgaaggctagcggcgtcgccggaagtcgtcgggatggcggaacggccgagccgccgcgccgccgaggagcggcgcggccgcattgcgtgtcggcggtaccagttggcgagcaggtcgagagagacgagaagttcgcgagctgatagactatgggccgtgggctggattgataattttaaagtctatattaggttcctcgactatggctgataggctgagcttgaattttctcacccaaccataataaaattttaaaattcagatatgccacataagtcacatccgacgtggtgccatgtaagtgcgtcctaggtggcatgatattgggtagatccacgtcttttcatatgaaaaagagaggagatatagagagagagggagtgctcacaagacatgacgttcgacagtgtgtgaagtaagcagaggtccatgtctgccaacaatcgtgttctttggatctgaagtagtgacggaggactagatccgatgacgcttcacgggctcaagaggtgtgaagaccgagacccgcatttcatgagctcaggtagcactgccaccgagacccgcactaaactgccaagatatgtataccgccggaccctcatcactgcctttacccaatgcacattgtcatccgacaagctatcgtcatccttgtcaaattaattctatgtatctcgtcctgcgtgatgcatatctcaggcctggactttttgtcaatcgttcacccattttttatgaacggttaattagttgttgcaagggttcacccattttttttaagaaaaaaaataccaatggcatgagctttgacgaatatattaagaagaatagagtttacaactacaaagtctaaattgctatgaaacgaatgaaacatatcagataagctcaaaaagctaagagaaaagaatcatagcagtctgaaagcatgtattttggtctatttcttccataattaatcttacctctctctgcctccatggattttgcgtaaaaaacccttttgtttctctctagccaagtgttccaacgggaggttagaagagttccaacgatttccttttgcttggagtgaggattcgtgcttgctagatcattctactaggattatattgaggtttccgggcctggcagcaagattctttgcccacatatgtacacattctcaatcaatctattgccgcatgagctttctctacaccatggtatcatacgcttttgatctaattttcttccactaaccctcttgttgccggcctctgctcgacatgcccatccccaccctactcctcgccgccgccttctctatctagcatgctcacaacgccgatcttcctcttcaatgtcattgccgtgcagcctctggcaataatgattttgggtttagaatagtttttaagacctatatgttagttgtgatcgttgtctacctataatgcgtctaaattttggattttgatatctcaagaatcagataggacaatcctattgttcttcaattcgtgattttttatatggttttcatttacatgttgaccgtggcaaactaatcttcgaaccatttttaggcgtcagcatcaaaggagcagacaagtattacggcacacagtttttgcatcttgtgtgggatgttgaaatgtgtgttcctatgatcaattgcatgtgtgcccagcggattctcaagacaatccagcgagagaacaactgtctagtgttttgagttgaatcctaagaacgtgacgagcaagcctattaattgtcaactctcaacacaacagtaatatgagagactaaaatatcatgagtaggaaactagatcatggcactcttggcattattttggtagcagcgtgtcctttttctaaaataactgagctcttcctttatgacaatgaaataatattctgggctcagctgcatgggatcgttttcactaaattttttttgatacggagttctggcctctgaataggtaaagagaagttctcgacggcaaggaagggaacactgaactttctatgattttcaactagtttaacctatttaaaatcagacgatcgagacggaacatgcatttcatatttccatgtgaactccaacaactcgaccaaaacgcatacagattacagaatacagcagtggatttcagagcactactgcagccaacgatcgacccagagattcacatgagcagtataaataacattattgcagactggaattcctaatcaaacttaacccacagccatggcagaaactcctgctgcagcagcagccgtggaattcgggcctcatcctcatgacatgttgacgctcgacggggaacttttgcgagtgctcatcaccggcgacagggtccgcttggaggagattttgagagaagcgggtagctatggtggcgacggtgaacaccctggggatggtggcaatggaggatcaccacctcatgaagttcctccattggtggacgggcaccgcgaccctcgaagggatggcccggagctgatcgcgattaacttacccgatcatgcggcaccagccgtggtggtggaggcagggttgtcgttgagcccaaggagatcttacggctatctgaagaggtgcattgctgcctgcagctggagctccatggcacgctggtgtcaagcccgagatgctcccgctccccacccagcccggggccgcggggtacatccgcggcagccgatcgcagtggcgcctgcagcgcgacacggagcgggctgccttctcggagtgacgagcaacgggaacacggcctgcacctcgtcgccagccgcggccacgccgagctcgcggcgctcatccgcgtgagggcgccctcgctcgtcgccacgcgcaaccggtgcctcgacacgccgctccactgtgcggcgaaggccgggcaccgcgaggtggtggcccgcctcctagatacgcgcaccggcgtggccgaggctgaggtggagttggcggcggcggtggcggaggcggctctgcgggtgaggaactgcctgggcgccaccgtcctgcacgaagccgtccggcatggccataccgaggtggtgcatctcctcatgtcaagggcgggcgcggctgagctggcctccgtagcatccgacgacggcgtctcgccgttgtacttggcggcgacgaccggctcggtgcgcatggtccaggagctgctgcttcgtccggcggatgacgggagacgacgatcatcggcgtcgttcactggccgggagggacgtacggctttgcatgttgcagcaactaaaagcgcaggtaatacgtcatccacaacgacaactctgctgcttctccaacttctggtagctttatattctccttaaaacggaagatgcgtctgatgattgaatactgatgtccaatacattgggcattttgcactggcacgtatagaagagatttttttttctctgttgtttcacttgcgacagaattttaggtttttatctttcgatttttcgttcataggatgttgcatcaagattcatatttctatagatactcagttacatagtacttttactcagttacagtgccctcaaattcagctacaatgcattcacattcagttacaatgcgttaaaattatattttacgactatttttatctatagatatacgattttaacgtgtttatcccttttctttttgttatttcattcaaaacgggttgtatccattggttgaaaattttgcaagatttaaagctctaaatctgtagaaagattaataggtagtctttttttctattggaaatgtttgatggtttattcttatgcactaattgtctcatgatctatggaaaatcctgtacatggattactgttgtttcaacatgcagattttttttctaattcctttttttcacttgttccttatgtcaaattcgttgggttacttttttttaagacatgtactacctcccaaaaatgtaaaggattttggctatgcatttgcgtagccgaaatcctttatatcttaggaggatggatgtagtatgttgtttgtgcttttctcactgagagagtttctccagagctagcctccatctcctcccacttcggtatcgcgacgctatagcctcctgaccctaagtggtgatggtacttcttcttggcggcattttctttgtttctttccatcatcgcctgcccttgttcacctgtcttatatgcaatgaactcgtcccagtgatcccttagctttgggaatgtgtcgaagttcggtgtctgccccttcaggatatatttcttgtacagctctcccttgaagctctgaaactgttctgccattttctttagagtccaccttttcactttgtcctctgtacccgcgggaagggtgaatgtctcgagcattgtggtccacagcatctctttctccgaatctaggacaaagctctcatgatctccgcgtgcccttgttcttcgccagtacaccgtactgacaggcacgttatcccgcacaacccaaccgctgtgacgtacatagttcttggcggcttcggccggggcactaggacgtccatcttcttccacttccgttatgatgtgccgaccctcaagcttcttcgctgcacctcgttgcccgcgtgccctcttctgtccaacggagggttgactaccactagcctcctcctcctggttcccctccacatccctttccacgtgcccctgctggttcccctccgcatccctctccacgttcccttcctcgttcaagtactggtttggatcctcgttcccctcttcttcattccagtactagctgcttccctccgcgattgtatcgtacaatatctgtttctcatcacggtcagccatctgttgatacaagaaacatctgctaagtcatgagacatttatgttttaacaatctaagtcatgtatgctaagtgtaaatgtcgtacattagaaccctacacaaccttacgttctaagtctaattacaaatcgtgatataaactaagtctaggtgacgtatattatacaaccctagctagtaaataattatatactaagtctaattacaaataaaataatcttatattaaaactcaaataatattacatgctaagactaaaatagtcatgtatatgctaagtgtttcgtgcgtatatgctaagtctaattaagactacaatagtcaattgctaggagtcgcaccaattccgtagtcaataattacatactaattctaattacaaataaagtaatattatattaaaactcaaataatattacatgctaagactgaaagagtcatgtatgctaagtgtaactgtcgtatatgctaagtctaattaagactaaaattgtcaattgctaggagtcgcaccaatttcgtagtcaataattaaatactaagtctaattacaaataaaataatcttatattaaaactcaaataatattacatgctaagactaaaatagtcatgtatgctaagtgtttcgtgcgtatatactaagtctaattaagactacaatagtcaattgctaggagtcgcaccaattccgtagtcaataattacatactaagtataatttgcaataaaataatcttatattaaaactcaaataatattagaacactacacaatcttatatgctaagtctaattacaagtctaatattcttaattgcattacaaatataacaatcatttatattattacgtcacttgcctgcacgaattccttctagggctagctcttccactccggcttgagggacgactccgacaacatgtcttttctgcaagatacaaaaaatatgtattaggataaatgcgaagtaacatatatatatatatattgcatttcacgttcacgttcgttcgctcgttctcattcacgttcgttctcgttcacgttaattcgttcgatcgttctcgttctcgctctcgttcgttcgatcgttctcgttctcgttcacgttctcgtggcaacgtacgttgatgtgttcgttctcgttcatgtgttcgttaacggcggtgtggcggcatcgggccagcgcttggcgcggcggcgtggcgacggcggcggcggcgtggcgttgcatgcggcggcggtgttgcgcggcggcgaaggcggtggtgtggcgtggcggcggtggcgttgcgcgcgtggcggcgaaggtggcggcgtggcgtgccggcggcggcgtggtgcggcgtcgtcgtggcgcggcgtctcgtggcgggcggtgcgacggagagagagatcgagattggagatcgatgaagggagaggcggcggcggctctcaccccagagatgcggcggcggtggaggaggcggaggcggcggcgaggacgatgagctcgagacgacggcgagatacggcggcgtcggcgcggggatttgccctaggcagtggcggtgaaggagagaggccgagagagatcgatcggccgaaaacgctaagtgttgggggagaagacgagggcgtgcatcgggaatatatatagccctcgatcttcagtcacggttcatgagcacaaccgggactaaagaaatcgatctttactcccggttgttctcaacagccgggactaaagatatctttagtcccggttgttctcatctagtcccggttgttgagaacaaccgggcttctagtcccggttgttgagaacaaccgggagtaaagatcttttcccgctatttcctaattctttttaaacccggttagggttaagaaccgggactaaagattatagcactgcatattattttcgcttacatatatgtttctaaaatataagttaatgcattaacattatttaaagtacaaagattaatgacaattacttcgaaaaattatttttgtctgtaataaattaagtggataaatcgtaataagcaaatatatgacttaaaatgaataaaaattccaataatcatatatacttagcatatgaatgatattattaaattggtaaaaactctaattaagatatgtatgtacatactgcatgatttaaaattaataaaaattgtaatcatcatatatacttagcataggaattatattaaattaaatgttaaaaactctaattaacatatgtaaatgccacatgcatgatttaaaccttttaaaaattcgaatagtcatatataagtagcatatgaaagatagtaaattaaattgtgaaaaactctaattaacatctgtaaatgccacatgaatgatttaaaacttttaaaaattctcttgtcaattataattagcatatgaatgatattcaattaaatgtagcatatgaatgatagtaaattatgccatacaacaattgatttatatggagaatcaatacatccaaaatagtttacatcgtgtacacaataattacggcattacatcggcggtgacggttgaccgcacgtactttctcctcactattgttccctccttgtgatcgctgcgtgagtaaggggtgtcttcatttgataggaggatgctagggtcaatcgtcaccgtgaaagggggttgcccatccaactgatcgtaatcctcgtcagtcttgtcctcaactccaacgatttttcttttgcctgggagaaccacttgacgcttagtctcgtcaggccctctgcccttatttcctttgctagacatgtccttcacgaaaaagacttgcgttatatcattggcaaggacaaaaggttcgtccgagtatccaaccttgttaaggtcaacagttgtcataccactgtcatcaatcattacgcctccaccagtcaacctaacccattggcaccggaatagaggaaccttgagaggaccatagtcaagttcccatatatcctcgatggcaccgtaatacgtggcagttgttccatcgtgtcccatggcatcgacacgaacagcgctgttttggttcgtgctcttcatgtcttgggctctcgtgtagaatgcgtacccattaatctcatatccctggaatgtcgcgatcgacccagacggtcccctcgccaggaaggcaagttgttggttgatcgactcgttacccatgagatgttgtcgtagccacgtggggaaagtatcaatgtgatgccgtgtaatccatgcatcggacttaccgatgttcctggcgcgaactagagccaagtgctcctcgatgtaaggagctaccaatgaagagtgttgcagaacagtgaaatgggctttacggaataaattgttgtctaccgtcattattgctttccttccgagagttccctttccccatagtctcccttcatggcgtgattcaggtaccccgattgggcgaaggtcttcgataaattctacgcaaaattcgatgacctcctctgttccataacccttggcgatgcttgcctctggatgagcacggttacgaacatacttcttcagaacgcccatgtagctctcgaaaggaaacatgttgtgtaggtacacaggcccgagaatacggatctctttcacaaggtgacaaagcagatgcgtcattatattgaaaaatgaaggtggaaatatcaactcaaaactgacgagacattgcaccacttcattctgaagggcttctaatatatccggattgatgaccttctgcgaaattgcgttcatgaatgcacatagctttgttattgttgcctggacattgtctggaaggataccccttattacaactggtagcagttgtgtcatcaacacgtgacagtcatgagactttaggtttgtgaacttcttcttcttcgtgcttattattcgcttgatattcgtggagtatccagacggtacctttatgctctccaagcattcaaacatactttccttctctgtcttgctaagagtgtagctggctggactcaagtaatggcttcctttctcctttggttccaggtgaaggtcgccgcattgttccatatgcttcagatcattacgtgcttccagtgtatctttcgactttccgtatacacctaggaagccaagaaggtttacgcaaaggttcttagtgagttgcatcacgtcgattgcgtggcgtacgtccaagaattcccaatatggtaactcccaaaatatagagttctttttccacatcgccgcgtgaccatcttcgctctctataggctggcttctaggcccctttccgaacactactttaagatctttaacc

SEQ ID NO: 14882 - DNA, 716 bp, Oryza sativa
acgtcaagccttcatccgcgaggaggtggcgcgacttctggaggccggattcatccgagaggttatccatccggagtggttggcgaacccggtcgtcgttcccaaggcgaatggcaaggttcgaatgtgcatcgactacaccgaccttaacaaggcatgtcctaaggacccttaccccctaccacgcatagatcagattgtcgactccaccgcggggtgcgaccttttgtgttttctagatgcatactctggttatcatcagatttgcatggctagggaggatgaggaaaaaactgcattcattacccccataggaacttattgttatacgacaatgcctttcgggttaaagaatgcaggtcctacttttcaacgtactactcgaatttctttgggtagccaaataggacgtaatgttgaggcctatgttgatgacttggttgtgaaaacacgcaaccaagagaccttactctcggatctagcggaaactttcgaaagtctccgcaccgcccgcataaagctgaaccccgacaagtgcgtgttcggtgtgcctgcgggcaagcttctcgggttcttggtctctgcccgaggcattgagccaaccccgagaaggtacgagctatagagcggatgcgcccccccagcaagcttagggatgtgcaatgtgtcactggctgtatggccgccctaagtcgattcatatcgggctgcaggaa

SEQ ID NO: 14883 - DNA, 651 bp, Oryza sativa
  unsure (1)..(651): unsure at all n locations
ctccgacccaagaagatgtgcgtgaggggccggatgcccgcctcaatatcgagcgccggcgcaatgatcgccgtgctgccacgcatcggagggcgcttcctcgtccggagcgccacttcggtccgggcacggaggccagccccccgtgtccccggttggcggtgccggctgtcgagactttgtggcgagccttcagaacgtccgttggcccccaaggttccggcccaccatcaccgaaaaatacgacggaagcgtcaaccccgccgagtttctccagatctacacgactgggatcgaggccgccgggggtgacgacagggtcatggcgaatttcttccccatggccctgagaggacaggcgcggggttggctaatgaacttgccacccgcgtcggtccactcttgggaggatttgtgccagcagttcaccatgaacttccagggcacatatccgcgcccaggtgaagaagcggacttgcacgcggtacagcgaggggacgatgagtctcttcgctcgtatattcagcggttttgtcaagtccgcaacaccataccatgtatccctgcacacgcggtgatctacgcgttcagggggggcgtgcggcacaaccgcatgctcgagaagatcggctncaaggagccccagaccac

SEQ ID NO: 14884 - DNA, 14826 bp, Oryza sativa
tccgtctactctagagaaaaacgaatacgggatacctttgggatgggattattcttgattggtcggattccggttccaattacagatatttttctcccggatacgaatacgaatatggtatcggggtttccgtcggatacggataataattcggatatccacataagccttgtgacatatcccatttctttataattctataaccttcaatatacctttttagattttaatagtagtccatctcttaacactagtccatactattaatattatttaaatttttaaaaatatttataaactatactatattttatataaaatgagctaattatatatgttgatatttgtttctattaggagttgagttggttttcgtatttgagatactccgtatttgtttccgtatccggcgaaaaatatgaaaatgaatatggtatgtgcatccgtccgtatccgcaccattttcatccctaatttgtatgatatttaagatactctagacaataattgctagtgtgtgatgattgtcgaggagtgatactcgtagaccggataaattgggtattggggtacattggtacgaggatctacatgatacgatatcaagcaaacggaagacaagaattatactggttcagaccccttgtcaggtaatagccctagcccagtttatatgggattaatatggaaaagccacaaaatacaatgggagtagatgaatctgatgataccaacgagatcctagtcgatggactcgacgaaatctcccggcaacttggctccgtatgcttcggcttcataaactgtggtggatgtattggcgatgagattcgatgccctttacccctccaagggggtcccttttataccgtggatcaccttggtctccaagtaagacccggagatatcggaccctatacggtacaacagaaactctatcctctccgagtatgaccgtgttaatcactcgacccgtagagatattttctataattcgtgacggattcctacaacgcatacggaaacaacccgtgtatgtgaaggtataccatactcgtatattccatactcactccttcccaaattgatcatcatataagtttatgcaccaagaccaatgttaatttaaatcatatcaataaagacaccatacacacattctcccacagtgcatgcatcgattaaaacctaatgacaattacaccctatcatgcacacattcatccatactgcattaattgtattccgatgaaatccgtatccatacagttatataatgatcaatttgagaaattttggattctattacatgatgatcaatttgggaggataggaggtatgccttatccgtaaccatgataatgatgtacacactttgtatttgatttaaaataccctagatagtaattgctagtggatgatgatataacatccttgcatgttgaattttagaagttagtgagcatcaactttatattaagatagaatacgtgtagaccaaattaagcaattacctagagatcatttttttaaagaaatggtcaataaccattaaccaatacgatccttgaagtttcgctctagagacgcggtttagttcctaaggctacaaataatccaaacaagttctcaaaattaattatttaacttaatattgtctttggtcccaaaaaatgataagacatgccccacgtcatcctcgcatgtaagggcagtaaggttttgaaataatcattgttatatatcatataaaaatatactattattatcctatcagtttgatttatccaactaaacgtcgatacgcgaacggcggccgcatcatcgcagccttgcacatacgatgattgctccagttcacatgtgacgccgtggcacggagaaataccaacgtaccatttcattgaacttcgccaatttctctcgtggttgttttcttttctctttttttatggtatgtgagggtagaatggttatttcatccctatcattgcatgtggcacacctatgaggtatttttatgggtctaatgactatgttaagccaaacgattaattttgggaacctttttcaacgatttgaaacctcggggactgaattgatccaggaatgaaacttcatggactgtattggccattcacccttaaagaaatacttcctccgtttcataatgtaagtcattctagtattttccatattcatattattattaatgaatctagataaatatatatgtctagatttactaacatcaatatgaatattggaaatgctagaatgacttgcattgtgaaacggaggtagtagcaaaaatacccttctgttgctaggaatagtaaaatgtccggtcgttactgtggactcaaacaacatgattattttaagtaagggtcaaatacccaatacccggactcaatttagttcctaacatttcctattatccaaaatagtcctacaaatttagcatacgagtagttggatccaccggtgcatgcgatgtcatctcaacatgtaaggtcaatatttaaatgtccaaagcaaccctacatttatcattagaaagaaacaatcaaaaaggaaaaagaaaaaaagggaaaaaaaagggccggcccggccagcgttgtttcgtccttattagtttcattaatttgttttgtttttctctttatttttccttagatctattttttttagtttttgagactaccaaaaaaattgttgcaagtttttcaagggaaaaactttcaaatctaaatataatttcactatagctataatataacttatatataagtattaaaataatatatacaactttatatctaacttatatagagattacaatgtagctacgtacagtgcagttacattatagattacagtgtaactatagtgtaattataaattataattacacaacaactatattagctatagtttcatttgaaagttttttttttgccaaaaacttgtgacattttttttagcaattctttttttatcttaaatggcatatataaggataggatagacatttagcgcttaccttgcatgcgggatgaggattacatggcatacgaagtggtgctcccgatgagtccaaggaatatattgtgccgcataaaaaaatatagcattactttgcacaatatgaaacaacaagaatatttatgggacgcgctaagtaccatgaaaaatgactatatatgaaatatatagatagtagatttaattagatccatgcctttgcaaagtctatggttaatttgaaaatctactgacactattgattcatttgtaactatatatgccattacaatatatttaaaactagatccatgccactttgtacatctcgactatgatttgaattgtttttttgtcaccgtattttcatgtggatcgaagtgcccatgcccccgatactgtgggactcacatatatgcgcgtggcatggtgcagcggcgtgcggcagcaagggtgaggctcccgtcatgtgcgagcatgaccgacgtgacaaccccacctgctgttgatggaagatatggtgcaggaaggacgatcggggagtattcacagtgttaggccggttgtcgatctccagggcatgtacaaccaaagccatccttagagtgccatcactaactgagcgtactctctgaaaaacatattcatcccttaatggaggataccctaggttggaggataccctaggtgggttcttcaaaatctaaggccatttgatgaagataagtcagcacaatgggtgtcctggcccatggtagccccagagtaaaaataccatcgatacccctccgccaacccatccccttctctctctgcccgctcctccccagtcctcttctttttctgcccgctcgtctctccatctcatcacctccgcccgctcctctctctgtctccgaccgtggcgaagaaggcgattgtggtcacgtcgagcgcaaggggtaccgccggcggtcccgccgccgccgctccctccttgccctccccgagtagctgccgccgccttcctcctcgccctcccagccaccgccgcctccctcctcgcatctccggcgacgccgccctcgtcggtgcacggatctggcatgccggcagctggatccagtgggccggcaccatctctatgtcaccaccacctgtctctcttgccacatcctctctctctccggtgctctctctctccttgccacccgtcatcgctgcctctctctcccgtcgtcgccgatggagaggggcacgcggggcacggtggccggggttggggccgccgtcagcgactcaacctcctcgccgcctcaggctcctcactactgccgtcggcctcctcccagtgacgaggtcgagggtagaaggggaaatcgtaggtgcggtagccgtgtccacgggcgccccaagctcccaacgcgtcgcctggttgcgactccccacgaaaagctagcgaggcgcggagagagccacgtcccccagcagagggacgcattccatcatgaggggacgtcatggacgaaaaagcaaatggccatcgatggagggcactagggatactctccacaggcacacattgaacatgccctcagaacctgcctcctggccgcagatctaggccaatgagtctaggatgcacgctcccatctttttagcggatcctgcccactatgactcctcctggccctccccaaccataaatggaggcggtgatctactcgctcactatatatggatctacaccgtctttattccacgatagtggacagtgggaggagtgtgttagtatgcttaatttgtataaggtatgtgacgcatgtttatctcttgtcgttctcccgatatttctccggattatgcttctataagtgtgtataggatgtgtgtgcatatttatattggtaagtatgtgcatgtgttacgtgcgttatattgtgttttggaacaagaaaattcaagccaactcagttaatatgctaaatttaaacttatatacgtatgatatatagaactgataaaaataaacttactttttggagattatgttaatgatctctaaatggagggattaatgatcttatatacgtatgagagagagaatagaacaaggggcagtacaagataattagataaacttaccagaaaatagcgcaatcggccgtgctctaacgttgaggcacagcaagaaatatctctagcagtatggccatccttgttcataatgcacatatcaacacctcttgtccccagtagcagaccgaaaatccgtggatatccttgtttcacagcaaggtggagaggggtatttccatcataatccgtcgcattcagcagcatcgcgaacatatcatttccgcaaatgtggcgaaccaccatttcctgctcgctctcaactgcaatatgcagaagatttctccctttatcgtcaaccagttcatagtagttgggacatttcttcacgagctcatcaataatcttggttcttccgaacatagcagcagcatgcacgggatatgaaccatcgctgtcagaaatgctagtcagccttggagaagcagcatcaccacctaggaatagcttaactgtgtcaagccttccatagattacggcaaaatgaagaggtgtcctccctgacgaatcggctctggttagcaaagatggaccttctggccagttcagtatctcctgagctatttctggtttacagttgaaatttactgagttcaatgatcggaacttcaatgaaaaagattaaaatacagcttgaatttagtttctaccccacctgaatattataaacttggagcacaatatacgtgaatgaatgctgttttacgtcaaaaaaaaatacgtgaatgaattacggatctagaggagatatcaggagagtttctagtgttgatttatgtaaattacttttattatatatataaattacatttatttttttaaaattacttctaagacactcaaaatgttgtgtttattgttgttttcaagttagttctataatttattgattaaatttaatttctaaataaaatcatgtttttaccgcacaacgtttacttttaatgtcgtgataactcattttcattttgtgttaagttacttttttattatgtaaattatttttggtcttcattcaatttacttttataaaagtgtctaaaaattaatttgatcaaatctgaaaagtaatttacatgtatgataaaagtaatatacatcatatatttttttcatcgaaatataattatatgagatcttactataactattttgtttcaataaatacaatggtgtaatcggattgtaaagcatataattattttaagagaaaatgttataagaagaaaaaaaaattggcatgcatttctctccgacatgactaccaatcaagcggataccaatcaagcggaccatgttgtctcgtctaataagactaaacaataggatatcctctcgtttcgtgcatgttatctaaatagttattaacaaatttttttaaaaaatacaagatagattaatatgaaatatatcactccactaacatgcaagttaaaatttaaattttacaaattgtaacaaaaataataaatatagttgcgaatgtatgataactatttttaatttaatttgttctttttttgcaacctgtagaagtttagtttggttttacatgtttatggagtgatatatttcatattaatctatattattaattttttaataactatttagataacatgcaaataacgatgggacattctctcaagggatgaaaatccatatcctaaacaatgggcatgcactacgtgactgatacatactgctactctctataactctcgtgaacatgcacacataataattatgaaggcaaatccttaattaaaaattctataaatacccaattaaagatgcgcagaagaaggattcttgagagttatttatgattctatcataccattcgtccttttaatagccgccacatgcaaagctgtacatccctccggaccggcggctgacgccggcgacggccctccgtcttgcgacggacgtagcagtgcctggaccatctgtaccgagtggctcaccgccatgtacagtggcgaaacaccgccgttggttgtcaccgaggccagccagggatccgtcgtcatcagcagatcaaccacctcaacatggccgtgccgaacagcctcgtgcagcgcggtggcgcccgtcaggttcctcgaccgcggtgtcgcctgatccatcacccgcaggaggcaggccgccacgtcgcggtgcccggccttcgacgcgcagtgcagcggcgtgccgagggacctgttgcgcgtggcggccagcgagggcgccctctcgcagatgagcgccgcgagctcggcgtggccgtggctggcgacgacatgcagcgccgtgctcccgttgctcgtcacgccgagaaggcggcttgttccgcgccgcgccgccggctcactcgtgccatggaagcttatcgcgacctggccgtttgtgcgaggcgggtgtgtaccgccctctcctctcagaagctcctccaagaggaccttgttgccggcggcaagcacttgcaacagctccttgtcgagccacagtatttgaggcccgaattccacggttgctgctgaagctgccgccatgattgattataaagtccactctgcactctgaactttgcagtgctatttatactggtctgggtgaatctttgggccgctcgctagttgtcgatatacgtacctactacgtactatatgcattcggcagagtcgttcgaaatcacgtagaactaaatatagaataatagagtgcatgttccgttttgccagattcactcttactactttcttttattcatcttcaaacttcaactttttcgtttttcattaacacgcttttcaaattattaaatgatatgttttctacaaaattttctatatagaagtcatttaaaaaattcaaataaatctatttttaattttataattattaatacttaattaatcatatgctaatgagttttctcgtttgcgtgtgctaaaaacctctttcaaaaaggagattcaacgcaagctaattactcctttcgggttgataataagcacgaggtttaacttcaaaatctttaattataaataatttcttaaattatttgtctagaaaaaagaagattatatgtataaattagtcataaaaaagtttaaataaaatcatatatttattgacatttctatttatactataatagaaaataattgtcaattgtatagaaattggagtagtcttttgaatagaaatttttttgaaaaaaaaaccacaccgtctagaaatttaaaacggtatattttttaaaaaaaattctatacaaaagttgttttaaaaaaattatattaatttattttaaaaaattagttaacacataataatacgtattttgttttctgtgctggggaggagaacgcagcccaggacagctcttgtcgcatgctttggagtttttttttaacatgcgtaggagatagcaattatactttcacgcttatgtataatactccttctgtttcacaatgtaagatattttggcttgtctaaatcagtttttttcaaatttaattaaatttataaaacaatgataatatttttaataccataaaatatattcaatgatggatatgataaaattaatttgatgttgtggatattactatatttttctataaattttaatcaaacttatttaattttgatttagtaaaaaaatcaaaacatttatattctgaaatggattgagtacaccggtatcgcgacagacagcacaccagctccttctccctgtcgcgccttttccactcccacagggcttcgtctcttcaaaccatggaacatgttcccttcctacgacctgccgtctctcagttatttatgtccgtcaaaaacttaagacatgtgattcaagtaatagaaaataattttaagctaagagtcataatgcaagtacatatacgcgactgcgtgcacagtaaacaacagtcgggaaaaaaaacactacattagttataaaatttaaaatgctcaaacaagtcgaccctaaccgtgggcatcgatcacttcaaatctaacccgggtagtcctatggctgcgttcgccttgtgtgcttccctattggggatttttgtcttttctgtatgtctaggtccacagtgaggtgaaagagcggataaaattattcacaacaggcaatgagcactattctagcttccccttcctgctattttagccagtttcatatgttgtttattacttcagtcttagcgttcaactcgatcagatccctcgccagtgtagaattatagatagttgggtttggcttgagaatctgctgtgcacacagcttcatgtcttagtacatgtcttcatatgatcgatgcaaaacgccaaaaccgtgtgctgcaatacttgtctttatctacctgtcccagcttcattaagagaacttctctatagcttccccatagccaaaccgtcagcggctttgccactatactcctctaaggctctaaggctcacctgctgcctcccctgtcattaagattttataatcgaacatgattatcattggagtttattttatttactttttagaaatcccgaaccttatttttataatgtttagatgtcccgtcaaacgctgccactgtacgtctttactatccgtccactatctcacctcttttttacactgattttaaaaatcaaacaaaattatcatttggatttttttttttactttctagaagtcccaccaaaccactgtactccactacagctagcccgctatctcccctctttactgtcgttgaaattctaaaatcaaacatgattatattctagaagttccgccaaccatcgtgacagtgttgtttaatgccctgtctatcgtgctccttttaatcgtcaagtggattatatttggggttttcttaatagttttaaaatgtcccataaaccgtcaccactctacttccttataggcctgttgcttctcccatctttattgtcatttgttatctatgttccaaatgattttttttgaaaattccatatttttcattccgatatgttttatttataaattatattcctacatgaacccttacaattatttttctatttcggaatttattttatttgttattcagaattttaattaatctcgtcatgtgttctaaatggtctcttctttcaatagttttttttttattttattacgaattttagttatttataaattatattcctagttaaactcttattttctttttctaatttcagaatttattttattttttatttcaaatttaaattaatctcgtattgtattctatatggactattctttccaataatatttattttaatgtattctagcaagttaggcggcgaagcggagaggcacatgacgcggcgggcgccgctgtgggcattctcgtcattttgaaatatttctcccctctttcaacctggaaattataaaataatgcttctggcatcctacagctaattacacaacttttgttgtgtccatcggcagtgtcacgtttttacgatgtcctttggtcaattacacgatttttgagtgtcctgtagcaaattctgcctttactttattttaaattttaattaatctcgtattggattcttatatgtactcttctttcaatattgtttatttttaattcctaattattttagttatttctaaattttattactacatggactctctttttctttttcttcaattaatgtagaaacctctagtcttcacagcgaacgtggtgtctcctttcaaaactgtttttaataatataatagatgttatgtatcggtgataataaaaatcgggctatacacccggtcctagagctagaatgttgcaaatgacaatgagatatataaaagttcaggtaatatcctagtaatgttttggtggattgctttttgcctgtgaattgtggggagttgtatgttgcctaatctaggaacccatattcatcttatataggctgaggggtaaggtaacctagccacgtacggcttgcgctgctgcattgaaagggattcttcttgcaagttaaggatgagggcatcttcactcattttcaaaatatcaagcattggaaagttctctagattgtaagattttcagtcattttatcatttcctatcttaacatgtgttcatcaccattgccattttgatatgtggcacaattagtacatctatatgttaaacaatttagacttgcgatcaattctatcaatatatgaagttatactcaatttcaatttgtgttctgtatgctatatattatacaatcattagtatgtaactaataagatagcccgcgcattcgcgtaggcatataaagtagattatgcttgagtaacatgtaaggtggaatatcaatcggacgatacctaccaagcttgaaaagtactactccctttgtcccaaattataagacatattttttacacggtttttaataacatattttgactggtactttatttcattctataatcccatcaaatatgaaattagcatcacatgaaagtactttaaaacataaatctagtgatataacatgcataatacttagatatagttagtatgattattagtcaaaagctactaagttattagtataatttaggacagagggagtatttctttaaaaattttcttcatcgccattgcttagatattttttacaagacatttgtaaggtttgaactatatactgtaatatttaattcattactataagcaattatcaatgatcttctttattttcttgaaagaatgagtcaataaatacataggagatatatatattgtacgcgtcgtttccctattatatatgtgatttatggtgttcctttttaaaaaaatgccagtcaatgtgagtcctaaatttaaagttgatagtagaaaatatatataactttttaaccaactaaatactgctacatccggctaccttagtatgtcttatatatgcaataacatatgagaaactcataataccacgatagatggatggttatggcaatagaatatacaatggttgttccaattttctattttttagaaatttattactagattctctctaattgatttgattcaatccctattgacattttttatacttttctattttattttatacaagtcttattttagattaaaaatataggcattatggatcaggaattgttggtttaattatttaacagagcaacaattacattagaaatttgatgtatatcttaagaatacagtctttttagtttggtttgatagataaaaagtaggaggtgggggggggggatggagagcggagagcgtgagccaaggttgaaggggatcggcagtgttttgtgcatgtgctagggaggacaaggttttggggactttatttttccattttttttctaaataatttaagtaaaccgatgatcatatgttttttcttataatttgtaagatttttttgtaattttgatgaccgttaaaatcatataatcatatacgaatgtccccttaaatgggtgaagctgaccgtgtccgtcgaggctttatttctccgctgcctttaaacataggtcctgagtcgacatagtcatgacccgcaataccagcatgaagcataattttaatgtttagttcactatcagcactctcatagataattgcatcattaagtacaaagttatccactattgacaatagtggcctctgacggggtagcatagcatagcatgcttggtgccctttatgggaaaaaaaaaggcaatgtaggtgatgaaaatattttcctgatgaatttttttaaagttttgtgtagacaaaattgtgtatggtattaatcggtaatgcttaattttttattgtgtagataaaatattctcttttgaaatgagcaaagttaataaaaaaaactaaacagacatatgtccgtgacatctaggagtactatatcgttctttatattttgactaagatatatagtttagctccggtttgttttcattcatgtattgttcataattacatgcaatatttttactaattctaagaatatattttccaaaattagttaaaataactaatttgttggagtgcatttatagttacttcagtggggtgtatgacatacatcatcaattatgtctgatatattagaatttctaaactataaaaaatatatgatgaatagtttgatgcacatgattgttcatttgttatcaaaccaatttcgcaaagaaaaaccatatatgaccataattctcgtgatggattaaggggtcgtattatagcaaggacattgcctggaaattccaatctaatagttctattttttaaaaaaaagagaaacttaatctcacataaactaaaattaaatcaaatctaactgtaaaccacaatgttgttttactttttctgcatgtagatttgaattagtgttatatatttgtcaagtgaatttgataccaagttgatcctttttgtcaggtaaaattatttttaaaatgatcatgacattagtttattatatgttagctaaattatttaaaaataattatgacattacgtattatatgtcggcaccatgtgttgtaatgaatttagcagttccatataactattgtactacctccatccacaaaagttagacatatttcacatttgagtttttccaaataagttgttcctatttgtagtctttatacattcaagacttaaagaaggagataaattaaatgtttgattagaatcgaatgtgtcatctaaatactcattggttttgcattcactcattgattttataacatccaagataatttaatttttcctttggtcttggtgacaaaagtaataggtgtaacttttgtggatggaggtagtaagtgattagtattttatttaattaaagaaagacaaaggattataagttagatagatattcgaaataatttaaacgatgaagatttaaagacagttgatttggtactttatattaatctagtttaaccgtgcatatttgtggagtaataaattttattttataatataggaaatcctattttaaagaccgtggatagatagataagtcataagtatgtacttgctgttctttgttaaataaaaaacagagaaaggcatacacaatacgtattcgaaagaccgtattgtttctttttttttatcttcgtacgtacctacgtctgtttggtttttttttaagggaacaatacgtaggtttatattcggtatgtacgttaattttctggtaagtaatttcgatgaagctgggacttttctaaatagatataatctaatggtctaaaatagcgggtccatcaatttaagtaaaaatcaacggttagattaaaagtgctatgtggcggtttaagagcgtttgtaggagtgccacgtggcagtttatgagcgtttgtaggaagtttcatggacttttagtatataataactagaaaggtatcccgcgcacatgcgcgggcaccttcttatataatgtaagtgaaattttattacgaatattttttgtgcgggtgaatttttattaaaatatcttgtattatattctaaattaaattaaacttaatgataccaatagatcggtgcttagttctaatacccaactaggactggttacagggaactcggcatcaatctttataactagccagcactaat

SEQ ID NO: 14885 - DNA, 14822 bp, Oryza sativa
aggggctcagcgtgtgttttctgagctctcatactcttccgtgtgcgccaagtttcccttgttcagcctaatggccgagcaagcaaaggcgcacgacctctctccgagtgtgagcggcgacgacgggagccaaacccgcgccatcgagctcgtactcccccacctcctccgcgccaaagtcctaagcggggggaggcgctcgagagggttgaaaaacccatagcatcaccagtcgcaggtgatgcaggagagcggcgagacggggagcgtcgcctcctcgtctacggtgacggcagcacgccccagggagtgcttcaggctgctggcgcgctcctacgtcacccgcccgtcgtccctgacccggagtctccagcccagcgatggctggacgacgtggccaacttggtcatgacggcacagcagcgcctgggtgctggtggacggtccgccaccaccaggacctccggcgccgccaccaccggctctgtgtcatcaaggcggagggcgcggcgagcggcggctgctgcacgccatttggctaccactccctcgtcggcgcctccgactcgggaggatcagcatgaagagccggatgcccgcctcgacatcgagcgccgacgtagtgatcggcgtgctccccgcgcaacggagggtgcctcttcgtccagggtgtcacctcgacatggacgtaaggaccagccctccgtgcccccggttggtggtgttggctgtagagcctttgtggcgagtcttcggaatgttcgttggcccccaaggttccggcccaccatcaccgagaagtatgatgggagcgtcaaccccaccgagtttctccaggtctatacgaccgggatcgaggccgctgggggagacgacagggtcatggcgaatttctttcccatggccctgaagggacaggcgcggggttggctaatgaacctgccacccgcgtcggtccactcctgggaggatctgtgccagcagttcaccatgaactttcaaggcacctatccacgcccaggtgaagaagcggacttgcacgcagtacagcgaggggatgatgaatcccttcgctcgtacattcagcgtttctgccaagtccgcaatactataccttgcatccctgcacacgcggtgatctacgcgttcagggggggtgtgcggcacaaccgcatgctcgaaaagattgcctccaaagagccccagactaccgcagaactttttcagctcgcggaccgagtggctcgtaaggaggaggcctggacctggaacccctccggttccggtgtggcagcttcggccgcccccggatccgccgctcagacagggcggcgtgacaggaggaggaagaaaaggtcggtccattccggcgacgagggtcacgtcctcgccgtcgagggcgctccgcgggccacccgaaaggggaggcctgcgagcgacaaaaagaaagaggctggtactcccagcagggagcgcccagccagcaagtggtgctccgtccacaacacctccctccacgatctcgcggactgtcgcgcagtcaaaaacttggctgagcgaacgaggaagtgggaggaggacaggaggcaggaacgccgtgagggcaagtccgcggcagttccctccggtaaacggcgaagtgaggccaaacagaaggcccccgccgttgacatcgatgacggtgatgatgacctaggtttccaagaacctggggccaccattgccactgtcgacgggggagcgtgtgctcacgtttctcgccggagtttcaaggccatgaggcgagagcttctcgccgcggcccctactcatgaggcgacgcgtcgggcgcggtggtcggaggtggccctcacttttgaccagaccgaccacccaccgtgcgttgcccggggagggcagattgcgatggtggtttcccccaccatctgcaatgtgaagttgggacgtgtcctcatagatggaggagcggctctcaacattctttcccccgcggcctttgatgctatcaaggccccggggatggtgctccggccgtcccaaccgattatcggtgtgacaccggggcacacatggccattaggtcacatcgacctaccggtcacctttggtggatcagccaacttccgcacggagcgggtgaacttcgatgtggcggacctcagtctgccctacaacgcggtcctagggagacccgcgttggtgaagttcatggcggcggtccactacgcctacctccagatgaagatgccgggccccggtggccccatctctgtccgtggcgaccttaaagtcgcgctcgcttgcatggagcagcgcgcggaccacctcgctgctgcgaccaagcccgagggtggtgacgagaggcttggcacctccgcccccaccgccccgaggcagcggattgccacatgcgacgaggtcccggtcaaggaggttgccttgggcgacggcccatccaagaccacacggatcggtggtcttctggatggcaaataggaagacgcgctcgtctccttcctgcgggcaaacgctgacgtcttcgcatggagaccagcggacatgcccggggtccccagggaggtgattgagcaccgtctcgccgtgcggccgggcgcaaggccggtccggcagaaagtgcggcggcaggccccggaacgtcaagccttcatccgcgaggaggtggcgagacttctggaggccggattcatccgtgaagtcatccatccggagtggctggcgaacccggtggtcgttcccaaggcgaacggcaagcttcggatgtgcatcgactacaccgaccttaacaaggcatgtcctaaggatccttaccccctgcctcgcatagatcagatcgtcgactccactgcggggtgcgaccttttgtgttttctagatgcatactcaggttaccatcagattcgcatggctagggaggatgaggagaaaactgcgttcattacccccataggaacctattgttatacatcaatgcccttcgggttaaagaatgcaggtcctacttttcaacgtactactcgaatttctttgggtagccaaataggacgtaatgttgaggcttatgtcgatgacttggttgtaaaaacgcgcaaccaagaaactttactttcagatctagcggaaacttttgagaacctccgctccgcccgcataaagctgaaccccgataagtgtgtgtttggtgtacctgcgggcaagcttctcgggttcttggtctctgcccgaggcattgaggccaaccccgagaagattcgagctatcgagcggatgcgcccccccagcaaacttagggatgtgcaatgcgtcaccggttgcatggccgccctaagtcgtttcatatcaaggctgggagagaaggcgctacccttgtttaagctcctcaagcgctcggggccgtttacttggacggaggaagctgaacatgccctcactcagttaaaggcatatctcagctctcccccggttctagtcgccccggagccaaatgagcccctgctactttacttagcggcgaccccctaagtagttagtgcagcgttggttgtggagcgcgatgaagacaatcctcatttcgtgcacccccattctgtgctaacttggcccgggagcgagcggggaggagaggcccccgagtcggacggtggcctacggcccctgacgaccggagtcggccctctgcccgcttgtcagacggtgctagatgcccccgaccctcaggagggccccaaggccactgcgggaaggccgcacttaacgccctttgaccccgaggctaaccctgtgctgactcgacccgggaaagagcagggagaagaggcccccgagccgaacggaggccagaggcccctgacgaccggagttggccctttgcccgcttgtccgacgatgcaggagcccccgacccccaggacggccccgaggccactgagggaaggccgcccctttcatcctccgaccccgaggtcatcggcacagaagacaagtgcgccccgaaaggccacttgaacgaagaacgccccggggatacggcccctagcagagaggatcggccccaccgaagggtgcagcggcctgtctactttgttagtgaggccctccgggacgctaagacccgataccctcaggcccagaagatgctttacgctattctgatggcctcgaggaaactgcgccattattttcaggcacatagggtcactgtggttacgtcttaccccctcggtcaaatcttgcataatcgagagggtacaggacgggtggtaaaatgggcaatcgagctttctgagttcgatctgcactttgaaccacgccacgctatcaagagccaggccctcgccgattttgtggcagagtggaccccggctccagagaccgtctcaatccccgaggccagcacgaacccctcgcagctgcctcacaccacccactgggtgatgcagttcgatggttctctgtccctccagggtgccggtgcgggggtcacgttgacctccccgaccggagacgtccttagatatctggtccgcctcgactttcgagcgaccaataatatggcagagtacgagggactccttgccggactcagggtggcagccggactggggatccgccgtctcctggtgttaggcgattcccagctggtcgttaaccaggtctgtaaggagtaccggtgctctgacccgcaaatggacgcctatgtacgccaagtgcggcgtatggagcgccattttgacgggatagagcttcggcatgtgcccagacgggataacatgatagccgacgaactctcacggctcgcgtcctcgcgagcccagaccccaccgggcgcctttgaagaaaggcttacccagccgtcggcgcgacccgaccccttaggggagacggatgcgcctgaccggcccccgaggcccgtcggagtccaggcctcggacccgaagggagcgctccaagctcccttagattgattgcttggatctctgagatccaaacatacctcacagataagactctacctgaggaccgcgaagggagtgaacgcgtacaacgcatttccaaacgctatgtgctggtagaagggaccctctatcggcgcgcggctaacggaatcctcctgaagtgcattcctcaggaacaaggcgttgagcttcttgctgacatccatgagggcgagtgcggagcccattccgcctcgcgcaccctggttggcaaggcctttcgtcaaggattttattggccgacagctctcaatgatgcagtcgatctggtccggcgatgcagagcgtgtcagttccacgccaagcaaatccatcagccggcccaggccctgcagatcataccactgtcatggccatttgctgtctgggggcttgatatcctgggaccgttcaaacgggccccgggcgggtttgagtatctgtatgttgcgatcgacaagttcactaagtggcccgaggcttatccggttgtcaagatcgataagcactctgctcttaaattcattaagggcatcacggcccgttttggagtgcctaaccgtattattacggataatggcacccaattcactagtgaactcttcggcgactactgcgaagacatgggcatcaagctctgcttcgcctcacctgcccaccccagaagcaatggccaagtggagcgcgccaatgcagaaatcctcaaaggccttaaaaccaagaccttcaatattctcaagaagcacggcgattcatggatcgaggagttgccagcggtgctctgggcaaaccgaaccacaccaagccgagagaccggggaaacgcctttcttcctcgtctacggcgcagaagcggttctcccatccgagctcaccctgaggtctcctcgggccaccatgtactgcgaggctgatcaagatcagcttcgtagagatgacctcgactacttggaagagcgaaggcggcgcgcggccctccgagccgcgcgctcccagcagagcctgcggcgctaccatcagcgccacgtccgggcccgatcactctgcgtcgacgacctcgtcctacgccgcgtccaaacgcgtgctggactgagcaagctctcaccaatgtgggagggtccgtatcgagtgatcggcgtcccccggccgggctccgtacggctggccacgggcgacggcactgagctgccaaacccgtggaacatcgaacaccttcgtcgcttctacccctgagggggggggtcgggtgtcaggtttcgggctcaggctaaccccgcacccccctcgggtgtgcagggttagccgggggctaccacacatgcacagccttacttttcttatttcagcatttcaataaaagcagtttcaatttcctaaaggttgtgtctgtgccgtttttccttctgaagaatcttaacttgaaataaggtcactcgtgctcaaccttgccctcgggggctcggttcggtcagctaaaatcgccaagcggggcccagaaccgagccgtgccctggggcgtggtgaactccgggggggaatcggcaaaaacccacaatcgggtcacccataaccctcggtcaccatgttcccggcctggccagtctcgacatgtggatctccccaggcactagccccgacccgagccatttgaggatcgggacttgagcacgagcccttaaatcaagctaaaatgcaaaaggaccacggcacaaatcatcctcaactcatatgcatagcaaaataaagttaacatagaaatttttcatcatttttgattgcagattaagttgatctatacaaaaagaagaaagaaaaagaaaaaattggagattggcgggggcctgggggctcattccaatgcgcccgggtcgccggcctcgtcgccaccgtcgtcctcactgctggcgtcgccctcctcgtcggagctgggggcgaacgcgagccgaggggccgacccctcgaagctttggacgatgtggttggcggcatcccggacccgcgcgcgcgcatcgtcctcggtcccgggagggaactcttccagcgccatccatggggagaagccggggtccctggcctggtaactcgctaacacgagttccaccgctccttggtcgaggtccctcgaggatgacttgatggtcttctcgagctcctcggggagttgttggacagcccaggccatcctcctaaggtgcggggcgaggccttccagattggaggagcgcgaaattgtctggcctttccagaggcccgcttcccgaccggcgcgatccagccgggagactgcatcccaaagcatgccgggccctatctcacccaacaagcggagagcctcggcttccccggtggatgagtccagggcgcgctgcatgtccgcgacggtgtgttcggcagctgcgaggcgggcgactaagtcgctttcgcccgtagccgccccgccgctgcgctccctcgcgtccagctccttttctcgcgcctcgaggttagcagcccgctgctccagcgcggctctctcggcgcggacgcattccagattgcggcgcgcctgctcctcctgcgctgcctcgcggagggacaggctgtccgccagccgttgtgtcgcggcctcggactcctcaagagctcgctcccgctcagcaagcgcgtcctcgcggagccggagcgcggactcctcttcggcgcaggcggcctcgtgcgccgccagcgtcgcctcccggatagcggcggcggcctcgcggtccgccaagctggtctccacggcgccggcatgatcttccagtgccatggcacgggcctcaagggcctcttcgcgccgccgggacgccgcttcagcctccgttgctcgctgctctcgggcagcggcggcgtcaaggaccccctgggcggcgtcgagctttttctttagctccgcctcccagctctcgtgttgaaggcggagggagtcctgcgcctcaatcatcgcggtggtggcgatgagggcggcctctcgctcctcctccacctctcgggcgatctccgccagcgccgccttgcgggcttcaagctccgagatgtggcggcggtgagccttacggcccacctccaccatggcgtccaccgagcgccgcccctcctcgacgcgcgcccatgcggcctcgagctccgctcgttccgctcgcaaggcctccacctgggcgctgaatccatctagcaccgcggtgtttgcggcggccaaggcttgcagaaggggctcggcactcagcggggcggcagaagacgaggagaagagccgccttggagaaaatgcgacgcggctcggcccgcctgaagacgcactgagctcggggatgtcccccggacccgtttggtcctgagcgtcgcccgagggagcgggcccaggcgatgcgcccgcggccttgtcgcgagccgccccggaggttgtcgcctgagcgtcacccgagggagtgggcccgagcgacgcgccggcggtcttgtcgtgaaccgcctcggaagacgccatcgcctcagcctggcgagcccgggcggtttcctcccgagtggcttcttcagcctgacgagcccgggcggcctcctcccgagcagcttcttcggcttggcgagcccgggcggcctcctcccgagcggtatcctccgcctgccgaacccgagcggcctcccgggcggcctcttcagcttcccgaaggcgatctgcggcctctcgccggtcagattcccgcctccgtgcctctgcggccgccggatcttcggcctcggactggccggacttgggatggtgggaggaacgcgatgggatatcactgaagcagaaagaaaaaccagaaggcaaacaagatgggtaagagaaaacctgcttttgggataaaagaaagacggtcgcaaagagagcgggacgaacctgcgagggggtcggttaaatgaccaccttggaggggaaattaggtttccccgggatggttctgtctcccccatcttgcgcagccgcttcttcttgcgctccccctcgggctgcgatgtcggcgcggccccctccgggcgcctgctgctggcacgcaccgccccgccccctcggggaggagatgggggaggtgttcctcccagtttcctcttcccccgggcgtcggtagggcggttgctccccgagcccccgacgcggggcccagaagcacgaccccctccgggggtagattgatccccccggcggctcccacctgcgccgtcatggcccttaggagcctgctcctctgaggccccgaccgccgtcataatggtcaagatggaggcgcgatctgggtcgctgcagagggggaggataccgtgggggatgagggacgcctccacggagttgagatttagcacccgttggatcagtatcttgaagtcctcgggggcccaatcccatctgactccctggtgggtcctcatatagtcttcgggcccggtgtactcccaggcggcccgagcgcgccgctggagcggcgcaatccgacgacggaggtagtcgccgtacaccatggccccggtgagcccctgggatcgcaggcccgcgaggcggtcgaggacggcgtcatagccatcccccagatctaccgacgcccgccagctggaggcctgcaccgggggctggctcggaagtcggaggcgcgcttcgttggcaaggggggtgtagaaccagtcgcttttccaatcgtcccacttcttgcggagggcgcaggggatgtagcggttcaacaccggcccccgcggctggaagtagcaaccaccgaccaccgacggcggcgataccgactgcacggtgaagaaccaccggaacagccgaagagatgggcgcaccccaatgaacatctcgcacaggtgcgcgaagatggccaaagtcatcactgcgttgggggtgaggtgcgccatctggagatcgtagaactccagaacatccataaagaaagaagaaaaaggaggaaccaacccggccattgcaaaggggaggaagaagatggaccgccccgggtaatctggtgctgggcgcgcctcgcccagcatcactatctcccggccagtggcggattccggcatgaagcggcgcggcagcccagcctgcctctcgctcacaatgcgggaaggcggtagtacgctaccgtcgagcagagcggagccccgtgccatgtcgtcggagaaagagagggttgagaacgagtgtgtgtggcgaaggtgaggcgcagcaaagagagagtttagggcgcaaacggcgaaggaaaggggaatagtggcgaaaggaagggagcaagtcctttcctcgatagctttatacccttgccatcgctgagcccggctcctcgtttctcgtgcccactatctcgctccctcgttactcgctatctcgctccctcgtttctcgcgcccacgcttccactaattccattcgcccgcttgcggcgcatgaggtggatatgcggttgtggcagtcgagatagatcgtatcgtgtgtgcgttaattacgctcgccgaccgaagcgacgttaccatatctccagacgaaacgaatctgcacgcccagattcgagcgctgctcaagtgatgtggcagtcttgaagagaccgcccatgactgacggccaagacaccgttaccgatatgcgtggtttgagaccgttgggtttttgcccaatcacggagaccggtcccacctgtcaccgggctttatgagtggcgtcatgcccgaccgcttcccttgagaaggatgatcgccctgacataacgccgggggctactgtcggtgatatgggaccgggagtattgcgcccggaggcttgaggcagatggaatcgcccacgtggcctggcaccttcggggacgtcgggcccgagggtgaggtgtccgccctcctcctgatttccccgagggggggtcgggttgctcctgccccggccccgagggccgaggtgccccgaccccctgtggggtttgcactatgtacataggttgggtgaacacggtagggctcacctaaccgcatttattgcggtctggtcaagcgtgtcacgctgcatgcagcgcaatgcagcgcgctcttttatccggtctgtgaccagtcacagaccggtcggatcaacggttaggtggcgactggcggtctgacgcacgcctcgccccgtcccgtcaagacgagagcctctaggcacacgtctccagccggagctagcgtgttacctcttagagatgacacgttagccctggttagatgaataccaggcttcatcccaaccattacaggcaagatgctacaaaaagaagggtgatcatgcagatcgctgaactgacgcatagaggacaagaatgaccgatctgtgaccggtctgacactggtcgcgtcagcaacagacagccacgatcccacgttgcgcctgtctccgccgggagtggaggtaggtgtgggctgtcccatcgaagtgtcattcggacggcaaccataccaatctccgtccataaagagaagaaaagtccagtttggaaagggaagggtacatgtggtatccccttaagatataaaaggaggaccatgcccacaaagagaggggactggattctcccgggagaggagagggctggttgatattttgtaacttgctcttacacagatccaccaaaaacacaggagtagggtattacgcttcccagcggcccgaacctgtaaacatcgtccgtgtctcgcgtttcttcctggcacgcgatctttccacatacagagagagcttgagatctcaccctaagcccccggccgaactggcaaaggggggcctgcgcggtctcccggtgaggagccacgagctccgtcactcaccaaaacaaatcttgtaatagatttaatgattcaaaattacgtgaaacttatatacaagttacactatagttacatgcaagttacagtgtaattacatataagttacagtgtaattacactacgattgtactataattacatctgtcaaattttcagaagaaaatttatcgacaaatgtataggtggtcccattatggcttagtgggccgaattttttttatttatacatttttttattaaaatatttaaaaaacaattttttgtttcaaaaacttgcaaatcttgtcgcttctcgtcctctaggagggcgatttttaaaaatcgccctaccagagagcgataagggacctaaatacaaatttttcagcataggttgtagctctatgattttacaatttaaaattatattatataaagtcagatgaaataaaactttatatcaaaattgtagatctcgaggagctctacaactttgtagttaacaactttttcatttaagatcttttagatataaaatattcgttacaaaatataaaacctattttaaaaaatctcagatctacatttgaaatgacatcggatggagataaactttatacaaaagttgtagatctttccatttaaaatcatttagagtattgaataagcattattcgtttttaaggaattaaagctggtgagaagggtttgaacacaaataaaaaatttgcatttaggtcccctatcgccctctggaagagcgatttttaaaaatctcccttccaaagggcgagaggcgactagatttgtaaattttcaaaacaaaaaaatattttttgtaaatattttaataaaaaaatgtaaaaataaaaaaattcggccttaaagcacatactttatccgtcccataaaaaataaatctataattggatatgatatattttaatactataaatctaaatatatgtatatccagattcgtactattagacagggagtaagtccatcctgctttcatcctatcggctagctgacggagaattatttcgctaaaaaagaaaaaaagcggatggagaactggtgacctttgctgacgacgtcgtggcgacaagcaatggcacacgcacgggccggacgtacgcgtttgttacagcaaacggccaatagacggttcttcaatctgctaccttctgtccggtagaagcagaggaatgaagaagtagaatgctatctcggctgtggtgattcgcgtgtaccgtgtatcacagcagccctgcagcgacattgataatgacgggtgtataccgtgtatagaagtgatccctatgtagtttgtacagaagttatccatggaatggcttttatttcaaaagagaattgttctgaatatcgatacaacgcatcacactttccattaaaaaaagatacaacgcatcactcttaaattcttaattatattcaaaagcaaaacacggagggtttgtggtagagatatactccctccgtttcaaaatatttgacaccgttgactttttagtacgtgtttgaccattcgtcttattcaaaaaaatttaactaattatttattcttttcatatcatttgattcattgttaaatatactttcatttacacatatagttttacatatttcacaattttttttaataagacgaacggtcaaatatgtgctaaaaagttaacggtgtcaaacgaagggagtatatcttagctcactgtcttggcataacaatgtcgagtgcgattgcgacgacgaaggtgacggagatgagtacagggaacaatgtcctcctaatatccatcaaaggtcccgtgaatagagactccaagaattctagtaagctcgacggtcgatcgtgtatgttgatgagtcctctccaccctgctcgtcgccatatcgttttccaaagcccaagacagaatggaccccagatgcccgggaaacagaagaggactgcagctgaagacaccatatagacgaagatgacaagtccacggttggccgagccgagcacaaggtgaaacccgagcgcgaacgtgccgatcaggaactgagctccccacggcaccaacccagatgccagtaagctgtaccaccaacgatggccgcgtggaatctcctttgcgctaccgtatataaggaagctggttgccacgatggagcagaggaaggccatggtgtctgtcacgacaaatgctcggaatgcaaaccggctcgccagtattgctgtcccggcatgcgggcggtcgtcggcgatgaagcccccagggacagtgaaagctgccgcgaatgccactgtggcgatcagaaccgacccaatcgttccgtttcttgtcatgtaatcttcttcgtcgtctaaagcgggtgcaggttcgtcgacaataatgtgagcagcgcgatgatttagagaaagtggtgctctcacccagcacagacagttatgcactaatacgcgcggatcctgtgaaaaaaaagggtaatataggagcattgtcaaataaattggtactcactccgttttaagttataagacgttttaactttaatcaatatcaaactgctttaaatttgaccaagtttatagaaaaaactaacatttttaacccaagacaaatttattatgaatatatattcaattattgatttgatgaaactaatttattattataaatattactatatttgtctataaacttaagtcaaagtcaaaacgtcttataacctaaaacagaggactaatatataaaaagcaccaaatataagcccaaaggaaacaaatgacggaggtcgggtaacctatgaccagcaccagaaattggaaaccaattaaccagctagccgccttcaatacttgataccccacgctttgccgtggaatatatgaaagaatgcatattatatattatagaaatgatatatgtccatgtttaaataatataaaaatgatatatgaagataatgatttgacattaactgcatattgagttctaaaaaatacaat

SEQ ID NO: 14886 - DNA, 2362 bp, Oryza sativa
taaagtcagcgtgccaacgtacattcagcaccatgctatttggcgctgaggtgtctaagttcagcgccacatgatttggtgttgagcaaaagggtcagatttaaaataagttttggaagcggttcatttgtaaaaatagtttttgcaaagggtcaaattgtcaaaatttgtgagggatttgggtgcctttctattttggaggtttaatagaggccctgtttagattctaattaactttttttcttcaaactttcaacttttccgtcacatcaaacttttctacacacaaactttcaacttttctatcacatcattttaatttcttcaaacttttaattttagagtggaactaaacgcagccagagttttgtaccttgatttttcttcctttacctcaaaatctatttgggagcttagtttagatgttccgttggagataatctaactagaagcaaatctaataaatggaaatggacgcaaaccaatggtttgaatttgcttagtttcataacgacaacaaaatcatgcagctctttatagtcaatatacttctgcggttaaattggtagggctgcagtactaattaactagctcatggcaaaaatagaacaattaatgttctatacacaaaacaacattatgaaatttcatttgtaccttggctgatagctgccgcaacatgcaaagccgtacgtccctccggctccgggccagcgaacgatgccggcgacggcatcccgtcacgtgacggacgtagcagcgccgcaaccaaacacaccgaaccactaccagtcgtcgccgccaagtacaacggcgagacgccatcgccggatgctactgcggccagctcgggagcttccgccatgaatagatccaccacctcagcacggccgtgccggacggcttcgtgcagcgcggtggcgcccagctggttcatcgcccgcagaggcgccgtcccctcggcggcgcgcatcatcggcaagagacagtctgctacatcccggtgcccagccttcgccgcgcagtgcaacggcgtgtcgaggcacttgttcctcgtggcgaccagcgacggcgccgtctcgctgatgagcttcgcgagctcgacgtggccgcggctggcgacgagatgcaatgccgtgttcccgttgctcgtcaccccaaggagggagctcgtacctgtcgcggcgccgctgcacgcagggccgcggcgccgacgttgattgagacctgcagggcgtctgttcgacggtagccaccgtcgtcgctgccgcagccttctctccccatcaacagctcctccatgcggaccgcgtcgccgtcggtgagcacctgtaccaaatccgcatcgagcgtcatcttttggcgtggcccgaattccgcggctgcggcgacagcatccgccatggttgactgaatttgaagctttatctgcggcgcttgctttgcttaaattgctttgtgtgacgcacacctcactgcgccgatccctcttttttttttagatgctgaaacactgctttggtgaggtaattactcctaattaggtaaaggacatttgtgagcactgctcgaggtcaatataatactcctttttttccccctcatgtggcggcttggcctcctttggatcttgaagcaagcccatcgcaatatcgcatcttattgccctgattccttgattccttctgcctccagaccgtgagtcggagcagctgcctgttaatggcggcggcagtgaacaaccctcattttattccgtagcgatcgagcaccatggcttctgcttggccgtttgcgtttcgttgtgttcgcggacgcgcgcggcagtgccggcgggcggtgactccagctgccgtactactgctgcgaggttctctctcggtgaaccatgaacacgagactgtttagtggcctgaaaagttatgtgaggtccgtgcggcccgttacagttgggccagaaagggattcaaagggacatgctaattatggctcgattttgctatatatttgtcgacaaattttctcccaaaaatttgacagatgtaattacagtacaatcgtagtgtaattacactgtaacttgcatgtaattacattgtatctatagtgtaacttgtatgtaactttcaaaaatctctctgtaatatgttatttcggtaaaatggaggttgtgggaacaaatccttacacatatgtgtgtgctgtgatttttttcttcctcactgtcggtgatatgggaccgggagtattgcgcccggaggcttgaggcagatggaatcgcccacgtggcctggcaccttcggggacgtcgggcccgagggtgaggtgtccgccctcctcctgatttccccgagggggggtc

SEQ ID NO: 14887 - DNA, 523 bp, Oryza sativa
gcacgacagtagttggctgctgcaagtagtggcttgttacaagcccttccccttgaatttgacttgtcccaagtcagagcatttggaaatctttgcttgaagtgaagttcacggttcccatgtggcatcagttcaagcaggatcagaccaccgaacaagcaattgagaaccaatacgattaccttttcgggtaactctggtatccaggacttcagctgggaactggatattgcaagttgggaaaggcagttgttgctgaactgactgcttgaaccctttagaactcttcagttgggacacatgaaaaacacggtgtatggcactgccagatggaagctgtaacttgtaagccacctgacccactcgagaaatgatcttgtaaggaccaaaatacttgaaggagagtttatggtttgctcttttggcaacaaaagactgtatatagggctgtagcttgagaaaaacccattcaccttcttggaattgcctgaaactcctctttttatctgcttggtgtttcata

SEQ ID NO: 14888 - DNA, 4955 bp, Oryza sativa
tgttcgtattaaaaaacctagaaaaaacataacatataaaatttttatatccgcacgtatacaaactttgcatcccatacatataaaaaatgaaaaccaaaaacccgtaagagaaaaaaaaaaggaaaaaaaaaaggaaaaaaacccacgcatgcgcggcgtgcgccgccctcctctccccgcgcaccacctgtccatctgcgtggagggagcgacgcgcggacgtccgccaattagcaaatcttttcccctttggccttcgagctttccccaatccccattagtcctgcatgattgcacccatgatgcttatacttgcccgtgcacgagggccatgttgagtagtgcccgcgctgggtggtttcacggaggcaattgtgtgtcttgcgcttccgtaattttacatatatccctatcgcaccatctccattaattcttccgtgttttgaagagtttaccatatcaatcttacttatggctccttgtcggtgataactgataaatctataaagaaataatagaaggttaaacaaactagaacaaagttacagatctccttctcatttacatatggcaaaaataatttataagggttttgtgggggctcacatgatccttacgctagtagtggattatcgagcccctgttgtcccatgaggatccgccatgctcctcgtcgttgctggtggcaatttgaggggaaaaaattggatgtgcctacttcacgctttaaatttcaataatgctatataaaatcaatatgcataagtaaataaattaaaatcaccagctaaatttgaaaaattaaatattaatagctcatttttttaataaatgatttatataaaccccgcttctacatcccaaaaatgtatatagccaaccaactccacacaggagcactaaggctcctcccgttacatgggtcacaaaacaaactaatagctcatatatggaagatcctatattaaggctacaaaactactactcgcccggcctatacgctgcaggttctcacatccataaaaatgaaagccactattattgttatgaaactattatctcctgctagagataaatataggctcataccaaatatatgaaaacgtatcataatagaactctttctattatgggtatatatattgagagatggtttgagaggttggttgatgtatccgcatatagttaatgcaataaagctgtgatgcccctccctatccgtgttcatctactatataattgtgtgcatgagatcgtcgtcttctactccggatcagcaaataggccactaattatttaacacgtatcagcacgagattgctcgtacgttaatccgggtaagtgttctaatagatcaattgatttcggtactaatcagattgatctacgtcgccggccaacacgaccgtctgtcggtttgtcgttccaatccgtttttggtattagattgatttctaatttacagattaatgcgctagtattttctgtttaatgtccggatgatggcgagcctcgtgatgcaaatcgccgggatggtacggtgtggttgctcaccatccgtgcaagccaccttgacaactggacgtcaggaacgacgccacttgaaccatctgcttcgtctggctggatggattacaggcacatgaaggcacccggcacaccggtgcgctgtcgccgtgcgggtcagtcggctgcggtagtacggcaccgcaaggctcagcatgcaggagaaagtaccgatgtggtgcactgtgcaaattggttttcgataccaatctgatgcatgcaaggaggattagattaacatgcatctacacgcatgcatgttgcatgcatacaactgatatatgcatatatccttatagtactgctactagcctgacactaaccagatttattttcgtgattaattgtcttgcatgtacggccggagctgcatgccgttggctgttgaagattgtttctggactctagccacacgcattgcaccggagccgagcgcctcggctatggtccacatcgactcccccgggagttcccttgtgtaaagcggagcggcagctgcatatccggaccggctatctttacatcagataaacgagatgagtatcggttttatctattctaatactttgcagtagcgagagtaacatgctagatcatgcctctagtcgttttattttctcgcatgaatagatgtatttgtccggcatttgcgccgactcttctcttgttatatcgccgaccacgaagtttggcaccacgcacccgaatgtgcttaccatgcacacaagaaggtgcacatacataatccattgaattgaacgacagagtgttgtcccgaatgacgacacctaacactcggtaacacacgacaccacctagaagttgtcgtctttctagctaacatagtcgttaatctatgaatatattaacacactcgtcatcgctgatcttatggatcggcgcgcttgggacactctgtcggttgtgacttgtatgttaataatccgtcatattgctatctgtatgaagtagatggtaacaaatccgagtcatcggcacctgcatgcgccaccgccgccgcctgcacgtagcgacacccggacgcaccgcatgacgtcttcccctttgtcaatggttgccgaatcaatccaaaacctttccctcgtcaatctgccatctgaaacgccgactcgacggcctttcgaggccatccgcaacgcaattgacgatcaccgcccgtagcgacgccaaggagcttacgcccgcctcccctcgctgccggtacgcaccgcatgcctcccgcattacttcacgcggccgggacgagggtcgaagccgcggtgagcacccgccgtcgatagctgtccgccatgccggcctgtatgccgagccgagtttcatcgacacgtaacatgaagctatgattgtcggacgccggtcacggcttgatgccaacgaatgccggtgtcggtgctactagatgttgcaccgccgctccgcctctgaccatggcaacttgccatagttgtccatctctaccgagggctcactagcacatttgccattggttccatccgttgtctccattgaagaatggcaattggatcatacctcacccacttcttgtgggagaaggtcgtaatagcccattaggcgacatatgagatgggctggccaggttttaaagctagctagtataaggaggtgggccaagtagaaattggcctattaaaaggagtcgggcacgaaccgtgattttggtccgaaaatggcattttatttcaaaagtccttggtttccaaggtattatgcggaattcggaaattatgcggaaaagtcctatgggacattagaaactacggggaatatacattcgccatttatactttgaaccttcatgaattgggtttacgccaaatagagaagaattaaggatttattccttagtcccgtatttctaaatatttgctttaactatttagttagtttcttgaataatcataatcaatcctaaaaacattgtttttaggcaaaagagcttccatgaacttgtgaaacctttgttttagcaccccttttgaaagcataatattttatggtttatttcctggcaattgtttgtttagggtaattgattgttctgtgggttagtagttctgtaaattacacatacctttgaatagcagaaaatcatgttaattgctaggattgtaataaaaggtgtgtatagaaaaccattctttactattttgtactcgttttgtgcactttatttactagaagtaaaccggtagaaagttgcataaaaggacatcatgtaagtagttgcatgtagcaaatacatttattgggcaaatgagtaatagaattattcatatatcttctctttgtctaattgtcgcaacatttgtagaaggcacaattatatattctccgtatagaataaatgtatacactcatcatgaagagagtatattattgacttagagatatttattagtgcatgactatcatagaagataagctacagctaaatttatattaattgtgtccaagtagatacaatgtcatcgaatttgtgaatatctagacgaggagtctatatgccaatatgccctacaccaaaattatctatcaaaagactatgtacctatgcagtgtctatagttaatttgattgataatgttttgtccatcttccacgtataaatgactttaaaaatgaagtattgtttttatggatgtatgtacattattttgagtaaattggtcatttgcatttgaagcaattttggcctagatgcaacatgtttagttgttagaattgatacacaagaagttgtattactgtcaatatgtgcatttgcacgcacatatatgacttatactattaatatgttcatgaagaacatgcatactcaaaatttgtgaaaggaaaggaatttggtgtatttgaatttgatgttcaactcaaggggagacaaatagtaatgacagcaatcttgcattcgttcttttgagatagtagtttacaatacacgagttagattatagtttagattaagttcaatatgaagaacatggttaagctcatgtagagcatctttatcttttgctttaggcatagaagcttctgcagtagattactgaatattttttttatataggtcatctcaccttacctatattgcctttttttacctgtagtaattctttaaccttttgtggaataaaattgtgaattgtatgtctaacattgaatgtaaatatttgtcttgcctgttatttgaagtatttttggtgaatgtattcttattatccactaagcctcaatcaaccatgtaggttgatagttctaagtgcattgacgccacattggcatacatgtaaagttgtttacttatgcacatggacaattagaatatttatgtttaagcattgaagctt

SEQ ID NO: 14889 - DNA, 22679 bp, Oryza sativa
aaaaagatacaaccaattattatagaggttgtatgatgaacgactgtaaattttacaatcacaatttattagaaaacaagaaatttactaagaataccacctttaaagtatagactatttttatctatggttggcgagaatatgcataaccattttttttctctaacggcttacaagttctatatagttcttgtcttaaaccgaaaacagaatctccaaaatcaacaattaattatagtttcgattgaatttcacacacatcactataggcgggtaacgtcaaaccgaaaagaataacaccatagagcaacagagctgtaaatcaatgattcgctcaaatcttgctaacgttgtagccatcaaaacgacgctaaggacgcccctgaactctggaatctgaactcgagcggttttctcatggctctcagtgccggtgtgggatcgtggttgtgtgtgtgattgcagaaaaaaaaaatcctatccattatccatacgtttttctccacatcactcgccggccggtcagtgttcgcagtttgctttgctcagaactaatcggaggagaataaacatgtacgcaaccgatgcgagcttatgtgcaaccagagctaaccacagctaccttccaaaacgcgcccgatccaactcttgtcctcgcgcgaaaccgatcaaaatcccggacgccaccgccggctctcgcgtacgtacgtggcgaccataactcgccgttgcagccatctcactgcagtgtaccctgcaacatgccaattaacctccaagataagcatccatcgatccaccgctggatcaaccgcagcgcgcgagagatcgatcaacgtacgtaacgccatgcaccgtagccaccaagttccatgcatgcaccgatgcacgagtgatcgagcgagtgatctgatcgagtaataagttgcaggtttctggacgccatcgctcggtataaatacggcgttttctgcaggcgaagcagccaaggcatgcatgcacattcgctctagccttcctcatcgttgacagtgcgtggcagtgtactcttggttatcatgtcgtcgccgttctccgtgccatctctggtacatttcacgaatcgattagcaatttgttacagatgttaagcgtgatcgataatatatcgtgtgattttgatcgtgcagatcatggaggaggaagggcggttcgaggcggaggtggcggaggtggaggcgtggtggggaacggacaggttccggctcaccaagcgcccctacacggcgcgcgacgtcgcgctcctccgcggcacgctccggcagagctacgcctccggcgacatggccaagaagctgtggcgcacgctcagggcgcaccaggccaacggcacggcgtcgcgcaccttcggcgcgctcgaccccgtccaggtcgccatgatggcgaagcacctcgacaccgtctacgtctccggatggcagtgctcgtcgacgcacacctcgacgaacgagccgggccccgacctcgccgactacccctacgacaccgtccccaacaaggtcgagcacctcttcttcgcccagctctaccacgaccgcaagcagcgggaggcgcgcatgtcgatgtccagggcggagcgcgcgcacgagccgtacgtggattatcttaagcccatcatcgccgacggcgacaccgggttcggcggcgccacggccaccgtcaagctgtgcaagctgttcgtcgagcgcggggcggccggggttcacctcgaggaccagtcgtcggtgaccaagaagtgcgggcacatgccggggaaggtgctcgtcgccgtctccgagcatgtcaaccgcctcgtcgccgcgcggctccagttcgacatcatgggcgtcgagaccgtcctcgtcgcgcgcaccgacgccgtcgccgccacgctgatccagaccaacgtcgacgcgcgcgaccaccagttcatcctcggcgcgaccaacccgcgcctcaggaaccggagcctcgccgccgtcctctccgacgccatgtcggcgggcaagaacggcagggagctccaggccatcgaggacgagtggctcgccacggcgcagctcaagaccttctctgactgcgtcagggacgccatcgcgagcctcaacgccaccgacgccgacaagcagcgcaagctccaggagtggagcgccgccaccagccacgacaagtgcgtgcccctcgagcaggcgcgcgacatcgccgcgggcctcggcgtcacatccctgttctgggactgggacctgccgagaacacgggaggggttctaccgcttccgcggctccgtcgcggcggccgtcgtccgcggccgcgcgttcgcgccgcacgccgacgtgctctggatggagacgtcgagccccaacatcgccgagtgcacggcgttcgccgagggcgtgagggcggcgagcccgggcgcgatgctggcgtacaacctctcgccgtccttcaactgggacgcctccggcatgacggacgccgacatgtcggagttcatcccgctcgtggcgaggctggggtacgtgtggcagttcatcacgctcgccgggttccacgccgacgcgctcgtcacggacacgttcgcccgcgacttcgcgcggcgcggcatgctggcgtacgtggagaggatccagagggaggagaggagcaacggcgtggagacgctgcagcaccagaagtggtcgggcgccaacttctacgacagggtgctcaagaccgtgcagggtggcatctcctctaccgccgccatgggcaaaggcaagaaagcttgctgatgatgctagtgttcaatactgatttaattggctatttttttggaaattttttcaagatgatttgctcaaacctgtgtttggtttctgtgcttgcaggagttactgaagagcagttcaagggctcatggacagggcctggaagtgagagcagcagccatgttcttgccaaatccaggatgtgatgaggattattcagaggaaaattttaaacagttgaaatttatgtaataaaagccactctggacttcagccaaggagccttgatactttacagactgaactacagcacgcacggatcaactaattacatatagttacagtatatatgaatgattgagttatgactcaaaatggaacaatcagtttggggtaaaatgtaactgatctgtgagtttatcacagaaagtattttttgcacctagatgcaaaaattgggtacatacagtattgttatgcatttacagagaattctcaagttcataaaagaagtgtttgcaaatgaattatttagtaaaaactttttttctctttcttgataatgtatcttgcccaaatttatctaaatcctgaagcatcagcttcaaaaacagtggtaatttcttgtgcaacgggatggttacaaagcagagcacttgttcaaaggagggtgtctgaaatgttcaaaggaggttgtgcactgtgttcatacgaaaatgctcgtaatatcaattgtttttctagttttctacttagcccagggctttaagattgaaagaacgacaatagctgcaatgaccaggagtatgatgattgcgatgaacatgcacttccttgacttcttctgcagtctcttagctgtgcgcagctctcctgtaccacgttgtatatggtccacagcattttgaacctgagagttttaaactcattatcaagctaacaaggcgaaatatttccagccacattcgttaattgtcttttgagttttcagtaagttcggcaacaaaatggagggagattgcaaacctggttctctatgtcgttcaatgtctctccttgtgcgtcgacgagtgttgccatatccgcaaaaatctgacagcaggtggaagaagtcataataaagagataattagtgatatgggatatagttagtccattgattatatgagctcaattctgaagaacaaacgtgcaatcttgccaaagctacctgttgcaattcaagaagttttttttcaatttccatgactacatcatgcctttcatggatttctttaaccgtggctattatctgtaagtatgtgcaattatgaaacatttgagcactattataagaattgccagccttaatgacatggaaggaacatataatgtactggtgaagctgaacacgatattcaacctgccctctcccaattccctgaatcgctttctcaaatatctgctcactgctgccggtctcaatcaggtggtcaatcacctagtcatgttttttttttttttaaccacaatgagatcagaggagaaagcatctctcaacaccaagcgtagtagcactactgtcctcacctgatcagaaggctgctctccagtgactgttcaagattcaggtttatcaagaagcatgtgatagaatagcttgaagtaaattatactctctccgtttcagaatagaagttgttttggatttgttctaagtcaaactactccaagacaaaccaaaacaccttacattctagaacgaaggaaatatttatcagaaagaacgtaaaacgacttgaaaaaagaactccttacctgtgaaaaccatcctcgcaacgccttgtcggtactcatcttgaataatttgtcttagattctgtatgaaatgtggattactgtactgcaagctcttcaatttgttttctcatagaagatggacaataagctagaaagtttacctggaaatttttcattctttctttgagtttatttttcagcgcactgcaatcaacaagaaccaatcaaaattcacctcttttgttatgttgaacaagcaaaatatggaattgtttcttaaactttacaaatactttgggactacagtgatctgataatagacctaacaaaccaattttactcaaaatatgtcacaattctttttttggtggtgggtcaatgatcaatgtcaatcatgctgaatttaatttatcttgtcttgatatcaaacatatctgattatatcttctaaattattaaatttactgaagaaatgtatgaacaccttacatggtcattgacatccttgatcggtctacgcctgtgcccttttcacacccttgcttttttctgttttcaagattctgcaatcagaaaacaagtgagatcgtgagaactgggctaattcacatagtagtgcagattagtagacatgctaaaatccttacattcctatccatctcctccaacttcacttttatggtgcgtgtaattttcccaacttcattgatatctttctccatgcgcttgttgattgctggaatgtgtttttatttcagatgaatgcattagtatgatcattctactctgaaacttagctatatatgcagatcaatcaacagattaattgacgtttgcaacctttcatttcggaagccttagtgacggattttgattcctcattggcttcctatagttgataagaatgtatcaattctccaactccatagtatggtaatgggggaaacgtaagaaaaatattgtcatggacaattaactcttttgacaaaatgttggaaaggaattaagtatacctgaagtttgtggtttatattggacatcttgtccaacaacgtctcaatctcctgaacctaattcaacagaacacaaaatcagaagatttcatcatcattttgtgaaattagcactcatggctacaaaatcatagacaatagtgcatcaaaatcttggtgtggataaaattgttatgatacctcctggaagaaatcctcaagcccataatccgatttattctttgaattttgataccccatctcgatgtccctctccgattcaaaagaattctacaatcaagttgaaaggtcaatagtgatgtaagcaaggaaatattatggaattagcatatgtatcaaccctaacataattataagtttgaatcgtttacaacttctatgacagaaggacaatcatcagccatcaaagccctataatttgatcagtttatcctaaacttcgaaaagaaggttcaggattttgcatccagccaaattactggcccagggtgaaactggcagagaagggatcataattcataaagcagattggcacgacctatgaaaatttgttctctaatcaactgtttctccatcaagagaacatcaaaatcacaagaaagaaggaagcataatgatagcatcttttcgcagaaaaataatcgtaataatcctatgaagtaagaacattaccgtcagaagattgttcatctcgtccttgtggccgcagagagggagagagacgaagagttgaagaagagtagatacgaagaactcgtctgctgtgaggagactttggagagatcgttcaggcgaggaacgccggccgccaatgctagaaacaaataactagcagacagacgagtttagtaaccaacttaaacgcgaagtaaactatttcctctctcgcctccgtgaaacattgcggcaaaaaaattccaaatttatgattacccgatgttaaacatatgcaatatataccgcgattatatttccttagtacgatttatgaattgttttcctattaggactcctaggtttttatcccctatatatctatggtaataagcaatagttctgagccggaatccgaaatttcggtcatttcggtcccctacggtacgatattacttcggccgaaatttttcaattttttcatgaattttggtaatatttgttcaaatttaactaaattttgttcaaaattttagaaatttcggaccgaaatttcgagatttcgatgacctccgatcgaatgtcctaaaccgataaagtgaaccctagcttgaattcatcaaagtaagcaaatcaagagatgaaatcggcccataaagatcgcgtgttcactttgactcccttaattagttgtcgaatcagatctgtatccctgaaccataatatctaattaatatttcaacccatccattgttaaaaccggtgcaatttgactccctcggtggttttggagagcggtttcgctgacgtggcatctacgtggcgatgttgacgtagtctttatttcacgtggcattgacatagcgtttgtgtggtattagaatttaaaaaatatgtgtgggatctgtttatccttcaaaaataaaaattaatgggggacacctcgatgtgaggtaagcacatctcatccaaatcgatgagcagaaatctcttactagagaaaccaagccaacggtgagtatttcaacaggccttgctccggcaagaacttgtccacgtcctcggcagctgccagccacttgccgctgtctctgcagggccagcagtggcaccgccgctcctcggcgtcggcggcggcagcctggatacttgttcgcctcgtacgatctagagcagcctcgcgcgacgaacagcatccgcccacccagcgacgaacaactcctttcaagcgtatggtgcccgtggttgtcgttgggagtctccggcgactgagacgccggtgctccctcctcttcagcggcggccgcccctccccggggtgcccccacaggcgcgccttctcgacggcgggctacggcaaggatgtcgacgaggtaaacctcaagttcgcggaggcgcgagaggagatcgaggccgcctgcgtgcacgccgccgccggcgagactctcgcgaccttcgagtgatcgagtcccttctcgcccacctcctcgatctgcggcaggttgtgagcactctccactcaagatcacaagaacaagatatcttcgatggatcaacgagatcgcatcgccttcgctgccagtatatttgatctttttcgagatgagttctgttacagaaagtgtttgtcttataactctgtctctcgctctctcgcttggatagaggaatcaactactcagtgacagctaattgacaactgttacatagcccactctggcccagttacacgaatgtttggtttacgcactcgtgcggcccgttggacttgtggtttctgtagctcttcaggcacgacagtagttgggctgctggcagtagctgggctgttgacaagcccctccccttggaatttgacttgtccccaagtcagagcatttggagatctttgcttgagtgcagcttcacgttcccatgttgcatcagctgcagcaggatcagaccaacgaacaagcaattgagaaacaatacgattaccttttcgggtaactctggtatccaggacttcagctgggaactggatatttgcagttggggaaggcagttgttgctgaactgactgcttgaaccctttagaactcttcagttgggacacatgaaaaacacggtgtatggcactgccagatggaagctgtaacttgtaagccacctgacccactcgagaaatgatcttgtaaggaccaaaatacttgaaggagagtttatggtttgctcttttggcaacaaaagactgtatatagggctgtagcttgagaaaaacccattcaccttcttggaattgcctgaaactcctctttttatctgcttggtgtttcataacctgctgggctcggttcaactgttgcttgagaagttgggtcatcagtttcctttcagataaccacatatccaaatctggaatattgcaagcatcctctctaatgccaaaatgtgcagggggtaacgatagagaacctcaaaaggtgacttatcaatggaagagtgataggaacaattgtaccagaattcagccaaatggagccattcagaccatttagaaggagtagcacggacaaagcaccttaaaaaaatttctaaacattgattcactctctcagtttgcccatcagtttgagggtggtaagcagaactgaggtgtagtttagtgcctaacctgataaagagttgttcccataatgtaccggtgaaaattctatctctatcagaaacaatggcctttggaagtccatgcaatttgtaaacattcagcataaaaaccttagcaacatcaagggcagaaaatggatgggaaagggtcataaaatgagcatattttgagaaacgatcaaccaccactagtatgcaatcttgctgatgagatctgggcaaaccttcaatgaagtccatagatatgatttgccaagctccttctggtactggtaacggttgcaaaaggccaggatacttagccctgtctggcttggatagcagacaaacagagcaagaagagagctgatgctgaatggcagctttcatgtgtcgccaagagaacagagccttgattcttttgtaagttacagggaatcctgaatgaccacccattgggctatcatgtaaagcagagataatttggtattgaagagatggattatcgcccacccaaactcttcctttgtgtttcaaaagtccttgagacagcttataatgagtatgagcatcaggattaatagccaattctatcaaaagtttagttgagacagggtcctgttcatatcccttcaccacctcctgcagccaactaggagaacatacagaaatggctagaaattcagacaattctgttggcacattcctggatagagcatcagcagcaacattatacttccccttcctatacacaatcttgaattgcaatcccatgagcttagtaaaagccttgtgctgccatggagtattaagcctctgttcagtaagatgcatcaagctatggtggtctgtcaaggtctgaaattcctgaaagtgtaaataagggcgccagtggtctactgccatcataattgctagacactctttttcataagtggaaagtccctgagttcttggctccaatgccttactaataaaagcaactggatgctgattctgagaaagtacagccccaataccaaagtcactagcatcggtttctactgtggaagtttggttaaaatcaggaagtgccaacactggagcagaaactaaggcttgtttgagagccacaaaagcctcatctacctcagcagtccactgaaagggaacatccttctttaagagttgggtaagtggcttgctaatggtaccaaaatttttaacaaatttccgatagtatcctgccagacccaaaaatcctcttagtttcttgatggtagttggtcttgcccaatcaacaatgctctggatctttgatggatctgttgctactccggagccactgattatatgacccaagtaagaaatttgttcctgagcaaatgcacatttactaagtttgactttccattggtggtcaacaagtagctgcaacacttgtttgagatggcaaagatgtgatggcatgtcagggctgtaaataaggatatcatcaaagaataccaaagcacattttcttaagactgaccaaagggtatcattcattgcactttgaaaggttgcaggagctcctgtaagtccaaaggacatcaccttatactcataatgcccactatgagtttggaaggctgttttatgttcatctcctgcagccattctaatctgatgataaccagctctaagatccagtttagaaaagaatttagcaccagctgattcatccaagagctcatctatgactggcataggataagtgcccttttgagtaatagagttcaactgcctataatcaatgtaaaccctccaagatccatccttctttttcaccaacaatgcaggagaagaaaatgcactggtactatgttggatcaccccgttgtgtaacatttcttgaacttgcctttcaatttcatccttctgcctaggagtatgtctgtagggtctaacaaacactggtccagaatttggaagcaagggaatgtgatgatcacagtaacgttttggtggtaacccttttggttcctagaagacttccctaaattcctccaatagagactgtaccgcagcaggaatttcttgaaaagattgctcagtgttcttatccagttgaactagatacatgattccaccagatttagccaatccattcaattgatcaggagcaataggaaaacaactctctgtgttagaatgaatgccttgtaatctgattacagaatttcccaacttaaattccagccacttttgcaaccaatccactttcattgggctgaactgctctagccagtccattcccaatattacatcataggctcccaatgctaacagtctgaaatcacttttgaaattgatgccttgggtcaaccaatcacagccaagtatatgcaatgaacaagagagatgccccccatatgcaatcttaactctgactggttctgtcattgctttaactccagacaaccttaatccaagctgatgatcaacaaatgaatgagtgcttccagagtcgatcagcatcaacacttcaataccctgaacccaccctctcaatctgatagagtgacttgattcagtgccattaacagcctgaggtgaaatagccataagtgtatcgttttcctggaattcatatgcttcatgatcagacaacaaagtgacatgcaagacatccatcaattcctgtacaacatgcagctgaattgaagatgcacatttatgatccttgctccatttttctccgcagacaaaacaaagtaccttcgatcttctataagacttgagagctgccagcctttcagcttcctttgactgagcgacttgatcagcgcttctcctgtcttgtgataaaaatggaggtccaccccttgtagttggaggtaaaggaagtggcatagcccctttatgagagcccttctgatagctagtggtatcaaccctcttggattcttttggtttatcaccttccaaagcttcttcctgtaaaaaggcaagagtacaagcagcatccaagtcgccaggcctttggagtaacatagctgatttaatttcatgtttcaatccttctacgaacttagtgacaaagtaaactggtttaagagaagggtcataggccatcatttgatgcataatgcaatcaaactgctctacataatctgctactaatcctgattgactgattttaatccattgcctaataagagcttgttgcctatctctgttaaacctactgcaaaccttatcacaaagttcaccccaagttatcccttccaactgagacctaacagcttgcagtcagaaagcagcatttcccgtgaaatttaaggttgctaccttaacccaattacaaggatgtgtgccatatagatcaaaataagcctcacagttagccttccacataatggggttatctccatcaaacttagggcatgtcatgggcactactccaccactcagaccaacagacaccgcagtttggaaagaattcatggcagaggcatcaaaattgaaaggaatcagggagacattgtgggacacgtacgtaccattgactggggttggccttggggtaaaccccgtaacctcctcccgtgtaagattttgaatgcggtggccatttggaccggttgagccatttggtcgaacacctggtgagtccaggtactcgactggaatggatggctccagatttgccggagcgctcgccagcttctccacttgcgtttgcagcagatccatggcggactggagtacgtccatcttcttctccactaccggtatccaggattctaccgcctccttaaacgagcgcatctccagggactgcctcttctccccctcctctctcttccgctctgtttcctccatcttcttcaggagcaagtcaagtttcgccttgttctccatgatcttcgcggtctgtttcgtcacgaatcatggtttctccagggttacagatcctgtctcacctcatcccgaattcaaccaactcaagcaaggcaagttgccttttcgcggatcaacccgaaggtaatccaatccttgctcgagaatttcacggtcgaatcaagggaatccgaggatcaacgaagctctgataccaagttgtgagcactctccactcaagatcacaagaacaagatatcttcgatggatcaatgagatcgcatcgcctccgccgccttcgccgccagtatatttgatctttttcgagatgagttctattatagaaagtgtttgtcttataactctctctctcgcttggacagaggaatcaactactcagtgacagctaattgacaactgttacatggcccactctggcccagttacacgaatgtttggtttacgcactcgtgcggcccgttggacttgtgggttctgtagctcttcaggcacgacagtagttgggctgctggcagtagctgggctgctgacacaggtacgaacgagcagacccacccggtgcccgagaagtcactgaggtcgagcctgtaggtgagcgtgcccaccatggtggtctgcatcaccttctgcggcggtgtgggagcgggagcagctactcctccagctgctcctcctggagttcacgtgggcgcgtcgtggtggtgcagcatcatcatctacaacgtaagagtacaaggtggtgacgcgggaaatggtggcgctgggtcaatcacgggcgtccctctccagcagtctgggtgcctcacaaacgggcgccaccaccggccaccctttcatctggactctcgatccccgccctctcaacgcctccctctgaccctttacacaccatgttcgagggcaacttcttcctctccctcgccatccacatcaacttcggcaaccctgccaccgagcccatccgctaccccgacgaccgcatctgggagtttgacatggcacacaggtccaacttcctcgttgacgtcgtgcccgacaccgtctttgtggcctccggcgagctcccgccgcagaaggtgatgcagatcgccgtggtgggcacgctaggcgcggggggagagaaagagagagagagagagtcagataggtggcgggatgcatgtaattcagttgggttgtcaccggctgagatccgttggaggcgttcgtgacgggcgcagtgttgtggatgacggaatacggatgtcggacggggagggtaccgctaaacgattaatcggagtatggacgaataatcggaatttgacggaaatttaacgttttggacaaatatatgtacataactcataatagcttattatttttgacatataaatgcatataactacatatatatatacctattattcttaaataaaaataaggataacatgacattaactcgacatatagtaaaatataggtctgaacactcatagttgtgcatcaaatagtgataggtttggttcgtaatgcataaagaaataccaaaagcaggtaacactatataagtgacactaaaacaaggtcccaaataagatatgagttactccgaagaatcatcatcaagtgtaacatcatgagctgcgagtattttgggattgcaaatgacgttctgttagctatatagtgctaggttacacaattaatgggccagtatatatagtgctaggttacacaattaatgggccagtatagttatcgtgggctggctgggctaggtcttgtcacgtgattaggcccgtttattcggtcgattagtcagatacagctgattagtcgctaacgacggtgattatacgtcctgaaacgactaatgtgcaccgttttgctaaaacgtgacggagaggtaagcgccacagttttaacgtccgaatatacggccgtaccaaccgttatccacaacactggacgggcgaatgcctgcgaactagactcgtcggtccataagggacatactccctccatctaaaaataaatccaattctaaatataaatctagacacgcatatatatagaattagattttgcgtgtccatattcatatggagattagatttttttttttttacggaaagagcaggccgaatcgatgtagtcacgcaggacggaacagcggagtactaatcgcagcaagccgtgccacgacagattcatcggccaaatcgcctcatcaaagtgacatgatcttgctgctctgaaaatgattagctattgactccaaaagaaaaaaaatacaaaagactgattagctgttaactaaagaaggagatttccatcatatatccttaatctttacccgtgttcatccttcccaacgacatttcgtaatttcagtggtcaccaaaattttaaaatttcggaacatttttctcacgaaataatttaaaattttaactaattttaactgaattttaatatatttttttaaattacacagtgcaacgcagtcactcacaacgcacgcactcacccctatgaacgcactcactcaaaccttatccctatgagcatcttcgtagactaggtttggtcaaatccaacaaatagaaaactcaaaaagttcaggtgagatatttgcttagtggaggggacgaaatttcgaactggaattgtaagccttgaaaaatcttgattacaactgcaaacaagacaattttcactccttttgagcaagagaaaatcccttatatacccctgaaatttttcctaatcccttctatacccctgaattttgcttacttccttatatacccccaaaatttgattttgatcccttgcatacccctcccgtcagttgactgttagttgaccgtgtattttctataaaaatgaccattttacccttggatgaacaaagaaaatcatgaattacgttattaaaaatataaaagcttctcgcatgagactattatagttatgagtttgttgtgcgatgcattatttatcccaaaaaaatatttttagataatgaaataaaaaaaatacgtatttattttttaaaaaaaaggtcataaaaatgaggagcattcatataaagataggtataccaatgttcacaacatttttttttatgaatgctcctgataaaaaaatccattgtcctattaaaatttcaaataaaaattttaattttttacatttattttattttcaaaatttatgtcaaaattttctgcactaattatttagtctcattagttttataaaatgcacacgatgtgcactcaaacaaaattttcaattatttttgaagcttatatttaaacctaaagcatcaagggcaaaaaagacatttgcaaccaaacgtaacagtaaaatgatggaaaatgtaacagtaggggcatggaagggatcaaattgaaatttcaggggtacagaagggatcgggtaaattttaggggtatgaaagggattgagtgagttttcaggggtacacagggaatttactctttgagcaattcagggatttctcccccttgtggtaggcttccccttcgggactaggatcccagccttttcgctgtcagccgaacgaagcctcaggggttatgcctcctggtagtccctagatgcttccctagagagtaatcgagccgccgtgcgaggtccttttttgccgctgtcctaaacccattgtcgccgtcaaccatggtgcatgccgcctccagccaccctcggctgtgccgccaccactagaaggtccgtgaggaccccctccccctctagccgccccggccgagccctgccggtgagcctgtcccgtgccgccgcacgctctccttctttctgccgttgatgggaggaggaagatgaggactctgacgtaaatatgaaaactctagggttcatactataaaatactgagacacggacttgtgaaccccactgtttaaattaggtgcgcaatataggaatacaccttcacagtaggaaaacattctctggacagtacgctttagttcttttgtaaataaattaataaatccaagaaaaggttttctgttaattatttttgtatgctttagttccatccctggtgccgacaaggtgggtcccacatgagctagctcgttttatctttgcctcactagaacggataccctcatctcaatcgggcggtaagccccatctcaatcgagcacagcgtccgtcacaggctagaagtcactgatgtgaagagttatctcaatcgggcaaacggccgtcacgaatgaatatatctcaatcgggtcctaagtaaagcccgtcaccgatagctttgacccagacgaccagtcaaactatagcccgtcacagatgacctatctctatcgggccacaactagcgcccgtcacagatgactactaacctttatcgggcctaaactagagcccgtcacagatgatactcaactcaatcgggcctaaactatagcctgtcatagatgactgatgacctcaatcgggcctaaactagaacccgtcacagatgactgctgacctcaatcgggcctaaactagagcccgtcacagatgactagtgacttcaatcgggcctaagctagagcccgtcacagatgatctcatctcaatcgggcatttagttatggcccgtcacaaatgactataatccacaaaaaaaataaattttgttttttggctagcctcaggcctttgctagccatgcccactgcaaaaatgacagaaacaaacacagatatccaatatccccagctccccagcatcacccattcatacatatgcattcacatacacagacatcaacatattttacacaaccacacattcacagccatctcatatttcacatccattcacatatttcacatccattcaaatatttatcatatttcacctgcaaaaccgagttaattggatcaaatatttatttagcaagtcttaacataaacatatgaaatatatacataaatataagcatcccagttacatcaccacagttgcataataagtgttcatcattgcctaaacatagaagttcaacattgttcatcattttagtttaagcctaaacattcctttggggttaattatttcgcggaggatgaagctggctatctcctcgcgaacctcctcaaagctggtagtcagagacttggttattgtgccctacattgtcataattctagattagttgatcgatcatatataagtactaaaatgtagttagtctatcacaattgagaccaccgacctcaaactcagccaaagtcttcaccttttctctatacagaagtcgcatgttgtggcacacatgtaatctgcactggtcacctatttgttgcttcaccgggaagtcttttttgtggatgagggtgtcatgtcctgtcttcctgaggcctcctctttgcacgtattgggcccacgcttcatctatcgctagttgaattgggatccaattatatgcgttcttatcaattctggagttcaggtaatgacatgtactccatttaggtgttacgaccagaaggatccaatgggcactgcggcattaatatagtgaaagttaattaagtactcaaggaatgtgtcatgctgttgtgtatatttagttaacacacttactattgattataggcacacataatgtactccttgtctcggcgggaccacaaggtgtcatagatgtagttgaccattccttgacggtcattctggagatttgtgacagtgaccacttatggatcaaggaaggcaacttccggtgcatgcttctgacaccattgccaacttaacctacacacaggatcaacgatcttgtaagcaagttaaaccgattgttattaccagaatgagttgggcgacaatacttacaaggagtagcacttaaggaggcttgtgtccaccgctcggagcctatagaggtcgaaaagatccttgaagtcgaccacgatataatttgttggaccaaggaatggctttccatcgtgctgtccaaggatatcggtagctttacttagcttcctggcgttagatttctccatgtagtataagtgaaggtccttacaagtggtgcccattgcggcaagcatgtcatctccaaccaatggcatgcctagttggaactcctgtggagcgacgtatttcttcttgacctctttgcccttagtctcttcctggcccttgcctagatctagctttcttggagctagaagcgaggcctgcacctttcctccccttcctctcccctttgcttcgggtttatcgagagtaattctctgaggggaagagtgtgccttcctgctcttcttcatcggtgggggttcatgaatcgccttgctgtcggcctctgttcggtcctccccaaaatccgtgtcgtactgcaactgcacatcgtaagattgtgcatgacgattttgagcaggaggggctgaaggagcagaggcaggtctctttggtggacgaccgcctggtgcagtggttggcctcgctgtaaccctgatctcaatgaggtccttgggccattggatgaaggtatcacgggcatttcctagtgagaggacctcgtcgttcggtggatacttcagagggaacaactcgtattcgggcttcaccgagtcgacttgaacttttgcacagtcggccctgagttgagctccatgcactcttgtctctgggatcggcttgtacgcaagtccctcggctgctggaacagtgaaggtcggcatcaccctaactgtgagggtgcagctcgttggttcctgcgatagattaatcaattttttttagaatattatatatcatatggattcgttacgtctttcatgtattgagtaagttcacggttaccgttatgtggtcgacggcgctgtcgaccgatgttggattttccgccaactcagttgatgcgcaactgctgcgtttttcggtgggacttcctaactctttgtgcgcagcagcagcggcggcctgggggatctgttgctcttctcggatctcttgcctaatcttggccctcatcgactcgagcttttcgtcgaattcagatgtcagctcagctcgtatcgactcccggatcttggcttcaaggcgtgcatctttctccgccttgttcgaagtccgcttcttgtactgccacgcgtagtctggaaatccatacttccagggaacagaagacccatcgccccgtgtccgtccacggtgttccttgttacccaacgctttcgtgaggaggtcgtcctcgcgtctttgagagcaggcctcttgcgaggcttgttgctcggcaaccaactccttctgcattacaatttagtggggtcaaataaactgcacgatgggaaacaatgagaacatctagtttgattagacacttactatagcttcgtatactcgttgatcttctgcatttggcatgaagattgtgccatcatcatgtttctagtacctagccctagcccagttcctagcccgagggtgtgggatatcgccaaacacgagcggtgtgcacgattcctccgcttcttcatcctcacgctgccattcctcttccttaccggcatatccagcggtaccaagccggtgcggatgttggttcctggtctggagcaagcgatatgcctcgcttctagctctggactcgggggtcgacttcttcgcatggaattccgaccagacctgttccgtgatccaaggaaatttgtctcttggatctggatttgccgggttgtagacgaactcgccgactagcttagtcttaaagttcttccaagcagtgcccataaccttgaaagcagcccgcctgagacggtcctcatgctccgcaggataatcaaagctctccttgaacgttagccaagcaatgtccttctctgcggccggcacgagcttgaagtcgtcttgcagaatactgaatttctgcctccctatgaccccgcagatagacctaaatcggctcaatattttccttggagctgtcagaaaccctacggcgtccaccgctgttatgcggaaccgttccttaggaattttgttccctgtcctaggagtacgtgcccttgaggacccactagttgtcgtcgacattggttcgccttgctgagacattgtctacttttttccaaaaaaacaaaaaaaacacaattgagtgctacaatctattacaatgaattgaatgtcacttataaaaataaatgaaacatataaataaattaaattgcgcatatcacaatgatagaatgaattgaatggcacatataaataaattaaacatatcaccaaatcctaaaatcataaattcacctcataccatctattcatccacatatcatgcatctatcactaaattgattaatgcaccacattccatctattcatcatcatgtcatcaataaaaaaaatcattcgtttaccatatatcatcaatccctaaaatcatctatcactaaaatcatctatcactaaattcattaatgaaccacattccatctattcatcatcaagtcatcaatcactaaaatcatctatcactaaattcatcccaacatccacatttcatcccaacatccacattttcattatcaaccacatgcaggtagcagagggaggcgcgatggaggactcacatgaggtcggccgggtgggctcggtggtggcggcggcgggctcggtggagggcgtcgccggtcggtggaggcggcggcgggctcggtgcaggcggcgggctcggcgaaggaggagttcacggcggcggcgccggtcggtgtagacgccggtcggggaggtcggcgtcgggcgggcggcgtcgggcgtcggtgaggagtaggcgacgacgatgaggaagaacgtcgccggcctcggtaggggctgttgttcgtgtcggtgaagaggcaagcggcgacgatgaggaaggccgaccccggtcggtgtaaaggctcggtggcggcggcggcgggctcggtggaggcggcgggctcggcggcggtggcggcgggcttggtgacggtggtggcggtctcggtggcggtggcggcgagggaggacgacggcggcgaaggaggagttggcggtggcgctagggttctaaggaggcgggaaactgtagcgggacttagaaaaatttttgatccgatctgagaaaccctagttatattagagtgatgagtcatctcaatcgggctttgccgtagagcccgtcacagatgactcatcggtgacgggctccatactaatgcccgattgagatgacattcaggcccgtcacggaagactcatctgtgacgggccctaagataatgcccgatagagatagattaatctctatcgggcttgaactaaggcccgtcaccgatgactatttttccatttcccagataagtctttatatttgtgagtacaaaatatatagctgctgtataataattcattttattagtcataacacattttctgatagtaaatgatttcaaatcgaaatatggtcaacaacaaaattgatcctctcatcaagatctacaacttttattttggtcatttatctatataattttgtttctaacagcttgaaattgattttaacaatatgacaaatgtaaacagcatttgtaaatattacatgactttaaatgggaaagccataaacagctaacttgtacagctaatcaagatctgtaacttttattttggtcacttcttcatccgacaaagtgatagtaccaatgtttataaaattgacatatctgtgttgatatttataaaccagatgagagaaatgtgatttttgtgaataatataactatcactttatcggatgaagaagtaaccaaataaaagttgtagatcttgatgagaggatcaactttgttgttgaccatatttccatttgaaatcattaagtatttacaaatgatgcttatatttgtcatattgtcaaaatcaatttcaagctgttagaaacaaagtt

SEQ ID NO: 14890 - DNA, 8008 bp, Oryza sativa
tacgacaaagcccgattgagatagattaatctctatcggccgtaaactaaggcccgtcaccgattactcattttccatctttcatttgttgtgagtgcaaaatatatagcagctgtgtaataattcattttattagtcataatacattttcggatagtaaaagatttcaaatggaaatattgtcaacaacaaagttgtagagcctttcaagatctaatatttttattttggtcattattatatataatttttttcccaacagcttgaaattgatttcgacaatgtgacaaatctaattaacagcatttgtaaatactaaatgatttcaaattgaaatatggtcaacaacaaagttgatcctctcatcacgatctacaacttttattttggtcatttgtaataaaacaaaattagccatattaatgactacatatatcaagtctttgcaataaaacaaaatacttcattcattacaatagataagtacaaatgcatcagtcacaaggttatgccttcggtataatctgaacgagcatatgccacaggctcttggggatcatcgtcaaggtcaatgtgaggtcttacatgaagattatggttgtattcttcttcatcgacgacgttgtcaactcatacaattcggcgctttccatccctcacaatgtgcatcttcttgtttgaagggtcttttatgtagaatatctgctcgacctgtttcgcaagtacaaatggttcatcggcgtatcccaccttagatagatctactaaagtgaaaccttccttgtcggctttgacaccagtgcgtagattcacccaacggcagcggaacaaaggaaccttgaacttgacgtagtttagctcccagatctcctcaatgcggccgtagtatgtgtttgacccaacttgatcctagaatgcatctatacggacgccgctgttttgcactgtgcttttgtcatcttgtttgacagtgtaaaatgtgtatccatttatatcgtatccttgccatgtgtctatggtccaagacggtcccatccccaacaactgtactgtctcatttgggacatccgtggacattgtcacacgattcttgaaccattcgttgaaccgagaattatgttctctgttaatccatgcatcagatcgccccaagttctcatctcggattttcgctaagtgctcctcaaagtatgggccaacttctaccatatgttggagcacagcgtaatgagcctgcgcgtacgacgcttgatcgggcctaattcttttccttccgattgtgccaacacctgacaaccttccctcatgacgagacgctggaactccgataggatcggcatcggacatgtaattgacatagaactcaatagcctcctcggtcgtgtaaccttcaatgatgctcccctcgggtttagctctgttacgaacgtacgacttcagaactcccatgtacctttcaaacggccacatttcccttagaaaagccgggccacatagttttgtttgcttcaccagatgaacagggagatgaactattatatcaaagaaagacagtgggaaaaacatctccaggtgacagagggtattcacaatatcggtctgcagcctatctagatcttctggatctataaccttctgtccaattgcattgaagaaggcgcacagacgttggattgtgtgacgcactttcggtggtagaatgcttctgatagcaactggcaagatttgtgtgattagcacgtggcaatcgtgagacttcattccaacaagttttagatcgtccaatttaacatacttacttatcctcgctgaatagcccgatggaactttaatatccttcaagcatgataacattgcgatcttctcatccttcgacagtgtgtggcaggctggagggagttacactttacctgtctctgcatctcgtatgggctggagttcgctgcgaatattcatgtcctgtagatcaaggcgtgcgttcaacccgtcctttgtcttcccgggaatattcaacatcaggccaaccaaactctcacacacattcttttctatatgcatgagatcaatgcaatgacggacatcaagatctttccagtaaggtagccgccaaaatatggatttttttcttccacatacccttctcctttgtcttgttacgttttcttttcttcccaaactcattgcttatgtccttgaccatattgtggacctcatctccggacaaatctttgggagtaggctgaagttctctcttaccattaaaaattttcttctttcttctaaatgtgtgacgtagcgggagccacctccggtgacccatgtataccatctttcgtgatttcttcagccaccggcttcgtgtatgttccttgcaatcggagcatgtcttctttccttttatagtttgtccggaaaaattaccgagtgcagggtagtcattaatggtgcagaacaatagaactcttagcttgaagttctcctgaccatatgcatcccaagtttccacaccttctttccaaagaatctccagatcgtcgataacaggctccaggaatacatcgatatcattgccgggttgccttggaccttggattaacaagcacaacataatatatttccgtttaaagcataaccatggtgggaggttatagttcgcaataagaactggctaagtgctgtgagtactactcatgtcaccgaaaggattcatgccatccgtacaaagacatatcctcatgtttctagggtcggcagcaaagtctttgtgttttcgatctatattcctccattcaatcgaatccgctaggtgtctaagcataccatcattccttctttccgtggcatgccaacgtactaacttcgcttcgttcaggttggcaaagattctcttgaaacgatcaatgataggtagataccacacaacctttgccggaccacccctctttgacttatttccttcgtcagcacttttctttcgcttgtatcgagaagccttgcagacaggacaagcatccaagtccgcatattgcttgtggtacaatatgcagtcgttgggacaagcgtgaattctacggacctctaaccccagtggacacagaacctgctttgcttcgtatgtcatctcgggcaatgtgttctcaacaggaagcatagccttcaaaattcctaaaagatctgtgaaattcttgtctgtccatccactacttgccttcagcttcattaggtccaaggtaactgacaacttagtgtgttttgctttgcatccagcatacaaaggcgtctcggaatcacttaccaacctgctgaatttcattccatctctctcattctgggctgggtcctcaacgtcacgtaacatgtcttgcagcagatcgtgatccacatcaaccatttcaccgcccaatggagaaggtataaacatgtcatgctcattttcatcttcctgattatgcgcatcacttctgtctgctgctgctccacttcctgattcttgctctccatgcttcacccaacatgtatagtcctccatgaatccttgttgtatcagatgaccgtgtacgtcctctccgctatcaaacatattctcgttcttgcaatctgcacatggacaacacatgtaatcactgtttcttcttatccgatcctcctccgcggcgttcataaaatttattacgccctttcggtactccgtagaatgacgtttcaaatttttggcatacatccaacttcgatcaatttctacaaaaaaaaaaaaacaaattagaggcacatattataagatcagtattgcaaaagtaagacgtgatgaaattgctcaattaatgatttatattactcacttgattgatccattttgatcacttttgggaatttaatttctgttttccttggaaaaaggacaaaaaatcgccccctacagcctcccaccaaaatagtgaacagtgggatacagttacactaggtggtgggggtatttatactgtgcaacaaatatctgtaacggccctaaaacaatcaaccgtgacaggcatacaagtaatctctatcgggccttaataaaaggccgtcaaaaaagagtgtcatctatgacgggcaataaacttatctcaatcaggcctctagttggagcccgtcacagatgaccctcatctgtgacgggcttcttttagggcccgattgagatatggaacccttatctcaatcgggcctcaactatagcccgtaacagataagtgtcatccatgacgggctttagttttatgccgatataccatggctgtgcgaccatatctcaatcgggcgaaacttcggcccgattgagattacttccttgtgacggcccgcaaattctagtcttgttatgggccgtcacagatggaaggatctgtactagtgcctgttgcaacacacgggtattttgcattggattggatcatattaaaagaaagtgctcatataagttaacatacttttgcaaccaatagtgttaaaatattcctatacgtgcaaaagttatattcgacaagcgagttttaaccgctttcttgtgtgtactacaacccatgtaaaatataagttcgcaaccaatggtgtcagaactatcaagcacatatgcacaagagtggtattagaggggtttcaaaagattttgtacatacaatatgattttttggaaaaagtacaattaccttcgaaccataaaactggatattttggaacctatactatttataccggacgaataacttgtgacacccagagcccaaaaatgaccctatactatttaaaccggacattttgcactctaacctatgacaccccggcccgaaaacggtattgggtccatcttattagttggaccacaccttttataacatgtgacacccagggcctaaaaatgatattggatatttagcgcgctatagtgttcacggctgctagcgctgcttctagctagcttgctgagctgcacgcatgggccaagggccaaggcctgctgctgcttttgccctttttttccctccttttcttttctcaattatttgctgggatgttacataactcccccccaccccccatcattgctttgagcagttttgataaaaaaacttacatatgtgacgtcaacttggcaatccagttaggaaaaacaacaataatgaatttgtagggtccacttgtcatctcttttctcctctctccctctttcctctcccctctctctccctccctctccagcggtttgttgggagcaacggcggcgatgatcggctggaggaggcagggttccagatgagggcagcggccagccagggacaaggctaggaatggggaagttggctggtggcggaggcgttctgggcagtggcggaggatttccggggtggcagctagtgcgacggtcgacggcaggaccacgggcgacgatgcaggtgcctggtggaggacgggctcttgatagaggatgaggcagggcggaagtggatgggctctgtgatgtccatcttctcctgctgacgttctctagctacgcttatgccaccgtcgctatggacgccaagcttgccgcgctcttcccaacaaatcggccacatcacagtggaaagaggcggcggcggcagtgaaagagggatggatccagcttgctcggcgataaggagggggaggggaggaagggagcggtcgagcgcccttcgacgatggtgttgttgtgccggtggctggtggcgaaggcgttttgggcaacggctgaggatttctagggcagcagctaatacggtggccagcggcaggaccacgggagaagcaacaggtgcctggtggcggtgcaagtatatctagctgtagcttgtagacaaaggatgaggagagagcagcttacatgtggggcccactagcttcatataggagggatgatgaggtggaggctgacatgtggggccggtgccacgtgtgcggccacatggactaaatccgctccggattgtgctaggggggttatccatcagatctaaatagttcagggtttaaactaaatgtccggttttgtgctttaaggggtaattcggtcggccgcgatagttcaggaggtaattcaaactttttcctaaatttttcttgtatgcggaaaaaatgacattagaggagtttcaaccatttccttaatgtacgtaactcactaattattaatttcaaatttcaaagtcagattaacagaatgttaaattgagtatgatatgatacaactccatatttataaatttaaaaatttaaattattatatctctgaaaaaaattataaataagtcaatgatgcctcccttagtatgttttatttcgctaaattttacgcataatacctaatttcacaaaggatagctataccgcctaacactcagactctgctcacccatcggcttccaccattgctgcagagtgtgtgcgtcctcgtccttgctagtgctcttccacagcctcgccgatggtagaaggtgcggttgctccttctccattccgaacatggaaaagaacatgtcgcggtacgacaacgtcattgctgacgtagcgactgcacggaagcgctcctgcacctgctgccgttgctcgaagtagtcgatgtaacccttgcaaatgacatccctctcgtgcacgtatagttccggtgcccatggtgatagccgcttgaagaggttctccatgcgctccttgtggggattcaagaccttgcccaaccctgccttcacgaaatagctcacggcatatatgtccctctttgccttttgtgccttctctatcggtagcagcacatcgatcgctggagtcggtgacacttgtggcggattgaaaaggaaggtcgggaggttgtagccttgctccaccatcatggcacgccccacattcagcgcaagggaagcaccaagcgagtgtcccgcgagccaaacaatgcagctacctgcagtgccatgggcacaggcgcctcccatgcccttgtctatggtagcaacaagctttttaaccgcggtgtttgctaggcgggatcgcttggactctttgagggtgttcaccatgatcttggcgtcgaggtacagatcaatgagcgccttggggtgtgacatcatggtgccacgaaaggcgaccacatagtgagcagacagaggatgagcgggctcgccaagaggtggcacatgctcgtatattgcgccaataatggtcatcatgatcggagtcatctcgaataacatcgaggaggttaaacccgagagttctcccaccacgggtggcgcaagcgcattggtgtgcaccctgcgcctagtactgtcattctctatgatgtagacacctttgacaaggcaggcagcgacgcaacggcggtgctcctccttgcccctgcgagtacatatgcatggtcgatatacacatcaatttatatagaatcaattgtactttgcaccggataaaatgtatcttgtttcacttttgacgggtttagtgcatacttttactttgcatcagagagtatagtaaaataaattttagttttactagtttgtgttatataactggaaaatcttgtaaaatcacgagtgaaacttacaatattttttttgaatttataccacttttcacaaagtttcatcgtatttgatgatttatatcctggtgcaaagtaaaacttatttgaaggtaatctggtgtaaactgaaagtatatgctaaatttgatgtaaagtgaaactaggtgcgctttatctggtgcatgcaaagtaaaatttacacacctatatatgttttatgtttcacgatgatatccactattattgttttgctatcagcatttttacaaataaaagtgatctatgtggtagtcccttggtttaatattatatatgtagttttgactttttcctaagtcaactttttataggtttaactttaacagaaaaaaatcaaaacatctatgtaatataaatagttcatcagataagaaaagctaagaagtctaggttgct

SEQ ID NO: 14891 - DNA, 16446 bp, Oryza sativa
  unsure (1)..(16446): unsure at all n locations
agaccggccaacgagacaatgttgttgttgctgttattttcatcggtgtgcatgacattgacctctccttgtccaccagctgactattacttgatgaggacatagatgccccttgaattcggctgcacgcggagtttgctcatgcagtcaattctcctcccttgtgttcttcttgcttagcacaccacgagcttagcatgcttgccacccatgtcattgtcggacgtagaacatttcctttatagtacggcaaatggttgcttcgatgaatgtagcccaatcttcaaatcttttagcttggcctcttcggctatctcttatccttttgtccatcatatcatcgtatactttctcacgttgacggcttgcctccctagcctcaattgcaaccaggaagtaaacccatgtgtgacaagcattacgtcgctgacgtcagttctttgatgacgaaaatgatccttgcatagaaggacgttgaacaagagtgatagatgatacagtgttagaaggaaccatggttggatggacatgataattacaggaagcagtatcactcgactagacagtcggagagaatattcgagtcaaattatatggagattttgaaaaatccccatccaattctgatgtaccaacataatgatcgacaaaaggcacagattacaacatccttcccacccctattacaccaaattatgtggaggcttcatgatcgtcgtcctcaggatgtgtacattcagtaaacgcctgggctagatattggccgctaattgtggtgggagggatatgtgtaatcatggaatcataaccctcagatgcatctggtaaactgaagctttctcttggctgacggatctcccttgtcacttgaagaaatgcctttggaagacttccgcttcctactgctctcaggttgcgtgagggcatggttatctaccaaattttcacatgctggtgtgttgttaaccaaaataggttgtgacgaagagcctagagtaggatctacagaaaaaatgttctcctgctggaaccaaaaaaaaatacataagacggatggactaagtcactaagggtaaaaaaaaattatacaatatattacagtacgaaaggagggtacccggtgtggttgagctatactccgtatagctagtctccatgttcaagaagtcatataatattttcctccaggggccaccagcttcctctgctgcaaccttgccaaatgtgatgttggcatggtcattgggagatatgcgcaagatccatacgatgatagtggcctagaagaactcatgcaagacgaagatgccttggaaaaatcggtaaagaattttctggaatgttttaagagtaaaaagtttagatgaatgcttaaattatgtgttgcttttgtgccggattggtggttatgaatgatggcctaacatagcacttagacttttggtattgtgtaattatggtagtacatgagatcatgtggttataattagtagcctgaccaagtatgtgaaagtaggtaaacttttggtattgtatatggaagcatgtgtaattatggtattacatgagtgcttatgaatggtatcctgcagaattattgtaaaatatgatggtttattgtgctcaatgaaattaatattgttcctaacattacgaacaatatgacgatgatggatgcaatgcttatcttacattgccatatatatataatctgaagtttagctagaaactcaaacatgataaactttccacatgacatgatttactcctaatactgatattacattgtcatatatacaacctgaaatctggccaaaatatgaaaccatgataaatttcccacattacatatttcaaaagctgaaaccatcataaaacttcccacattacatggtttgttgcatttacttgctcaacactgatcttaacttatcacatatacatcctgacatttaaccaaaagctgaaaccatgatattgctttcccatattgcatgatttactgcacttggttggctaatgctgttgttaccttatcatatagctcaaaatcacaactaagggtattggggagaatgtctagacgctctagactctctttacccatatgagggatcttgtatccatttcctccatcagctttcataacctctaacaagcaagattgcaatgttaggaacaccctatttagcttgttgtcatcataggcctgaaattcctgctcaacattatctattaggtcatccatattcttggatatccttctatatgttaatgattgtagagacgcaaaaaaacccaagatctagcgcattcatatctggggaatgaggaggcttatgcatgagtcggatgtcaaaccctgtttgggaaactgcataggcaaattgaggatcatccactaggacatgagagggagcattatcctgctgaatccatatagtgttgtgtgcttcttctggagaccaacttgctataatagctggtaggactttagcaatcagaaatgaccttacggtatctcgatcaaccttgattgtcttgttgactagagtcccccttggtctattatgacttgtcctttgcgctggttcctaagtagcacaataatcaagttagattaacaattaattttcagatcaaatcacaaagtaaaaatgcatatataaagaggttatggtacctttctggtgaaaggccacaagcctatcttgccgtcaaaagtgcagataccttcttcattgtatctgggcctagcaactgctgccaagaacatcactgtatcgatagaatttttgttttggacaggtcggtatggatcatcctcccaatggaccatgtaaatggttcttgtccttttagttgtattgaactatttttcatctatgtgcacaatgtttcgcatatcaatgaacttgggttgatttggcaaagtatgccaatctaacatggaaagacaccaccgcagccttgattatttattctcttccttcaacaatggctttagtgtatttgagtgacgtcttagcagcccttctttcaacatcctatgcagtgtgctctttggtatacctgaggctgatgcaaataaccgtaaagtgcctctttgttgcaagggaacattagcaacatctgttaggttgatttctttctttttgcgaccacaattcttttttttcctagaaattacatcaattggtattccctgggcacggcattgcttcactcttcgccaaatagcttgcactctagcccttttcacattaaacattgctgcaacttcagttgtagcattttttctcatttttctcaggattccattgttagtttttccagtcaatgctgcatatatctgttgcctttgaattttggtcagatttttgttttgatgttcatcttcctcatctgaatcaaccaactcctcttgttcgaaaacaacatccacatcacccgcatacacgccgtactcttgcatgtctacaacagcaattataaggttagtcatatgtaccaattcagaattgtaatattttattgtcattgatcaacatgcttgcaaaattatggcataactttttaggttcaccacatggttttatttgtaatatgatttaaccgtacatatcacatctaagagggacagagacattgacacaatttagtttatgtgctttcttttagattactgtggtagtgtaccgattgacatgacaattgtatgtaaatacaagatatcaatgcatttattggtaaatctcattattctttgtgatttactatgtgctgaaatgtctaatttataatcctgaattgttattgcaactaatacaaccaaatgacacggttggactattgtaggtagttggcatgatataatattactaacttctaattaaaaacatgatttcagataaataatattattctacaacctttgggtaaaaccacattttatctttttttttgtaaatctgatagtcatgtcggttaaagggcttacctagatggtattgtaggtcttcctcattggcatcaaagttgagatcaaaaggaaaggcattatggttgtgacctccatttacttgcagaacttgatccatggcatcagcatcgtctacaataacaaatatcatgtgagtaccatgtacaaaaacaatactttttgccatgcagattattctatattgatccatggttccatatttgatgtcctgttgaattatgtgtccttttatatgacaaaggtttaattggtcaaagacatatccatctcagtagtagttatactgatggaagtgctcatgattatttttccccaaatgtgttacacatttcttatcaaatcttccgattgtgattttatcttattttgctggtatactgatatttgggtcatacatgaatgagttgtttgtttctgtacaaactttcgtgctgaagtttagagctctgtgtacaacattggaggtacaacctaactttcttttatagtactagctgaaattatgacattagaaaggaatatatataaattgtttgcttattattccagttcatgattttacacatagatgaaaacagtgctcatgctttctgaattctcatgtttattcctactttatattaagatgatgttgcttgagctacagacaatttaggtcaataccagtactataaaggaaactatccatgcagaatctagcatatctagaatctagtataacctctgatattatggaagggaatgaatttcattatgctcaactcttgacagaattgagttggtaaatatcaaagaaaaaaaatcaagtcctaattgttttctcaaacttatcaaagaccaattttgttccaagaagatagcaattgcatcaatgcacatgttatagatcatttttacagagaaatggcaaagattttagagtgatttatgcaagccatatctacaaagatcaattgttttctattcatgtttacaaggttacctagatgtatttctccttggtggtcagatgcatacaagttgagatcaaaaggaagcacatggttggcacctccctggaaatcacctccaggaagctcatggttggcacctccctggagatcacctccaacctggtcatcctcctgatcagccactgcttcattgaggttaggtacagcatgttcatctccatcatctaatgctatatttagatctaaagccatggatgtgtttttgcagagatatgaagggataaagtgggaaggaaagttgtgtttttgcagagttatgaagtgataaagtgggagggaaacttctgatttgaaacttgtagggtttgttgtggtggggtgtgctaaatttgtattacatcccgccaatgaagtggcacttaattcttcattcaaattatttggcaccttggcgccctatgtctgcctgtgtgtttgagtatggagtactactcctgttttattaatgtgtggcagtagtaatactttatttgtacctaatgattgggtgtactagtactgagggtagtttagccttttgctctttgtcctaaaactaccttgggcttccaggaatcccttctttctgggacggagggagtacttgtatgatacaaaaatctcgacgggaaagcccatgggcaataatgactctgtccaccgccagattttttctatgctcaagaggcactccaccacatacattaccatgaatgagttgattaaaaactcaagtgaatggctcaacaaatttcttatacaaccagagccaatgcaccatacaactctcgacatgggtcttgttaggaatgagaggtagaaccaattctgccgagcataaaaggatgcatccaataggtgcaaggaaccccaaatctctctccattgtacaaactcgctgctggtggatatggagtgacttgatcaagtctgaactgctaagccacccgatctgggtgatagggttcagcgaggcataggtcaacatgcttaataggaagcaaaccacactgaacagataagcaaaacatgcttatttaaaggttggtttgtagggataccaatggatgttggcatctttgcataaaaatttgaaggcttcgtcaggactgaaacgcttgggggttctaaacattgtgttcaccatcatggatttccgagaaccatgaataaaagaaggggcatgtggcttattcactttatcaccaaagatacttttcaaataaactcccatccaaccaataataaaatgaacaggccaacacctcttataagaaggaccaataggatttgtgctgagcaacctcaatagcataatgaacatagagcaggttgagttaaagcatatcggcgcccaccgccacctcccatcgggagcctgccgccagccacggaagccctccgtctcccctccagccagatctggcagatgatgaggacatcaacaccatcgatacatccacgtctctgcaagtacgacttgatggtcctattacccgcgctcgtgcacgtcaactcaactatcaggtgagttctttcttgagtttatgttcctcttctttataccccggagacgcgtgcactcttcttttactcagtaacgatggagaggatccaaaggggagaggattcgcgcggggtggattcggactacaggacaacgccaacttctgacggccgccacgacttcatgcgaactccgatttgagcgtgcaagtacttcatggaaagcttatcaagtctactttcaaatggatctagccatatgtccatatctgttctggagcggccacaattatcgttttactcccgactattttctgtccatagtgttgcgtcacctcttttggcccaatgggctgtgtatcaggttgggcccattaggggcgcatcctagggttggagcacgaccctgtagtcattcttcccctcttcttatacctctaatcaccgccaagaacgctcggtttttgatgatagagttagctacttgctacctgctcgcagcgcgcgtgttggctaaaccgcccgtctgcctgtaatcagaaccccgccatattgtgtttttcatagtgaagctttcatcttcatctagcaattcagtgcttgttctacttgttcttgcttgttcttcgattgcttgcaggatgagtgccctcgtggccgggttgacacacaccacaaattcgcagcaaccattagagacggtatatcggttgctaaggcgcagcgtctttggacggttgtagtcgtgccatgaacgtcatcttcatccaatcgagttatcccacacctctcatcgaaagatcgggcacaaaccctagcgggttcacatcagcagaggggagggtgccaccacccgtgaggagctcgccgccggctgcaggaacccgccgcgtcccctcccgccaaatctggcggaggagagcctaccgccgcccacaggagcccgccaccggctgcaggagcctgccgcctcccctcctgccggatctggcagagaggagggcgtggccaccaccgccgccagtgccgcctccgctaggcaatcaccgcaagagtaaggggagggggagagacgcgagagaggggaggcagagagacgagagaagagagagcgttggatgggtgggtagggcgctgagcggagtagagataaggacgacgttagatggatgggtggggcattgggcagagtagagatatggacacagttgatcagctcaccggctcagctttgtttagtataggcgccacttttttaaaaaaaaaaacagtacctataatatactataggtaccggttattttaaaaaaccggcacctattagtataagtgtcggtttttcctctattaccggcacctatagtgttcaaaggtgccggttctatatttttccatgacagggaggtgggaaaaggcccataggctgttccctatgaggtatgttgtagtagcgatttgagcctaccgaattgagatttgaatcatggatttgagtatccaaaagatttcaaatgaaaaagctataacctataaaattgtagatctcattgagagttatagttttcatatatttttttcccgaacagtgtccatatgaaaaaactaagttaaattataagatggcaattttttattgtgacgaatttattgatcgtggcaacagaaaatagtgaaaaataacttacgacaaccatgtacttaacaaatttccacaaaaattaaaactatgacgatagaacatgtattttttgcaacaataatatttctttgtgatagtttatttcctattgcaactaaaatatcaaataaaacaacaattataaatcattgcaagaatatacagttatttgccgcagaaaagttatcattgcaatagtacaatatcttacaatgaattatttttagttgtaataattgatacttcgacgactttggttatcggagataagacccgatcagagcatgttctctcttagatcgggttcttatttaccgtagaataaaatatgataaaaaccacgtaattaacttcaaaattaagcactaaaatttaaaatttaacttataagcaaaactctaaccgaaaatgatggggatgaacgtgttttagtgcccgcctgctctctgtgattaaaagagaagtgggcttgctacccagcgcagctttgtcgttggcaccgtagcccgtgggtctacctacattcacctaacagggctcagcccatgcgatgcaactgaacgtacggtacgtactgattcctgaatattgtaggagtaggagcctaggaggcctcgttcgatgtgttcgaatgattctattttctgttaacacgttactaaatgatgtattcgatgtgaaaattttttttatataaattcctttaaaatatcaaacaaatctattatttagatttataattgttaaaactcaattgatcatgtgctaattgatttttcattttccgttttctggctacatcttcatcttcgtagagaaacgaagaacaccactccactcgttgatatacgataggatggtattttgtgtaatttcggcttatggtggaattataatgcccaaacaacgcgctccatttctccatttctttttagccgatcgctgcacctgacagctagcagggggcatgatgtaagatggacgaacggacggacggacggacgggtgaaactgatggaccctgtattaaccctgtgtagtagtatccctcgtcacgtagcttcccagggatccagcaggagacgtctacacatcccgtcaccatcgccatcctctccgtcacataaaatactcctcctactagtactcctactcagcgcacgtacggtgtatagagaggaggaggaggagagggcatatggtgacagggagggcatggggccatgggcagtagcatggagaagtgacggttggaatcgacgggcggatggacgcatgcatgcaaaagccgggcaagggaatcatgccgtgccagccgagctgccgcagggggagaggccccctccccggtagacttttttaactcctccgcctaccaaatgctacaactccattctcctatggagtagtactaccctcaacagccggcaggttcatgtcatccatgatacatccatagaccatacaaaacccatccaccggataaacgtgccctctcttttgtttccaaggatctctcttgtcaattcgtcgatcttcgccgattcaatcattaacacatgcgccgcggccttggtttagggcccaattcgaacagcaggattgaaaaaacagggaactgaaaaaaaaaacacaggattctgacagtaatacaggtgtaaatataatgtagatggttgcaaaacacataaaaacacataaaataattgtttatatggaccgcatgaaaaatgaaaaacgcaggatcaaatgagagagaattaaaaaaaaattccaagagatagaaactcttgctaagttaggacttgggtgttatgacaagctaacgccactctagcctgggttggaaacccatgtcccccgcacagaaaacggaacacggttcattagcacgtaattaattaagtattaactatttgttttcaaaaatggttcaatatgattttttaagcaactttcgtatataatttttttaaaaaaaacacaccgtttagcaatttaaaaagcacgtgcgcggaaaacgggatggaggagttgggaaccgggggcaacaaacaaagccaaattgtggccacaagcaggtgaatatcatgcataggttgtgtttagatccaaagtttggatccaaacttcagtctttttctatcacatcaacctgtcacacacataacttttcagtcacatcatctccaattttaactaaaatctaaactttgcgctgaactaaacacagccatatttgttctaaacttttttttaaaaaaaaaaacaggaatacgcattgcttattccatttgatcgcatttttttcctaacttgaggagcattggcgtttatatgtggtgactatattggacgttggtttatcgtcatttcatggcggcgaaaaatgacaagaattatgttgatctggaccggtctacatattaagggcttatttggttgtatatgccattatagcattaacaaatttttatttttttaatgatctacgcaaatattgttggcaatggtaagatctggccatttgtaaaactttgggggtgacgttggagcttgttcgctttgttgccaatctcaacattttggtaccgtttttataagtacatggaaagttttggagctataccaaattttggtaggatggtgttaggctgtgtttagttccacatcaaaattagaagtttgaagaaattggaacgatgtgacggaaaagttgaaaatttatgtgtatagtaaaattcgatgtgacaaaaaagttaaaagtttaaagaaaaagttgaaatctaaatagggtcttagtataccaaattttggtatggttaaaagtgacggtaagaacatacgcttgatattttgttgttagccaaattttgtttgtgagattggctaggcttaaatttatagagccagtatagcgacaccaaatactaattggtagtcatttttttccgaacaatatgtactcctaactgatagctttttcgcattattaatttgcatagttgagttgaaccataaatatatcgtcagggaaagtattgatttctttttaagaaaaagacaatttttatagaaagtactcctgaaattataaaacgttagctaggccataactgaacaggtggtcggcctggaccaagttttgaaacagctattttcttgcacagaaatgcacaaaggtgtaagtactataagtacctactagtatattgtatttcccgtccacatgtgtccccgtaggggctcccaagacaagaattgatacatttctctaaatattaagctattaagcggtatgttcgatgcaaaagtgttttaaaccaaagtttctttagaaaagcatattaatttattttttacttttataataattaatctcaattaatcatatgctaatggacatatggcacaagtgcacaacgagtcccagccaagcactgggtttcgagctcagccaaagggccaactgaatgacttacgaactatcaacgctttaacaccatcggtaacagggtggtggatagtatatgttcattgtatgccaattaatcttagccgtgcactttggcgatagcaagattttttttattttattttgcacaagattgttgtttcgaacgttgctacattttctggcaagattatctattctttgatttgtattgtagagaactattaatacttccaaagagatgccgatcgaataatttgacaacgtcacttttgttattcaagccaaatgaatgacaatggctgtgtttagatttgaagtttggatccaaactttagtcatttttcatcacatcagcatgtcatacatacacaacttttcagtcacatcatctttaaaatttaaactttgcgtgttaggcagttagtaggatgaacaaattggatttggatcctgaatagctagcgtgctgtcatgaatatccctagatcttctgcgatgaaatctatcttacagttgcaactccctacagttgcaataatgaatcttcacattattaacaaactggtataaaaagaaatgcagcacgaaaatatacctaaagatggtggtttggagctgaaacaaccatgcatctgtctcatagattgtgaacagatacgctccgatacacatacattaattagaccggttatattggttcgtacattactaaatctataaaaattgtgtaatcactgatcagtcacctcaggggaaatcctgctactgcagtgagatgacacaacgatcacaacatgctagccatagtccagagttcactctactttaaccatacacctactaggaacttaaaacctgagctaagaacagatcagaggctaattaatacagtactactagtagtaattaatgagctagtaagtagtaattagcatacactttgaagggcatacttgccggccccatgcgcgtcatgacgtcgatctgcggctagaagccccatgcaaaggcgccgtcgagctggccggggccaacggccatctgcggcggcgcgcggccgacggcgccctcgaccttgacgtccatgccggactgccagtggaaggccccgccgccgctgagcggctgcgacgacacgcccgcctgcatgccgccggagaggaacagcggcagctgcaggttctcctgcagcgagcggaggctcgggaagaaggccggcggcggcggcggcggctcgacggccagcggggccgggttgtactgcccggtgccgaacgaggcatccatgtgggctgtggtggagaagcagggcacgagctcaaggccggtgaccaagttggcggtggcggtggcgctgccggcgccgccgcccccgccgtagttgctgctgtcggcgccgtcaacggctggcgccgcggcggcggcgaacagcgaggcctcagccagcggcgcgcgcagcgccgacgaggcggaggtgccgcccccgccgccgacggaggcggaggtggagtccgagaagcacgaggtgtcgccgccgccgccacttatgccgaggcggcccttgcggacgacggggaacacgccgggcttggtgaagatcctggctatcacccactcatcctgcacgacacatcaacacagagaaattaagaatcaaggttgtgtagcaacacgaatttaactgtgtatatatatcatgaactaaaaaaagggtagtacaaggttgtgtagcagcagtacagtactacgatttcgcgtgcacgttgcacaaggcgaactttgttcctctttggtttactcgctcaaatgacaaacgcagatgtatgcccaaggcatctatttttgctaaatgcaaattgcaaatacgtaaggagtacagtatgcatttacaccttgtgctctcatgtatccacgcattcatgcgttggattgcatataagcttccatgaggccaaaaaaagattcgtatcctgctaagctgcagcctctgatctttcactgcgctaagctgaccgattaccatatctacgtacagtatgcagcaatctgcgtcgcagcacccctgcgctgctacaggaagtagcatagcagcgcagggagggagctcgctgctgatgacttcacaccagaaaagcaagctcagagctagcgattgtgccctagacccctcgtgacttattcctaccatatgttgcacacatcatccgcagcaagaacaacaacagaaagtttccaaaggatgaagtgaacaacacaatgggcaaaaggtgaagaaaataaatggggaaagtgctgacccgggtggaggaggagagcaagtggtaggcgtaggtgccgtcgaggcggtactcgtgcatgacccactgggtcttctggcccttgggggcgcggccgcggtagaagacgagggtcttcttcatgccgacgagggcgccggtgcgggcgctgcggatctcgcggtccttgccggtggccttccagtagccggcgcccgtggcgcggttggtgcggagtcccgtggggtacttgcggtcgcggaggctgtagaagtaccactccttctcccccatcttggccttctccggcagctcccacggctcgcacttgttcaggtcgatctccgcgatggcgcgcccgttgaagctcccgtccaccaccttccgcagcaggtagtaggtgatcagctcctcgtccgtcgggtggaaccggaaccccggcggcagctcgccgtccagccgcccgcccccgcccccgccaccgcccagccccagcacgctgcaccgctccatccagctgctgcaacaagtaactaccagtcaagcacacaggagaagaaacaaacaaacaaagtactactactccataatcaaacaaacgccattaatgagcagcagcgatggatcgagctgcacaagagccaaaggaatggattgaaaggagcagcggtacgaacgctcgactaattcccccacctgtcgagagaggcgacgatcgatggctgcctcgctcttcttgaggggatcagaggatcggtccgtgttttatactagtancgccggtggtgctgaagnagnagaaggaaggtgggtgccgaggagtaaatgtgtgggattcgacgaatcgggggggagggggggggtgtctgtctgtcagcgacagtggggactggggcccggctcggtgggtggcgagaagagaaaaaaaaagtaagagtggagtgtggacgtgggggaactcagatgagacgagtggagatgatcaggcagtgcagagctgatcgctgatcgatcgattgcttcctgcaatccatcatgcccccccttctcatgcgtctccctcgcaggccgccgcacttggcacgacgtggctctggcccacgggatcctttgcgcatgcatggatggtaatggtactatgggcctgttcactcggtgaaataaaaatttttaggtgttacattgtacgtttgatcggatgtcagaaagggtttttgacacgaatgaaaaactaatttcataactcgcctggaaaccgaaagacgaattttttaagcctaattaagccgtcattagtacatgtgggttactgtagcacttatgactaatcatggactaattaggctcaaaagatttatctcgctatttacatgtaaactgtgtaattagtttttctttttatctatatttaatgttctatacatgtgtccaaagatttaatgtgatgattttacgaaaagtttttaggaactaaacaaagtccctctgtagggacttattttttggagagaggggctaaagttcctctctcctaaacacccctaaacagggcctatagtaatacaactcacatttttttgggctgtgattgagcttttcaatctaacaaatttcatccgtgtagttttaactccatcatcatctttcagtctacccgacatataaacgtgtgtataatgtaaagcaaaaggcttaggtggtgtttagatccagagacttaactttattctctgtatttagatactaatttagaatattaaatataaactacttacaaaactaattacataaatgaaagctaattcacaagacaaatttttaaaggcaaattaatccataattagagaatatttactgtagcatcatataggttaatcatgaattaattaggctcaatagattcgtctcgtgaattagtccaagattatggatgggttttattaatagtctacatttaatatttataattagtgtccaagcatccgatgtgatagggaagttttagttccatctaaggctgtgtttagttcctgaaattgggaagaagtttagaaaaagttggtagtttgaaaaaaagttgagagtttatgtgtgtaggaaagttttagatctgatgtgatgtgatggaaagttgagagttgaagagaagtttgatgtgaactaagacatgcctaaacagggtctactccgtactcagtaaaaggtgcaacttcaaagcagatctgctgcattgctgcaacccaaaatattcacgtacgtggccaaattttaccaagaaaaacaagcaaaacttaagcactagttaaaaaaatgccataatcaaaccaaacctccagacaaccaccaccctggcacaataaaaaaatggtatgttctttttatggagtagcacccatgcgaaaatatatttatttttaggttacaacttttttttcgctctgaagagaaaaaaatgaaacatgttcaatgctaatctaaatagctgaaaaagctgatggatatactagcgaaacgcatactgttatatgcaattc

SEQ ID NO: 14892 - DNA, 7583 bp, Oryza sativa
agggtacacaaacgacaaagttgacatacagatccacgtcttacaaacattataaaagtcttacataaatgcagtggaaatataaaagataactagagctaagtctggacttggatagcagcgggaacaccactccacaggcatcctcgacggcacggacaaagcctactcctcggagaaaccaccattggacgcatactcgaactctgagggttgggagatagagcaagactgaatacttcctactgtactcagcaagtcataccggaacggagggtatgatgcaatatataaccaaaggaaggctaaaaggggatcatttgcacaaagctagcatttataaacagtagttgaaagcagtaaaacagttctaataattaatcaatattaaccatccactgtccaatgctacaccatgttgcaacaggcccaaccatccacctgaactaatcaattccattagactaaactagggtgagactaatcacagtgaatctggttgaccgcccataaccgcgggcacggctattcgaatagttttactctgatcagaggtgtacaactgtacccacaagacatagccccacaacacgtttccgtccgccggcatgccaccacgacataccggaaagagaccgtgacaggaccctttgcataacctcctctaaccaaacacaccacacctcaggtttcacccccactactcgcaaggcagcgggcagtcccctctcgtgcctaggtgaatccggaagcgacaaaggccgtcgcagggcccatcccgctccatcacgcccacccttgcctggatgcgtcagctagaggaaagctacactacaagcccaaccgttgcccaagctggcttgtggtaagtacgataagttcttctagggcatcccgcgaaccggtacttaactgccatgggcgcgaccatcaaaaccatacacccacagccaatcatttagcatattttagttaaccaacaccggagcggtggcactaaaccaacatcaatactagaataggaagtctaagtgttaatgtaaatcccccattgtgtgctagttgagctaagcatggctaagcaatccctagtccaacagctactcatgttataaccccaagctaacaaaggaacaaggtaacaaatagtatggctgagacaataggtaatcatcccatggtatcattataaaacaatgcaatatttaaaggagaacaataaagcatttgcaatgtgggatcaccatgttcaagtgacaagcatgacttgccttgctctgcggctggaggaatctcggcgactatctctaagtacatcggagcgtcgggagagccgaaatctatgcgacatacaaggcaaacaatacaaacaggctataagactactgaaacagagaacaaatatttttaatggattctttgcatttttcttgatttactgagacttgaatgggcttaaacgaagcacggatgaattttctatgaattttagaagattcactgtgtttttactataaaagaaaaaaccttaattggattattgcgcattaaataaccccgacatgcgggccccacatgtcatcggcacaagacgccggtccacggtggaccgagtccacgggatcggggaaaaggaccaccacgtggcgccgacgtggcaccgatgtggcggccacatgggccgccacgcgggcagcggaatggatggccccgatctacaagggggtagatcggacggcggaggcggcgcacgcgcgggtggcttaagccggcccggcggcctggcgtgcggcggcatggcatgcggtggcgcggcggcaagcggcggcggcgcaagctggcccgacgactgcaaacgggcgatggcggcgagcgacagcggggcggcactagcggctaggcggcggctaggaagagagagagggggaaaaagagggactcaccgaagacgacgagcgacggcgagcggcggaaaacggcgggcgacggcgggacgggctccggagcgacctggggaacgaaatgggagcgattagagagagagagagcaacggacggagacgccggccgaaggcggctgcaatggcgagctcacctgcgtgcggtgaaaggcggattccggcgacgggatcggacggcggaggggtggacggcgtggccctcgggctcgcgaacccgacggaggcaacggcgaggctcggcgacggctctaacggcggcgagcggtggccggaggcgcttagagcggtggcggcgggtggtgcacggcgctagggcagagagctcgggtgcgagtggttgcaaagcggaaaagagagaggaggggccaggggtgctttatataggctcgaggggatcgatcgtggccgggaggtgcgggaatcggccggcgacgtggggaaggtggagaggagagagacgggattagaaaatcgaatcccagccatctcgagcgcgggtgcgggcgggagagtggggcggcggttgcaggatgtgtggggcgtgcgcggggagggcgacgtgggcgtgggcacgctcggagagggcgggagcggcgattgcgggcgcggcggcgccggccggacgtgagagacgggcccgataggtgggcctcacctgtcggtgacctaaagaggaggtgggggcgcgggcgaggtggctggccgaggcccagctggcgcgtgggagaaggagggggagtgggccggcgggggagaggagggaatgggctggtggcccaaaaggaaaaaaggagggaaaaagaaaaagaaaaaggaaaaaggatttttccagggatttaaataatgcttgtgctcgattttaattggttaaaattatttctagggctctgaaaattccactaaaaatccggttagcatattttgacatgtagaactcttgaaaaatcccacatgccatttccgattattatttgcatttaattccattagggtttctctcttactttaacacatgaaatttcttaagaccacttattaatttaatttaggcttgggagaagaacttcagggtgtgacaaaaaccttctctttttttctcttctctaaaaataaagtgatgaattcatgacttgaacctatgatctcatagttctcctaatcaattcaccctgtgacgctatgtgattggagattattgtttgcttgctacgtatgattgttcaaattttatgatactgtaggaatctaaccttgttactatgattcagtaatattatcatagatgggtagtaacatgctatgttactttaaaatttataggtcgttactgcacttttggtaatagcacataataaatattgcaataacagagaaaatgtaataataccagtgatgctataatagtaatgcttgtgcagatatagaaactttaaagtcccaatcttcaaagagcaatatttcttacataatatcttatttttctaatccatttgcaccataatgttcataaaaaaatatttaatgaaactagatctatcgtgactatattttgacgtcattactacgaaaagcacatgtgttactgcatactgaccgtcacgttactacgtaatttctacatgatgagggcaacaaagaggttaaattgggttgagccagtaagttcgagctctgcaatctatttttcctatatagttggttcccactacaagaataactcctataaagctgtctccaggttaagccacgttatcatcaccttacagccgttggatcaagtgccatctttgttcgattcatagacctgatagaaactcaaccagtccaaagtccacccagacacgatgaggaattgctagcgttggatcagcttgcagtgagttagaaaaatggagcgttttctgtgcgtcaaatttaggaaactgattaaggtgactgaggagcccatcttaatgaccgtcatcatgctttaatcgacgcccgttcagaggttcagcaactcagcgtcgctcacagtccctggagttcaggaatcaagatcatccttttggtttgccattggttgaaatcaatcacatgctctctcactcggatggattcaactctgttcaatagctggaattactttgcctcatatcaactcatcatcgataattgggacaatcattccagtgaatcggcgtcgtcgctcgatggcagaaacatagtcactgtcatatctcagactctcggcataggtaaccaatttgtcatcctgcagttctttttgggataatttcatcctttagtttttatttcgtagctggctcagattaagcttctttattttttcaacatagcaatacaacatgccatcacaaatattcagcaatttactacagtacgtgtctatacatacacagaactactcgaagcaaccttctaactgccagtggatttgcaaggaactatctcttcaccctaatgccagtggatttttttctacctttaaaatttcgaccatttttagcaattatgagttcatttgtccagtccctaataaaatggtgatttgagatcatctgaaaactgatgcactccattttccccccttttcaccgcaatacatttcttttcattccaatgatgcaaacactgaaacgcatcttatttgattattagcttctttataacttttgttgaagaaacttttgtcgtccgaatgttctcaaaattggcctgacaaaattgacctcaccagtccattcatatgtctcaaagttgaccttctatcttcatatcacttataatttgttacaagagttaaacatattttgttttgttgaacataacattttacaacgcaacttttacaggtcaatatgatgtatatagcatatggaaaacagcaacttgagctggagaaaaatacatgccaatgacaaggtttgcaattattcctgtgtctttttgggcattaaattactactgtctatatattaactggtttatcactaacccatctggcctaacatattgatagttgatttttcttataattgtattatgacacctttgtatcatcattaaacttgaaacgtcaaccttctagtgaccccattttataagaattggtcacttttcattcgtacaaaccatcgtaataagcaattttcagttcatcacttaaaatccccgccgcaacgcgcggggtatcacctagttgtacatatacatgtagccaaggccagctctgggcctagctaggccggttgtgcgaccatcatcaccacccccacccccacctacaggcctcagcccatagcctcagtagaggcggaactgcgcgcgggcggccttggagagcgatgcggcgatccagtctctagggcacgccgcgccagttcgtcttcgatctgcggcggtgcggccggcggccccgcgcggctagcgctttctctccgacgctccttgaccacgacacagcagctatcaacgaacgacgcgtcgatgccctctcccgtgattggtgatcccttctagcagtggctgggtcgtaggaagccaaccaggcaagcagcgcacgcacagccagcggcacagcaggtttgccttctaaacttcttccttgattccttctaggaaaattaggttatgtacttcggacctctcttgtttgcatgcttaattttcttccttcttgctatttaatttactttgcaattttacttaaaaatttaatttactttgcaagtttactttttgaagtgttacagaacgtattacctatttgtcggttctcagaaaagaaacagaagaaaatgggaagaataatttatcgattcgcaaaaaggtgctatatataaattttttatagcttcaaaatcaaatagtgttgttaccggtaatgatcctcacacatgtcaatgtggatgttgtggtgcaacaaaataatacccaagatcaagaacaaggatttgatcataatgtaaatgcagaggttaaagttaatgaagatcaatctgatcatatttatggtctgctaataaggtatttataatattttatttaattatactatcagtattatatatatatatagttatttacaaccgttttatttattatttaccatgttagaaatgtttatttgtgtttcttcagaccatatgtgctttgtaaattatatagtataaataaaaaatagtattaagggcctatattacagagttcgcctatggccctaaaggccttgcatgacgcgctcggggtcagcctggagccgagcggagcgcactgtcgaatccatgattgtctctgggcctttgtttgcatgttgtacgcatgccgcaggaactgcatgcaaaagcaaaacgtgggatgacatggacgcacgcaagcgacgtacgaaatcagagcgaggaggatgttgcagatgaaaattggaagcacttgatcgccgatcggaaccgagatagatagggaacgatagatgaagaaaaaaacttgaaaacaaattttattttttaagtaggtaaggaaaaatcatgtattcccccgtttcaggttataagatgttttgactggtcaaagtcaatctgcttcaagtttcaccaagtttatagaaaaaaatagtaatattttttatccaagataaatttataatgaaaatatatttaatataatatttaaaattattataatattttcaacacaatgctcgtcacactagggttgactttccagttgcaattgaggctagggaggaaagccgtcaactgagaaagtatacgatgatatgatggacaaaaggattagagatagctgaagaggccaagctaaaagatttgaagattgggctacattcatcgaagcaaccatctatcgtattatgaaagaaatgttgtcggacatttctacgtccaacaatgacatggatggcaagcacgctaatatttaaatttattataatattttcaacacaatgctcgtcacactagggttgacttcccggttgcaattgaggctagggaggtgaaccgtcaatgtgagaaagtgtatgattatatgatggacaaaaggattagagatagccgtagaggccaagttgaaagatttgaacattgagctagattcattgaagcaaccatctatcgttatatgaaagaaatgttgtcaggcgtttctacctccgacaatgacatgggtggcatcgttatgaggcgtgccgaggcactagccagctggccagagtatcaagagcttgttgagcaagaactgtggcaggcacgctaagcgcgtgcgtgctaagcgagcagaacacaagcgaggagaattcattgcacgagcaaactccatgtgcagtagaattcaagtggcatttatgtccttatcaagcaatggttacagggtgtacgaggaggtgttaacgtcacctaaaccgaggaaaacaacagcagcaacaacaacattgtcttgttggctagtccggaagatagcgtcaagtggtgcatttgaggttctttcttcaatgctggtggggatcacgaaagcggatgatagcaccagtgatgcatcatcttcttttgtacacttcgaaagaaagaatgcccgaaaaattgttgtaccgggtcaccatcatgt

SEQ ID NO: 14893 - DNA, 8561 bp, Oryza sativa
cgattgtggctgcaagcatctctgcccttaagcgtgtcttcccaggaagcctcggctgctctccaggggggtctatttttttccccaccggatgattcatcccccagcttctctttctgcatgcagtccacacgcttcctccgtcgatccatccagcgccgccgccggcatcgccgtctcccttgcccagtgtgtttttgcgccttctttggcttagctgtggacggccgcggtcttctgctcggtgatttcgtctccaccatctccattccatctgtccacggccgtcgccatccacgagctgcagcagcctctcctctcccagtgacagtccactcagttgcgccaccaccgacgaccttttgcttgaccggttggttctccggtggccatcgccatcacgtgagggagcaatgccctctttttcccacggcagtcctggcaagaaaatccttctatccccactgttgtacagaagaaacccttaggccccttggaaatgtcgttctttgatttattatgtaccaccatgacagatttcccttgacctgtatttttaatggtgcaagttacttattgtcaagcatgtgattcaataatccctactaattaagcattttctaattgaatttgacctgctacagtggttatgggatagttgcctgctgccccaagtccacaacatacacatattaaaggtgtccatatttagattcatgcttagctttccataatactccattgtgtactcatctgctggctttatgattttgttttgccattttgtataaatatctaggagtggtttggtgattgggatggatgtggtgcctgacactctaacaccaacaccattttctcagctaactaacttagggacaaatgagacagagaacaggctaggtgctactcctacgcattattcgcatattcaactttctttgcattttctcaattctcaactacagttttcttacgttgagcggaaaacttattgatgatttatttctttgtcttctaggtgctcctaacagtgaaagctctaatcataccatatcttttatctcaactcctgaaatagggatctccatgtcagtgtttcgtcatccatttcgatgacctattaacaggaggcttgcatttaaccctgtcaatcctgctactccaatagattaacactttgtctcctcattagatggcccaacagtgccaggtgttcagtcccttcctgcagtgcgcggtaaaggtaagcccctctattaagaattactctctatgtgattgtgctcaaacttgctatactaccattgtaccattttagattcataaatgccagttcaggtacctgtgccatagtatcatatatctatatagaagataataatcctacgtacaatttgcccatgttaatgtactaccttcgccccatattacttgttgccttgagttttttttaatgtttgattattcgtcttattcaaaataaacttagaattattatttattttatttgtgacttattttattattaaatgtagtttacttatcattttttatatttgcactaatttttcaaataaaacgaatggtcaatcattacaagtaaaaagtcaaaacgacaagtaatataggatggaggtagtattgttcctagctagggctaaaaatggtcggaccatataccatttttattttcatactgttttctcgaaaacggtatcagaatggtagacacaaaaatactaataatagtcatataaatactaatgatagttatatcggtatatcagaaacgggactgtcggaacagaatcttcggaagtcgaaaattcatgtcaaaataagcggagtatggcatagcacacatttaactatgcatgcatatgactttataatttcattcttgcatcatcacactacacgtgacaccgttatatgatgattaatgatattgatgataagttcgatgaataatataaacaaaattcaacgatacatcaacattgataagttgaggagaccaaagttcagcaaaatccacgtaccacgtcctaggtttaacagcattttcccgtggtcacttctgctttctaatgggctaaaagcttgccaggttttcatcattcataggtttccaataggttgggatggctgagccattcgggaactttcggcattttgatgaaaattaccagacaaatatggttactgacaaaacagtgagaaaaacctccatccatttccgctaccattttcgaataatattaagtttctatttccaacaccgatagttatcaatactgactgaaacgatcggtgtaaactggaaaccatagccgaaatctcggaaatttccgtaccgttttcacccctattcctagctaaagcacatcactatcgtccgtctgatccaccgcacaaagagcgaaggagcgatctagccatccgttatgagagcctacctctttcgtgtcgatcccctcctcccgtcgcagaaattgccactgctatggccacctccgccactgccactctttgccagcgtggtccttggttgctcctattcatcttctccgtcgaagcagtgtccatgccgaggggtcatcggcacgggcgatcccctccttcccttgcagaaattgcagcagccattattgctgcctccatgtcgtcccaatcgtctacccccacctccacggcgctaacgtccatctcctctaggccgtcgccatcttccgctcaaccctatggccgtggcctctaagactgccgctgggtccgtgctactgttccgcctgtaggacgaggacctcaaaaattggcacgctgacttcgtcaatgctgactagccagcctcttcgactcctcttggtcaatcctccaccataattacaattaggaaatgatgatttcattaacagtctgccacaatattgtagtttgtcttcttcgcaagcagactagctagaagaagctggacaagaggtcaataaataatatatgcaggagtgatataccaaacggtattatttgcatgtttgacactacaggttcaacatattattggataacgaccataaacatatgaaaagactgacttgcaaaaatggcgtgccaatgcgggtcacggacgacgttgaaccgaacgagagtacgagacaaagcacagcagattaattagttgtcatccactgctctggtggaatatccgagctagtacagctaatatgacaggaccaagtgaataaccggtcctagtattttttttcttaataatagaatgatttacaaacctactaccttcatctaaaaataaatcaacttttatagttcgtatacaatagttgaaaaggagtacaatgaattctgaaactgaaatgaaatatgtgaggttatctggcaaacctgctgtttgatgaaaacaaaacaatgaacacatagaaaatagggaaaccctgtattttattaatcatgattcattaacatgaatgtttacaaatacatgagggctcccgcaggagttcgccttttgccttcgcgaggaatgcttaatggaaatgtatgctgactggagattgcgtgtagtccgctgattcccggcgcctagcaatgagactaccggttaattacatccacaggagcgagcctatcgaacacctccgattaagctacgctttatgatcgtcgtcttcaaagttgtttgctcgccgaaggttgaggttagtgcagacttaatgttgaatatagtgaatgtggaacgggtggtttcgtttcgccaaaacctggtcacagtacactaccatcacgtcggtgtgcggagggaatttggtgaaggggtgacctttgcctcgtcggtgcccagtcatgtaccccggccttcatcaaacatggattttgtggttgctttgcctcgtcggtgcccagcaacggtgtatccggttcccgtccattttagacgtgttaataatgtagtgacctggccttgtcggcactcagccatggtttcgtctagcctcatcggttatagacaaatgaaatgagtgaatggctatagctttgttagctttggccaatatgtcgtccggcctcatcggtctcggacatagcataaataatgataaatcggccatttcatctcgtcaacattcggccatgatgtcgacgtgtgttttaaatctgcatgccccgccctcctggctagcattgtttttgttgtcttcaagaattttgagagtcaccccatgcatctgatagaatttagagagagaagaaattgctctcgtacatgacatgcacgaggcaaatctataactctttcggcatgaatataaatatatataaatcatggttggtccgatgccaataattaaggctcaaacttatcccaagtttatataaataaatatccacatccaatatttgatattgataatttagacggtccaaccctcacgagggtcaggctcgccttgtatttatttgcagctcatgttaatcgcttgacaaagatgacgtgtgcgtgtgcatgcgccgctggggatacttatatccatggctacaagttcacaacgcatccacgacatattcatcagtactccactttactgttttaccgtctcaactgtgcatctacacaatgctacggtgtatatttgctccctctaagagatgatgccgggctattaataatatctgcacagcactacggcgttgttgtgttatcttggataagcagcttgatggagaacgagatcagcttgttgctgaagactcgccgatagaggtgccatcagtgcatgcatcttgttgctgatctgcgatcacgcaccctgtgtcatgcgcatgcatcttctttctgatctctctgtgaatatatgtgggtgcgggtgtgtacctatagggcatattgctacttaatggcgcagcgcttgcgccctgtgtttctctccttctccttcacgagggacggagtcggtgccttttataggcagagctaacgatggatggatcaggctgagactctcaaccgcgtccgcaaatcttgggctaatcacgcttaaatatttgatctcctccggataatggacatgcttaacaaacatggtacttaattagcaagcaaataatacgctgatgacagtggccctggacatcatttgcacgccttgggtgtgcttgccgataatctaaatataatcgtcattaatctgacgtgattatcaaaagcaaccaaccaaccatatggctagcactagtcaattttctcccccatataatctttgatagctcatacttttcatatgatatatcctattcaaaatccgtttgtacttatggtctctactcaaaatatagaacaaaacgagtccaatattgattatatttggatgtagcgtgatatttgaatttttctggacccatacatcatagagacacgcctcacatgtattcagtaaaattgggctgcgaataatattctcatataaaattaatgcccaataatttattatttcttctatgaatttttagcacaaaaattcatcaaacacctggccccatctcccaccaaatggtaaccagctgagtcacttaaaataaaaactagagaaactcggcaagaaaattctatagaaataactactagaaaaataatttttaccgacgttggttttttacttttccggatggaaaaaaaatcctcttataaccgtttgcaaaaatagctaaagagcctctagatttagccccgcctgcgaaaatcatgcagcttctattcccatcaacccggagcttatttcggtatctatggagtcacttatcatagaataaatatgcagctgaagaagatccctggtcgtccagctttttcagcctcatgcattgctgtatttgatctcgtcctctctgtgtgactgtgtgcatgtgctgtctgtgggtacttggtttaatcctctatggtttccactgtctggacttggattgccatgtacttgtgtgtttgattgtgtgtactgctccagttatgcatgccattgggtggtgttggatgtagggtgtgttcagtattcgcctgcgtgagcatgaacaccactagtgctttgtattatacttttactttgtgctcttctcagtctgacatatatttgtcgatcacagaaaggcatttgatagtataaaaccaatctccccaacaaagatggatatccatttgatattgaagtagtgagtttaaaaaatgaatttattttgggataaataggagaggaaaaacaaacttattctcacacataggaagaactcatgaatacatgatagtaaacctagttatattttggattcatttttcttattcttgtgggcctggtcttataagtctcatcttctaattgaccatttggaattgttggaatttatacgcagacgatgcagcggtcttcatgaacacgaccaagagcgatgtaagggctttcattgaccttctgactcgcttcggcaaggtatcgggtctttgcacaaatctgcaaaaatcgcaggtagcgccaatcaggtgtgatggcctggaccttgatgacatcttggacggaatactagctactagagcctcctttccagtaaagtacctaggactccctctttccaccggaaggttgcgtaaatgtgacttccagccgctcttcgacaaatctatgaactatatagaaggatggcgagggaggcatgttggtctcgcaggtcgatcaaccttggtaaaagtcgtccttacgtcccaaccaatcttcctgctgacgggcttgaaagcatctaaggaatcccttgaaattctggacaaacaacgaaggcaatttctgtgggttgggaatgaaaccgtcactgggggaagtgcaaggtaaattggacgcgtacctgcctacctactgcctcgagagggcttggcatcctaaatctcaagaaatttgcaagggccctccgtctgaaatggctctagcacgaatggaagtcaccagaaaaggcttgggtggggttagaaacgccttgcgatgaaacagacatgctgttgtttgctgctgcaacaacaatacaagttggcgacggagcaaaagcaagtttctgggacttggcttggctataggggagaagactaaaggatgtcgcaccactagtctacgtagcctccagaaaaaagagcaggactctccaacaggccgctcagatggaccaatggctgcttgaccttgctctaccaacaaccgaagggtggacaacggagctaatcgaccaagtcattgccgtttggagcgccattcgaagtgtgcaatttacggatcaagaagactagatcacttggaagctaaacaaccacggtgaatacacagcctcctcagcctataaggcacaaatccttggtacaacatcgtcaaattttgacaacctgatttggagaccttgggcgccgcgcaagtgcaaaacctttgcctggttgattctccaaaacatagtgtggacttcggatagattagcaaccagaggctggccaaacggatccacatgcccgctatgtcgtcagacccaagagacggctcatcacctgctagtggattgcagatacactcggagaatttggaatgaaatagcacattggactgtcaatggacacctaagtcctcaactctggtgagcaacgtctacgttacatgagtggtgggaggccatcgtgagtacaagagaagcaccaaagaaggcactacgcacgttaactttgctaatggcctaggggatctagaacaaaagaaaccgaaggactttccaacacaaggagttgccggcatcaaatctattatccaagataaaagaggaagcaaaaacgtggagccttgcgggtgcgagaagcctcgctgcctggctggcactgtaattagccttttcggcagggttgcagccctgcttttgcttttgtaaagtttccttttgtacagtttccttcttctcttttcaatgaaattggcggcctcgatgattcgttcaaaaaaaaatctttcttaatatcaacttcttttgccaatctttttcagcctcttctggctgtagtggcaacagatcttcgctcgatgtacttattgtcaaggtctgatttttcaacttgaagctgtatacttttattgtgctctatccttttgatgtaattttgtagttcactcgtcctttgattcaccgtgtatcacaaaatatctccgtcttttatcattgttatactcagcttgcttcctttttttagtatagtttcatcagtacaatcttccagttgaggatctgttgttgtttaccaggtgtgcttgcttttatctcaccaagttttcttgacaatctttttcctctctttttggctgatatagttccatgcattgctattttctaattgagcatcaacttgtttttttagaaacgcttgctttttttctcaccaagatttctagtcaactttttccctatccttttgcatataatcatctattataacagcagataaaatagaaatacatataatcatccaatatttatagtgt

SEQ ID NO: 14894 - DNA, 1178 bp, Oryza sativa
taaggaagatcacaggataggtactctgcaatagctctggatttcaacagaaaatggcaacaaaagcaacacagagaatgtttattagtacaaacaaggattttcacttttccatatactggtgaaagactatcagcaattgcttaatcatgagacatgcgtgattaatttaaatatgttcccgcattctttacatgatttcacatacagtattcatccccgttctttaaatatgtttgattaatttaagtatgtgtgattattatgtttgaatcgaagccatatagactgattaatatgccaatttaactgttaacggcagtgaaggatttgatcaaaaagaatttaataagctataagcagttgttgatatttgaatagataaattatactgtttcagaattgacgacagattacgggcctgtttagttcccaaacaaaatttttcacgctgtcacatcgaatgtttggacacatgcatgaagtattaaatgtagacaaaaaaaaataaaaccaattacacggttcgctaggaaattgcgagacgaatcttttaaacctaattgcgcgatgatttgacaaggtggtgctacggtaaacatttgctaacgacagattaattggtcttaataaattcgtctcacaatttcatggcagaatttgtaatttgttttgttattagactacttttaatacctctcaaatgtgtgtcgatgtgacatacaggggcaaaaatttttgccaactaaacaagccctacgataactgaaaagatagggcagattagttctactctgagcgcacagataaatcaaggacgacccaagtacagaaccacctataggggattcagttaaggcaaatccaatcatgagtggacagtgggcaccgaccggcgagcagggaggctggtggcgggggaggagtagccgttgtagtcgccggagcggacggcggcggcgacggcttcctctgcctcgggcgcggtgcggaagcaggcggaggaggaagggtcgccgtggctgagcgggatgacgggccgtggcccgttctcgtccaggcacgcgtgcagctgaaggaggtaccgctggatgctgcgttccccggccgcggccacggccagattcggggtcgcgaagcgccatcgcttccccccgcggccgccctccatcgccgga

SEQ ID NO: 14895 - DNA, 4554 bp, Oryza sativa
atttcacggtgaaggaaccgggatgacaggtggtggggcggcccgtgcggagacggcgccaggggggggggcatccctgtttcggcgatggcgtcaggtggcggcgggcggaggggcggcccgcgcggagatggcactaggcggcgaggcgtcctaagtcgggacggtgctgggcggcagggcgccacgagcgccaacggagccgggcgggggggacggcctgagcaacgacagtgccgggcggtggggcgtcccgaggggtgatggcaccgggcggcggggaggcgtcgggcgttccccgtggcgctcactggcagcccccgcatccgcggcgtgcccctcggccggaaggatgccatgacggcgagcatggagcgcgtcgacgccacgctcctggagagcttcctcggcattgacaccgctgtccctttcttttctcctctgttggacgtccccttcttttctcctctgttgtccagatccagatcgaagcagctcggcggcctctcctctctcccctccggctcccatgacagtcactcccctctcccatccggcgcccgcggtggcctctcccctctcccttccggctcccacggcggtctctcctctccggcgcggcgtccctctctggcatagatagggggaggcgggccgacgagttcggtggcgcgttgaggaggagaacgacgagctcgcagccaacccatttccaatgccagggtgtgggtggaggcgtcgcaagccacgtgcgcgaggccacaacctcacagtgcggctgcgccattctccctgctccgcacggcttcttttctcacgaagaacgcatgcccaatctgggctacacgaacttggtttggtcacgctgcaagctgagttggcgggaaatctcctagctatcatgggttgactaaatgccacatgtgtgcattggaatggccttacaatacaacccggtttcgatttcaggtatgcacgatttaaatgatacgtgggaaaagacgtccatcgtgcacatccacgaaaaagatggaagttgatgccgccggcctcatacatatactagccagtgtatatatacactcgcgcgcgtgcagtgcatatatatgaatctctccttgcttccgtggatttaccatcaaagttgagacgcggcatgcagcgcttggacggcgcgacgacgcaggggcccgggccgcgaccttgcacgccgcgcgcacggcaacgaaacaccaagcgtgcaagcaataatcgcgcgcgcttacgttggacgcaccggccggcgcgcagccaggcacacacgcactgcagcgccgtcgccgtccctccgtgcatgcatgcatggcctgacgaacgggccaggtagatctagagattctagaggcacctgagacgagcaggggccgggtggcacggcacggcatggcagaacgcaggcggccggcgagataaaacggcatgggcgcgcggtacgacagggcactgcgcaggcgcgcgcgggcacgtaagaccaaccgggctctagcgcagcgtgtgtatcagtatcgcgcatatgcgtgcaaggagcggatgaaccgatgaaattgcaggggcacgtactgtggcatgcagttcgtctggtgtccccgtaatcgtgtctaccgtctacggtgcgttttgtaatatatggctgttagggttagctagttagctgcacataaaacaacgtaagtcattagcttattattaattaactattatatctgatttttttaagagaaacttctccatgtaaattattaacaccaatcaaaccttgtttagcagtttgagaagcatgtcaactcatggtaaataagatattagcttagcccaaattaccttgttttcacagtatatgcgataaccgcgcggttttcacggtaaccacgcggttaccacgataatcgtcaaaccgtggggcgatgataacctcacctaaaatgatttggtaaaccatgaacgtcaatctgtcttattaatcctaaacgtcgatatgtgaaaaggtaatgttagtaaagatggcataagaaactatcatttgaagcagtggcggatccacggaggggtgaagggaggcctggcctcccccaaagagattaatttctttcagtaccagctaacaccggtgggaaagtgtttttagtcccagttcgtaacccccctctttagtcccggttggtgtgggagtaacaccaaccgggactaaagatattttttcttttttttctgtttttaatattgaatattgatttcacaccatcccctcccatatccaaattatcacatatcactgaacatctctaaatcctcaaatcctcaaataaatcatctcaaaatacatcacaaactcttaaaaaatagatcatctccaaatacatcacaaatgtcacgaccggaaataacccaacagacgttccttacgtgcgtgtattattccttgtcccaggaggcaaggtacacccaaaagttgatacatttcagagtttatcaagcggaagcgtaattaattaatctattacatgggcggcgaagacccagcacacaagaagacaaacgaaaaacagcggaagactagggcgacgaccacaggcgcttgacggcaggcacgagctagacaccaaagccttcatcttccaggaactcctcttctgagtttgggaaaaattgagcaagactgagtacaaccaccatactcaacaagacacacccacaagtgcagaataaatgcaagggagtacaaggggggttatagtataaagggttagggtttgcagtaaacagcattaaaagacacttagttgctcaaagctattttgtaaatacgatcctagagctatacaaggttattaatcaaggccgtgaatccacacgaacctgccttaacccaaggcctacgatgattcagaccgaactggcaatccgaccctgggtcccagctcatcccaagccaacccaggccaaccattccacattttagttgttaagcaggttttaagaattaaaacactaacttgggtacattgctcggcttgcccataaccgagggcgcgactattcgaatagattatactctgatcagaggtgtacatctttacccacaagacacatcttcctcacgtgtaaccacgtgccacataccatcacggtatacggacggaagacgtgacatagtttccaacccatcctagccatagacaagagtaccgacccaaccccacctacggccggaacccccgggacaggtaggcaggactgagcccctagcagcaggacaccggccctgtgccatgacatctcgactaccgggccgcagctcgtgtagcctttatttgccctagagatgtccatcgacccctgactttgtccatctccatccgtgtacttttgtttataagcagactgagccacaaactaagccttacccactagacatgtggaagtacggtagtgctttgcaacagaggcccgaagaccggtccttatatggccgaggtgctactatcaaaaccatgcaccccgagcccagcctaaaaccattttgaggattttgaatggagggggaggtgtgaatccaattccacaataatccaaccattccgtagtgtccaggtgatatgaatattcccaaagtctagagttgtaaaaccacctaatgttgcctaattaaccagcgaagcatctacctaaaatcatactagtggtaccatgagtagagtgtccactagttggggttttgtttattctagggtaaacaaggaaataataacaataacaataataaggtcataacaaaggtacataggcatggctagataaaacagtgataacgcaggaatttaaataaagcgataatgcaataatttaaatcaaaataattttataaactgggatttaatatgttcaaggatgatgtgacttgccttgctcgctttcccaaacgtcggcttcaacctccacgaagagcggatcttccgaagctgcagcgtctacacgaccaatggaaaagaaaaggcttttactctaataaactctatataaccagcaagaacaaagcacaaaaatgggttcctgacttcttaaggaaaaattagagacttgaacggtccaattccgagttcaaatggccaagttatggccatttgaagtttatatgctatttaaatgaatatttacgaatttcttcatttaaattttaatttaaaaagggtttattgcgtcagccgaggggagagggcgcgcggaccgggtccacgggagtggggcccacgcggcagcctcacggtccacggtggaccgggtgcacccgggctcacaccggccggcgtcgtgggccccacgcgtcagccgcacccaagggcgcgggcggctgacggccgggccccacgcggcagacactcggcgcacccgagggcggtcactccggcgcggtcagtggaggcggcgcgcccgcgccccgatggtcgctgccggcgaccaccggcgcggcggagcggtggccgagagaggggaggtaagggtgaaaggaggcgacgg

SEQ ID NO: 14896 - DNA, 2367 bp, Oryza sativa
  unsure (1)..(2367): unsure at all n locations
caccgccacggtggatggccaccgccgcccgatctggccgcgtaggtgccggttgccgtcgaccctcgccgccatgcccgcttgccgccgtcgcctcaccgcgcccgcccggtcatcgcctcaccgcgcccgccatggtcgccgctgcgcccgcttttcgccgcctcgcaccgtcgccgccgtcccgcgaaagtagggagaggagagccgccgccgctcccgtctcgtcgtcgtcgtcgtcgtcgccctcgagcggggaagggcgagagagggatccccccgccggatccgggcggcggagggcggatccgggcgccggccacctcgctccgcgccacccacgacgatccctgcacccgcctccaccgtgtcccgcgcccggcccctgacgccgacagcgcatctcaccgccgccaatgcgctcagcacggcgccgctgctgccgggggcttccccgacgaagcccgcgcgccggtcgtcgagccgcacccgtgcgcctgccggcgcgcgcgtgagaagagagtaagggggggagagagagagagagttgagaggataaggatgagaggtggtgagaagaggataaggatgatgtggtaggggaggagagagagagttgagaggatgaattttttttgaaattttgggagggacaggtcgcgtgcgggtgagttaacccgcccgcacgggataatgtattttcccatgtgggcgatggcagttccctatttttccatgcggttccacttacggaccgcatggaaacaaaatagtgtggcgtccaggaaaatctattatgtagtagtgagatcattcgtcgaattattatcgcagattatccacttgattacatggttaaattaatgttttgataaataaacataacaactttacaataagtgatctaaacaatgcaataaaactatttttaagaaaacataattttaaagatgcaaaatggtgcagcaaataatccggtgaaataattgaaaagaacatgnccgttcatacattttcatacatttttaagtgttcggacgggatgataaaagttcaatctttaaaaatcactacgccagaaccctacatctgtgacggcatatcattgacaggcctatgaattggtcaaagatgaccgtcacctttgacgggtcgctatgtttgccgtcatcggtggggcatccggccgtggcccgtcacaggtatcccctcacctgtgacgggccggaaggaaaagctgtcacaggtgagaaagtgacgtgttttcctcccaacccgttactgttatcccctcacctgtgacgggccgtggcattatgagccatcacaggtggtggtccgccacctatgatggatttttttttacggcccgtcataggtaggtcaatacctttgacgggcaactcaattgaagcccatcaaaggtatgaccaacatctttgacgggcttttttaatctaacccgtttgaggtgtattgggtctataaataccccccaaaccgccaactgttttccatcccgaccagttcactgttcacaaatcggttgggaaggcaaggggggcgatttttttgctaaaattcaaggtaaaaaacatattattctccattccttctcaatatatcgatcatcatatatttttcttcgtatgttgttgatttcagatggatcgtagatggatgtactatgcgcatcgttcgtctaccgagtatagagaggggtcattgaatttgtcacatttgtggataatgacagaaaaagtaggatgagcatgcacatgttgtgtccatgtagggactgtaagaatgaacagatgatcgaagatagcgatgaagtgcatgctcatttgataatgaatagattcatgaagaaatatacctgctggaccaagcatggagagcaagagacgcctgatgtcgcagctgaagaagtgttggaccaggatgtagagaacaccgccggcgccgcagctcgagaaagcatgttcgtaccttctccttaaggtggagagaccatagatttggacactcaatatctatctacaatgttgcatgacattgaagacgcagaggacaacgacagagattttgagaagtttagtaagttggtggatgattgtcagatgcccttgtatgatggatgcaagtcgaagcacatcaagttgtcatgcgtgttggaactcatggagcttaaggctagtaatggctgccggacaagagttttacagaacttcttgagctgttaaaggacctgttgctagaggggaacaatttaccgcaaacgacatatgaagcgaagcaagtattatgtccgttggggttggaggtaagaagaattcatgcatgtctgaacgattgcattttgta

SEQ ID NO: 14897 - DNA, 599 bp, Oryza sativa
aataacaccgcataccataacatcccacttgtggccagggaggatagtacccctcatctgcagaaccatcctagccaagagccagaacaggcacccaatgctgttcctccccttgttgttggccgggatgccgatatcgacataccgcattggggaatcggtgtcacagaaggcaatggtcgggatgtttcccagagcagactccttgattggctgcagacataattcaggataacacgatcagtaaacaatactgtacccaattcaccaacgcactaccgtgacatggtgatcattttcacctggtgatcggtccttgggtcagtgaggatgagcagacggggctcgctgaaggaggtctggagctgattggtaaatgtaccaggcgtatgccttccagcaatggcgtgcgcgccagtgtactgcgcgaacttgaggacggcgcgctggccgtaggggcgggccgactggacaatgatgtcctgggggttctcaatggcaacaatcaccctcgccgcgagctgcagcttcttccatgtcttgccgaggttgatgatgtagatacctatgaattgcagcaacgatgttcacgtattcat

SEQ ID NO: 14898 - DNA, 548 bp, Oryza sativa
tgttgtccatgcaataagtgtaagaatcagaaggagtattctgcatccaggactattcatttccacttgtttgagtcggggttcatgccaagctataattgttggacatcccacggagagcaaggtgttgaaatggaagaagatgaagtggaagacgacaatattccggactttgctcagtatgttggatttgaagaaaatcaaacgggcgaggaggaaatagctgctgatggtaacgacgttgcggatgatcttggtcagatgttgcaggacgccagggaggactgcgaaagtgaaaaggaggcccataaattggacaagatgttggaggaccacagaacttcgttgtacccaggttgcgagcaggggcacaaaaagttggataccactctggagttcttgcaatggaaggcaaaaaatggggttagtgacaaggcatttggcgatttattgaaactcgtcaagaacattcttccggggggaaacaaattgcccgagacaacgtacgaggctaagaagataatctgcccgttaggactggaagttca

SEQ ID NO: 14899 - DNA, 559 bp, Oryza sativa
aaaggcttgtcagacctgctggtcttggtgtccccactggctgccttgcagatgacgctgttcgtgtgcttgcagcggcaaccggggcgtctcaggcggtcgtagcctcgctgggccagcttgacgcagcctgtggccggcaggtagcacagcagacagggcagcaccacagagagggcgcccatgaaggaccagcgggcgcagcagttggagccggaacaggagcaggggtggtcggcgcaagagccctcatcatcctcattagtacagtgatagaagataccttgcaccagacacatgcatgtgccatagttgaccagcgtctgagccgagcacaggcactcctggttgcagacccagcaggaaggtaacgtccgaggggacgcacactctttgcacttacactttccacaggcctcacacagcaagaagtgcttgtctagctctggcggagctgtcgggcctttgaggtccagcggcttacagtgaaccaccttgggctggaggcgcacagccctgggtgaggcctgctcagccacgggcggtggagccatgtgat

SEQ ID NO: 14900 - DNA, 542 bp, Oryza sativa
tcaaataaggcgcattttgccctattttgtcgcatcttctttttgaaaccccagccaaacaaaaacaagctatgtgtcatatccaaaatcctaaaccagcgcttcccgagtactcttgtcttcccccaaaatatcaggaaacatggaactcacttccaatgggagatgaaaccgctcaagccctcaccttgttaaatcgtatcatgaagctcaaggagcaaggtctgcaaggggaacagatcactcggcactttatcaaaagctgactggcacccatcaaggagaggtctcgtactgccttcgagtttgatggaaaaaatgatcccaatcgtgaagatcccgaatccctcgaattcaaaattatgaaggagagaatgtacaagattctcatctgccatagaggtcagttattcacatatactaccagtggtgccatattacgcattcaacccttctcctccagtgagtattgaaaactctttaatctccttgcgatatctgctcttctttgtaatgttcttgactaagggtttgaaatgtca

SEQ ID NO: 14901 - DNA, 563 bp, Oryza sativa
catcaccatgcctttgcaaaccctttatttcgagctttcactacatgtcaggtcacacattgtggagtaaaacacaaaagttagtgggatggcattgagttagcagtatccctacttgtggtcttcgttgatgaatagacagtgctggatatgcataagctcatcaattagagatgaaaagaatggatcgcatcaaatgcagtatcggagacttagaatgttgcagcagaatacctgtttaaaaaatccatggattaaggcaacagtccacgttgtattcttgagatggttccggatagctcgagacagaaactcgttccaaacaaacattgtctcataaacaacttgcccagtattcttgtcagttatgttcttctgaaggctgcgcatgatattgtaagagtagctgaagaagaagtctttcgagagatcgaccgagcaaaggagccgtttatatctacaaaaagtgaaaggtaaaaatataaatatccgcagacaatagaaatgagaaaaactctagatatagtatatttagaatcatactaagaagaatattagtggat

SEQ ID NO: 14902 - DNA, 507 bp, Oryza sativa
agtactaatgcattttttttctttttaaatgctcagtgggcaaggagctgttgcaactcaggtacatcaaacatcaaggatcaaaatttatgtgcaactaagctagtacctcttttactgcaaaagggtgtcctcaggactaactgcatagactgcttggaccgcacaaatgttgcacagtttgcgtatggcttagctgctttagggcgtcaacttcatgtgctccagctcaatgaaacccctacaattgaattgcatgctcctttggccgatgatcttatggatttctatgaacggatgggtgatacgctagctattcaatatggtggctctgctgctcacaacaaggtacttgcttaattctatttactgactcgttggagcataatttgtgcttcctctactgtgtaatacaattctcaaacaaatgcatctttcattaaacccttcttcatattcttattcaattgtcctatttttgtttctttcaaagcgatttttcttctt

SEQ ID NO: 14903 - DNA, 517 bp, Oryza sativa
cgattggcccatagcccgactgggtgtagtgcgaagagaccaaagtactgatggtagctaatcaacccatttgccggcataagggcgcagtcggtcaaaaacccgtgctttgatgccttgaactaccataccattggcgcattcgacctgtctattggtcatagaatgtgctacagaagcataacaaatcttgataccaaagtcttcacagaagtctttaaacacatcactagtgaattgggtaccatctataatgatacgattaggtaccccaaaccggtgcacgatgttgatgaaaaaatctcgagctttgtcggtagtgattgtgacgactggtttagcttcgatccacttggaaaatttgtccacagctacaaaaagatgagtgaaaccaccagtagcccttttgaaaggaccaaccatatcaagcccccacaccgcgaacggccaggaaagagggatagtttacaactcctgagttggtaagtgaatctgtatgggaaagaattgacaatga

SEQ ID NO: 14904 - DNA, 878 bp, Oryza sativa
  unsure (1)..(878): unsure at all n locations
tatttgaccttgtttttacaattttntaattagtgaatgctgtntctnaacactttttattttttgggatcannnanatcttntgtgttgtntntgtgttntnatannnnnnnnnnnnnnnaatggtttgatgacnttttgataacnnctgccngnagccnngcagncnactctagaggatcccctcgagagattgctggctggttgatacccgtgcgtaaccaaaaagtctcttattaaatgtatcctaaatcaaatatcggacgagcagggtctgttataacaaaaaatcgatttaatagacacattaacagcactgtttttatgtgtgcgataatttataatatttcggacggttgcaaaattgttaatgaataactgtcaggtagggagcctgatatgcctgtcgactttctaacctctgaccaaaaacagaattacggttgttatgctgcagaacctaatgacgtgcaactggcgcgctattttcatcttgatgaacgggatctggccttcattaaccaacgacggggcaaacataataggctgggcattgcgcttcagctcaccacagcccgttttctgggaacatttctgacggatttaactcaggttctgcctggtgttcaacattttgtcgcggtacagcttaatatccaccggccaaaaggttttttactgtctaggctaacgggagccttcctctaaaggaaattctggttttaataaaggaaattaccggtattatgaaattggggattgcccaggtctttcggctgaagggttgctttatcggcggaattggattggaactaaaacggaagggttggtttttaatattggccgggaatggatgttttaaaaatggattgccaacg

SEQ ID NO: 14905 - DNA, 834 bp, Oryza sativa
  unsure (1)..(834): unsure at all n locations
ggtttcttatcgaatgagcctagtgtagtttttcttatctctttttaagtggtatttcgctacttttgtatctccccccccnnccccccagttgccatttagatcacatgctaccccacnnnccgaggaagcgnncgagaacaagcanncacgngccggangngncnacaacgcacaacatgnggnccccgagaaggaacggaagtttgttgtgtcatggaatgtgatgataggtgctttcgcaaagaatgggcatggagagagggcacttgaacttgtggatgcaatgttgcgttgtgggatgcaaccagattcaatgacattcacaactttgctcatggcatgctgccactgtggcttggttgatgaaggtcttgcgctttttgagcggtttgtggaaaattctgcccttatacctactatggagcaatgtgcttgtattggggatttgctttcacgagctgggaggttcaaagaggctgctggatttattgatcagatgccaatcagaccaaatgcagttgtatggggtgctttgttatcttgaagtaggatgcaccatgaatgtggatcatgcacagatcgcttttgagaaactggttcaattggagccaaataaccctggaaaatttgtgactatgtcaaatatatattcaaaggccggaatggttgaggatgcaaagagagttaggatgatgattgacagggaggagttagcgaaaccttttggacaaagttcgggttaaactttggaaagaaggtttttttttgggttattcttgcctggattttaactgatacataaatgataggttattgttggggctgggcaag

SEQ ID NO: 14906 - DNA, 24638 bp, Oryza sativa
agggttggttcgaaccactatgtgtatccttcattgggaaaaagctctcaaaaaaggtaccatcacgagactccataattgtaccaacatgcatgtccggtacctcggatttaactattaaaaatctataggcaatgctatgatgagcatatcccagaaaaacacagtccacagtcttaggtccaagtttgcgcttcttcgttattggtacattgactttcgccaagcacccccatgtgcgcaaataagaaagtgatggttttctaccaatccatatctcatatggtgttttgtccttatttctgttaggaactctgtttaacacatgatttgaggtcaacaatgcctccccccaccatgccttaggcagtcccgcggtgtccaacatggcattcaccaagtcagtcagtgtgcggttcttcctttcagcaatcccattagactcgggagaatagggaggcgtcctctcatgtatgatgccatgttcctcacagaataagtcaaactcgttcgagaaaaactctccaccacgatcagacctaagcctttttatctttctgtcaagttgattttcaacttctgccttataaattttaaaatagtctagagcctcgtctttcgttttcaacaagtacacatagcaaaatctagtagcatcatcaatcaatgtcatgaaatatcgttttccacccttcgtcaacaccccatttatttcacaaagatctgaatgtaggagttctagtggtgccaagtttctctcctcggcagccttgtgaggcttgcgagattgctttgattgcacacaactatggcacttaaaacctttgacaatggaaaacttaggaattaaacacatgctggaaagccgagacatcaagccaaaattaatatgacataaacgtgaatgccaaacattagcctcatcatccacactgccacaaatatggttcacagacttattgcagaaattagaaagggaaaagcggaacaggcctccgcactcataacctttaccaataaaatatccatgtttagacacgactactttattagactcaaaaaccaacttaaatccgtctctagtcagacgggagccactaacaagattcctgtcgatagaagggacatgctgcacgttcttcagctgcacgatctttcccgaagtaaacttcagatctaccgtgccaacaccatgaacagaagcatgtgacccattccccattagaacggtggaaccccgtgcgacctgataagaagaaaacaatgagatgtcagcacaaacatgtacattggccccagtatcaacccaccaattagtagattgattaactgaaaaaacagtaggtaaattaccatacccgcttccatctccagtgttgccaatggtcacattagcagacttagaagtctgccctgcaggtgccttcatccccttgcgctgtggacacttcctagccagatgaccaacttggccacacacaaagcaagtcctctcatcctgattaggattgttgttgttcttcttctgcttcttgaagttggtggtctgctgagctttgtatttccccttgctcttgttctgggccttgtgcacaacattggcactggactgcccaccatcgcccttagacgcggcatctttttcccgagctttctcctcaacatcaagagacgcaatcaacccctcaacggagtattcctgtctcttgtgtttgagtgcagtaccgaaactcctccaagatggagctagttttgcaataatgcacccggccacaaatttgtcgggtaagacacacttaaggagttcgagttccttagccatggtttgtatctcatgagcctgttcgactacagaacggttgttagccattttgtagtcatgaaactgctccatgatatacagatcattgctagcatcagtagcaccgaatttagtattcagtgcatcccacaactccttagcgtcggtcatatgcatatacacctggaccagacgatcgccaagaacgctaagaatgcatcccacaaagagagtagtggcttcctcgaattgcttctgctgttcagcagtaagaactccttcaggtttgccagtactcacccagaagcatttcatagctatcagccacagagtgaccctgatctgccatctcttaaaatgcacaccggtgaatttatccggcctcagtgcatcggcaaaaccagccatagtaaaatcacagtgcctataataaggtttttggattgttgagattatagacatataatgatttaatctattccataaataaatcatgatattacagatgaaaactagcatgaacgcatcattagatctacacatgtaaactacacagtataacatgaacagatcaaatatgcgcaacatattgaacacgtaccgaggtgacggaaagaccggctgcttggtcgaaacttttcgcaagtgtctacgaaggcacgaaacacgcgagcgaagaggaaggcgagccgtcgcgaacgaacagggagcagtcgcgcgaaacgcttcccaaaaaccttattgccgccttctcccggtgcagaacgtcgaaggcagaggttccggagacctactctcccgatcgccggtgcacgccggcgagcgggatggagtagtctatgagcgacggtgcagtacagagtaggaggcaaaccctagattgattttttgtatgttgcgtgaagacggcaggtcggtttatatagagaagggtcgcttgatcagggcgcccgcacgatctctactgcgcgtaaccgaaccggataagtcgcgcgtaacttatccggactccacgccgtttgcacgcaccggatctttcggaacgtttccaaaacaaaaacgaatccgaatttgcaacaaaacaaaactgcaaaaggaggctgcatctgcgcaagggtgaggagccaatttttcggaccattcgacgcgtacgtcgtgcacgcgcgccgcctgccctgcccggcccggcccggccaggcgaggtgagcgagcgcgcgcgtatgtttcccctcttctctccaccacacatgcttcaagcgactaggagggcatcctcccttttaaggaggtccccctctcctagaataagcaaggcggtactaaactccacatgcatgccatcccatgaggtgggcttttgtgattttccaaagaattaatcttcgagtgggctaaggcccattcattaattccaacataaaatgttggattactctgtaaattaaaaaaaatgtgtggattgaagcgaaaaattttaagagttgacatgaaaaatggaattcacccctagagtcacttcgcatcatgggataaatagattagagaaatatgatcttgtcctatgtgtcactctgataccctcttcgagttcccttagaccattcctagtggagttttattttgtggttttcaagggtgccatataatctaaattttcgtggtttcatattctactaactaggaaggtggcccgcgcgtatgcgcgggcacttatattattgaaaggtaagactattgtttgttcagaaattttgtctcatagattaagggcaaactaaagtttagataatgttattttataataatttaagggttctatttttcttaacgtatcttaaaaaactattcacaaacttttgagaaggagatggattaagtacttacgatttttgaatcatgtttcttttttctcgagtaaagaaaaaactattgctagttaattatcatatagtccatctatatgcgtaccgtgtagtatgaccgcaaatgaaaaatgcgagtgcaagatactcaaaattctttgattaaattgtctcatgaaggtgcatgatatagtaataaagagagggaagcatatgcatgggaaaaaaaaagaagaaggagaaaaaatgaaaaaagggaggggaaacatacgtacccatgcaggtaggtgcgtacctatgtcgtgggaggagaggtgggacctcgtagtatttagtttgttctaagatcaatttaatctaacggtttataatattggacctagcgatttaagtgaaaaatcaagaaatagatactttgtttttttcttagaatttctaatatttgccctaatttattagagcaccacgtcgcagcttgagagcattttaaggaattttaaatgacttaacacatgtaattagaatattaactgtgcaatatatatgtatgggacatatggtaatatttgttctagcttcgtccatgtttatatacatatagagtgaaattaattttgtggcttgcaagccattagatgtctaattaatagcaattatgacacctatttacaattgttcagagtaactcttacatattcatgttgcgactttaataatttatcaccatgactcgcatgaaaaaaaatgtagtacttaaggtttaggatagctgaaattgatgaattatataatttatgtgatattattttgagggtataaacgaatgaattgacttctaaaaagttagaatgttgttaatttaaagaatacactatttagaaacttggaaagcgtgcaaacaaaaatccaaaatataaaatcgggaaaaaaaagagagggccttaaactccttttatcacccttatcgtagtaagagttctattaatattcgtcaatattgcgctcacatttataacataataattcctttcacctatacgaacaaatagtacaaaatccaaatacgacataacatagatacattataattattatgtaatcaactctcggtttcaacttaaacagagctaattagtgttgagaaaaacacaatccattgtgcttaattattctctcgtgcatcacacatttaattttctttttatgttattaacaaaattaatcatctctatatatgatttgatttgtggcaaagtggtagctctacagcggttgtgatcaccttatatgtctcagacactacactttgtcacacgtgcgaaaggcaaaggtgcagacgtgtattatgcagcgggcaaaaagaaaatttcggacgctttatttattagcaaacaatagatccgatgattataataataagtccaccagttctagtgtaagttaaattagttaatatagattttaaattgttaatttaatgggtacgcaatataatggtgtagatcttattttgaaacagtgcattacttgagaataatataccaatgtaataaaaagtagatccgatgatttatataatggggccatcagtttaaacgcatgtataaattagttaatatagatattgtttatttaataggtacatatcaatataattgtgtaaaatttattttaaaatagtgcattatttgaaagaaagattctttgttatatgatggtagattctttgttttgtaaaattatgattatttaaaaaatatatccattatatatatataaatggaaaaaggaaaaaaaggaaaaaaaaggaaaagaaaggaagaatacatacatgtacgtacgtatatactccacctgccaacgcgcgggaggaggataggtgggacccatggtatttagtttattttaagatcaattttatctaacggtgtataatattggacttacaaatttaagtgaaaattaaggggtagatgatttgttttatcttagaatttcgaggattttctctattttattagagcaccacttggcggcttgagagcgtttaatagggtcagaatataaatgtgtaaaatttatttttaaatagtgcattattagaaaggaagtttctttgttatatgatggtagattctttgttttgtaaaattatgattatttaaaagaaatatatccattatatatatatatgcgtatatatatgcgtatgtgtgtgtgtgtatatatatatgtatatatatatgtgtgtgtgtgtgtatatatgtatatatgtatatgtatgtatgtatgtgtgtgtgtatatatatatatatgtatatatatatatatatatgtatatatatatatatgtatatatatacatatatatatatatacatatatatatatatatgtatgtatgtatgtatgtatgtatgtatgtatgtatgtatgtatgtatgtatgtatgtatatatatatacacacatatatacatatacatacacacatacatatatatatatatatacatacatacatacatatatatatatatatacatatatttatatatatacatacacacatatatatatatatatatatatttatgcaaatgaacaatttaccttaattctacccctagtagctagagatcactgcaacagttgtcaaaatcaatgtttccattggccaatgcaagttgagcttgcaacttatgcagcgccccatgttatgaattgatcgtaaaaacaacctagtacatccatctgacgacatctactctttctgttccaaaatataagaatgtaggactgggtgggacgtttcatatagtataacgtatctggacagccctccgttccaaaatataagaacctagaaccggatgaaatgtttcttagtataacgcatctggacagacggacatatacattgtactgtgaacaattccatccggttctaagttcttatattttagggcggagggagtacatctgtttttaaatatcaaaatcatcaataattttcatcaaaaaaaccataaatcattagtagacgaaataaattatgatttaataaataaaaatagtgttagtatattttttgtgaaaacacttttatattgctatacttttatattttttttataaatatatataagttaaaaatgtaatgatcagatatttacattccacgttatgtcaatgtctaaaacgacatgtaaaaataaaaactaatgtagtagtactatttttacatctcattgtcatgctttgagatgcatgcttactaagctgaagtccttagtctctatatattaggggtttcaacgtcatttactccgtcatggataagatggaaaagtagccatattatatcgatcttagctaaaaaggccaatacctactcccattcttttcaagaatttgttgaatctggactaatcgctgaaagagtgaaagtcacccgaaagcacagttaattcaaaggcacggaacatagaattcattcatcaccacatattaaggaaccagcagacggactgactcaggacgatatgtgcaaaacaagaagaaagacttgaccaacagcaacatcaaatggtgatatggtaggtaggcactcgtagacttattactctcgccggttaatacagtaaccaaacggacggtacaaatcacactttggcgcaatccgccggagcgaaggagaaaatcccgccgtcgagatcgtagagcaggtgcatgtccatctgcatcacgttgcctatgacagacatcggctggtcacccttcgccggcagcatcatcaagcacgctacggtcacactgccctgcgagtccgtctcaactccggcgaagtaagttggcacggcgtactcagctccgccatcgaagcgcagcaccagactcggcacggttatgccgccgccgccgccgccggtactcttgaagcacaggtccaagccgcgcgtgccgttcaccgtggtcacgtcagccgtctgggacaggaaggcctgcttcaccatctcgtagccgtctttggcgaggtacgtgagcgtggtgccggagtccacgatcgtgccgccgccgaggccgttctgcgtgaagccgaacgtgctggtcgtcaccgggaggtccgtctcaccgacggtgatgccggtgaggttgacgtagtagtacgaggggtgtaccgcggggttgttgacgaacggcgtcgactggacatttccgtccgtaagattggccagggagccgaacagtatcgggctggcgccggcggcagagccggagcggaggcagtacgagaaccggccgacgccgagctgcggtatgagggacagcgcgccgcggccaagacccgcgatgcccgacgtcgagttgcccacgccgttctccgtgctgcacccgaacgcgacgctggggaaagaggcgtccccgactttgagcgtctcggtggcgaggtagcccgcggtgtagccgctgccgtacttgtagttgtagacgcagccggtggcgttgcacgtgcggatggagttgggtaggaactggcagaaggagctggtgcacgggagcttggagaaggtggaggagctcgccggctggaatggcggcgcaggctgctggaagcatttggtgcacggcgcgcactgcgtccagatgaggtcactgccggtgtcggccacgaccgagaaggtgagtagcggcgtgccgacggagatgttcatgttgtaccctcccacgccgttctcaagcagtgcctggaaactgaccgacgagttggtggtggtggccttgccggctgcggtggcgtcggagagaaaagcgatgcggtggctgtcgcggcgtaccgcttccgagtatttgccgggggagagctcgtggatgcgagtaagagtggcgcggaagccatgaagatcgccggcgagagttatcggcgggaggaggatgatgacgagggctagtatggcagcagtgctggatgacatgtttcctgtgtccctccttgtcgtctttttcgtggtgttggtttgatgaaggttactcgatcttatatacactattcaacaactcatagttgatccaagttgcatttgaaatttcccttaaactgctattagaaaccgcgtgctaataattcaaccaaccgttagtttgtgtcaaatctaataacttattaaaggaataaaaaaaagcatccacgttcgctctcacggcctagaaattctcatattaatcggagaaaaagaaaaataaagtccatatagaaatacaatttagaaatagttaaaattcagaattaaaaaataagtaatattagaagaggagactagagtccatatattaatataatttagaaataactaaaattcgaaattaaaaattaaataacattagaagcagagtatagagtccttatagaaatacaattaagaaattaagaaattatagaaattcggaattaaaaataaggaatattagaagtagagtatagagtatatataggaatttaaaactaacgaaaattcggaataaatataataaaattaaaagtagagtttagagtccgtataaaaatacaatttacaaataactaaaattagaaattaaaaaaaacatgggaagaagagtctaaagacaatataggaattcaatttagaagtaactgaaattcaaaattaaaattaaagaatattgaaagatgagtttaaagtccattagaaataataaaaattcagaattaaaaataaataatattaaaagaagagcctagagtctacagataacgaaaattagaaattaaaaaataagaaacattcaaagacgagtccagagtccatattggaatataatttagaaataactaaaatttgatattaaaaataattaataactaacacatgtataaaatacaatatgaatattacacacttgtagtttgtaaagttggttcaaaatttaaaattatgctgtcattttaatatattttaataataaattgagaaaacatatatgttattatatgagaaaaaaatataatgatgctagccgcgaaatctacgcgggccaccaagctagtatatgtaaaaataaaagtaaaacttaaagttatactaatacgtattacaactgaaaataaaagaaaagttggtgaagtgctagagatgtgtcatgactctacgtctccatccactattttttctttcgaaaccacttatgttcaaataaatcttgatggatatggttttcatctcttgaggagatgccccattgtcatttgcattgtcatctaaatagttataacaaaactgaaaaaaattaacaatatagattaatataaaatatatcactccacaaacatgcaagccaaattcaacttctataagttgtaacaaaaagaacaaaataaactgaaaatagttattgtacattcgtagctatatttattattttttgttacaacttgtaaaagttaaattttaacttgcatgcctgtggagtgatatatttcatattatttttgcgacaacttgtaacatttgaattttaacttgcatgtttgtggagtgatatatttcatattatttttgcgacaacttgtaacatttgaattttaacttgcatgtttgtggagtgatatatttcatattaatctatcttaccaatttttttcaaagttttcagtgactatttaggtggcaagcacaaaatgaggggatatttcatcgagggatgaaatcactttcccaatctttgatacattagagtaaagtacacagccggtccttaaagttggagcgtgctgtcacttaggtccatgatcttggaaaatcgatattagggtccgtgatcttgtttaagtgaatcattgtggtccaaatacgtctaactgggttaactaccttacgtggcggtccagcgtggcaacatatttgcagtttggcccctgcattattttgcttccccctcgtctgatccagcctctacttagcatggcgcgcaacgatgtggccgatggcaccgacgaacgcgcggcgcggagcgtgcggtcaatcttggattaattcaaggaccgcgttgcgccggatgccaacgacatgaggtgagtgctctaccgggtaagggtcggtggctggttggattgctccgaggagattgcgttcttggagagcgaactgtgtgcacagctggacggcgtgacgagaacagcaatgacgttctcgtcatgaacagcttaatagtgtttttgtgtactgccgcgtcacgttgttcgatgacattcaccgactgagatgacgacgacgcggccaagtgggcaaagaggcccggctgcgagaggatggccacggcgctcgatggctgctcggctatcctcgccagcagcgcgatgctttctccggccaggtcgtcgcggtcggtggagagcaaggtggcgagggctgacacagtgcccgcggcgatggccctgccctggttggctgctctctggagcagctcgtacaggctgaccatggtgttcttctggtcgcggtacacgccgtctaggatgagctggaccagtgttgggatcacctccgggatgcatccgggttgttcgacgagaggtagaagaggatggccgctacgttatgctgcgccacggccttggcaacgacgttgatcacgtcgacaacgaggccgacgcctccgacctccatgatggtcatctgcccggcggggtgcttcaagaggttgagcagcgacgccacggcattatcctgtatggcggcggtggtggaggagaggaagcatagcagccaaggcacggccttgtcgtccacgaggcacgcccaacagaacacgttgtgcttcgacaacttccgtgcctccgatgtcaccttcctccactcctccgtcgaccccctggagagctgcgcgacgttgtactcgacggcgagcgtgcggcggccgtgccgaacgacacggtcgtgatcgcaacggcgccttggcagtagccaccgtgggtagagaagaagatttggggaagaagggggtaggatacgcgaggaaagtaaaatgcggggggccaaaatgcaaatatgttgccaagttggaccgccacgcaaggcaatcaacccggtcagatgtgttttggaccgtaatgatacactacaacaaaacatgtgtttagagatatcttatttatagtctagagacattttgaaccgtctttaggcatacatagagtcacttctgcaaagcgtcccagaagcgtctccgttaggaccgtctcaaaattataaagacgctccatatagcatctctacaagatctgagacatgaaatagcgtccctacgttagttgagacgcttttgtaaatgagatccaataacgtgtctcatggtgcgtccttatgagtaactgagacgtgtacatacgattcattgtaggatgccatgcttggcatatttacagcattcacatctgagcagtatatatcgccatcaacatatataccaaaatgacagtaaacagtaaaacactccaatagatgaaaggtaattatattaaggacaattgtgattcacaagtcagctaaacagccatacagaaaaaagagatttgcgtcatctcttagaaaaataaatttataactcttcctaagataattcttgttttatctcctcccttcttcacagcatgataaaatatatctataactgttcttaagataattcttgctttatctcctcctccttcacagcatgatgtagcaatcctttacaatcttcagtatcttctaaaatgaattgtgtaaaccaaatcagtgtacatgataagatttctaaaaaatgtaagaaagctagctaagtttactaggccataaacagagaattagacaatctatacatgtattgattcatagaagatacacccatcacatatttcataattgtcaggagcttattcctagcattgtttactagcttcagtaaagatttattgaaatcgacccttaataaagtaaaacaaaataaagcacttcaatttgtatatttctgaacaaagagactatagccatactacagtattaacatgagaatattctcctacagatatccaacaatttaccttaatagctacttgttctatactttttatgtggctagaatttctcatcatcactataagtaacaggtaaaaacttatgatggccatacctttgacactttagcagttgctctccctcctgcatgtaaatactttggaaacttcagcatatagaaagcaaatctcccattttggaccagcatctctattcctttactcatatgccaccgaaggacagtatgaagaaccatcgcatcattcagaactagtgtccgagatccaagttaaacaagcattaataccaatatttatttcaaagtgaatcgattagaagattgagttgagtcaaagcaatgcctctctgtgttttaatgtgattttgttgctaaaactacttaattaatgctgaactaaagcaggggaaagaacacagcgttatgcaatccaatactccaaataaattttttgcaagcgataccaaattaccaagtgattatccttctgaacaaagtatacaacaatcccaaagtatcatcatcagaattttttcctaaaaatctgcaaaaaaaaaaaagttaccttcaacaatactcatctgtatttttgtgccttcttgaagctaaaattccaaatgtagtcatcaaatggaatggaatcagtagcaaaaaagaatttataatgagcccttaatgatcgacatattggtattgattgatccacagaggttcacaaatcatcaaattgattatcagatctgcatcatgcaagtattggtattagcatttcgtcaaacaactagtacgatggttcatccctgaagcagaaagaacgaaaggtacagatcaatatttactcttttatacttctgcaggattacgaaataatccgatggggtagaactcaacataaagtctggacaaattgaatcacacaaacaaatcaaagcacctttgtagttccttaagccttacagattaggggatgagagagcatacctaccaagctaccaccgtggagttgtcgctgggctggtgaaggcaactgagggagggacgcgttggcgacggggagtcgctgataaggcggcaaactgccagcggtggctcctatggcgaggatcagagcaggcagtggtgggcggcggcctgaggaggaggaggcagatgtggcattgactcgccgaggatgaggcgccgctggcccccggtcgaggacgagccggcggcaggcatcgagatggcgaccggtggaagataggcggcggcaccaagcaggcagttcaatctagatgggagtttgttgcagcacgcagagaggatgaggacgtgggtggtttccaggagaaaaaaaaattcaatgtaaatcttaatttttgagaaatcaatgtaaaactagggcgttatttaaaacgtctcataaaccgtctttattggcggggtagcctagaaaatagagacgatttaagtctcgtctccagccaaatgtctttatttgttgttttgttgcagtggattcacttaaataagatcacggaccctaatatcgattttctaagatcattaacctaagtgacaccgcgctctaactttaaggaccggccgtgtactttactccttataaatactatagtttaagacaatggcgatgggacgtctgctgggattgtcagcaatactactgatgcagtagtagacactgacgtgtggacccgcacccacatgttagccgctgctactgcatcagcaatactagagaggatgtgcatccattggacgctagtgacgagagggctccaatggtccacagtgacggaggagaagagaagggaggcaggaaccgacgagctcatagtcctacggctgtggcttgtcgtcacaggcggcttgctctttttttattagagaaggaaattttttttagcctttatgtccaaccggatgtataaagccttcttaaactagtaacttaacccttaaataatctaatcttaaattaacttagcccttaacctttaggctacatgcagtttgacaagcggcttgctcttgtaagactcggagctgtcgaggagctccgacgccgcggcaggggagaaagctcggaccgtgtcccaacaagcccagagccagccacgtggaggccgagcggaagcgctggaagaagctgaaccgccagttatacgacctccgcgttcccgcatggcaagcctcctttctcgctgatgccgccgcgcacttcggcgacctccacgcccgcgtggccggctcgaggtcgacgcaagcctgaattgaaaaaaaggcttatttggctgatcagcctaagagcaagttctactaattttaaatcatctatagccaatgaaatagccaattcatacaatagttgattactatactattaatacatagtctcacatgtcatatacacattatgtcttggagtccgtgctgcagctgctggttgctcttctctctcttccttttatctctttaaaatatatttatagctggcttatagcctgctattgtatctactctaagaatactagatgaataccccgtcgcgttgctgcggtctgctctaagaatactagatgaataccccgccgcgttgctgcggaaaattaagttacataatatgtacaaataaaatataatttgattatcaaaactaaaacaatttgatacaattttaagcctaaaaaattgagattttatgttttatgagagaagaaagaaaagaccatttagactatagatctatcattcaaaagctaaaaataattgagatgatgtggcttaatgagagaaaagagaaataacattaactaaacttagtggggatgaactatataagtactgcaccatccgtcccaaaaaaagtgcagttttgcactattaacgttcaacgtttgaccattcattttatttaaaaaatttttatatctagtatttttattactattagatgataaaacatgaacagtagtttatgtgtgactaaatacttttaatttttttacaaattttttaaataaaacggacggttaaacgttgggtacggatatctacggctgcacttattttgggacggaggtagtatataggatacttaccgatgaggacccccagctccgacagcagtgcgtatactatcacccacaatgtactccctccgtactcgtaaaggaagtcgtttgggacaatgtttaagtcaaaccttgggaatataaatcatgaataactctcaagttgttgagtttgaaaatgtaaaaattatatgaatagatttgccttgaaaaatattttcataaaagtatacatatatcacttttcaataaatatttttatataaacaagaagtcaaaattatgttttggagaccgtgtcgctgtttaaaacgacttcctttacgagttgagggagtacttggcaaggggagagaaggggggatgctaatgcgtgcgcgcagccgcgcacgcccctccccctgcgacgccccctagtccactgttcactattgttccgttatacaaggacatggcccatcattatagttgggccgtccagctaggtgcggcctgttgggcccaaacgaatttgcgagtgacgtgtggcctgtaacaggccacctgttacacttgacaggatcgatggtcttctcttccgctgccaatcacttgtcggcgtacggggagccctggctaactgagaatttggggatcacttcggcacgtcatgcagtcatgctatagctctggcaacggatctggtatggtgtgttgtactgctgtttcgatcgatttcagtagcaaacaatagcaacacaaaatgcatcgaaagcttgatagaatggcaggcaaatacgtcaaaactcattcaacacatacgctataataatatactccaactagtactaacgacttccgatcctcaaattcttgccgactcagcagttgggctttgcaatatttagcacgatggcgacgaccaaggtgaccgcgataagcaccgggaggaatgtccgcaagagagttttggccaagaagcttgtcacgaaacaccacaagaactcttccaaactggacggacaccggtgaagattcgtgagccctcgccatccggcgcgcctccagatcaccttcccgaggcagaacggcgcccagatgcccgggaagcagagcagcaccgatgccgagcacagcgcgtggacgaacaccaccagccaccggctgtccgcgccgccgccgagcgcgacctggagcccgaacgcgaacgcggcgaccatgaactgcgccccggccgtcacgagcgcccacgccgacccctggtaggcgcggagacggcccctgctcggccggacctccctcgcctcgccgacgacgaggaggcaggtgcccacgatggagcagaggaacgccatggtgtccgacaccgcgaacgccctgaaggcgaaccgcccggccgacgccgccgtcccggcgttcgggtggtcgtcggcgacgtagccccccggaacggtgagagccgccgcgaacgtcaccgtggcgatcagcacggacgcgactgttccggtggatgtcacgccaccactgtccttgggagcatcggcatcctccatggccgatgggatgccagtcctagcatgatccccttctagggtaaccggtgctctggtgcagtagaagagattctttaccacggctcgaggattctgtacacaaaaattatcacaagaaagaagacagattaattggccaagtaaacaggacagcacatgaaacgattctctgcagctgcgtgataaccaattgtgatgaactaatgaactgaaccgtgttccattaccagaaaatagtgcaaaccaggttgcagatggcgataagcaaggtcagcagcagttagaccatccctgttggtaatggctacatcgacgctcatcgtctccaagagtaaactgaccatccttgggtgcccatactcggcggccaaatggaggggagtatttccttcattgtccattgcattcatcaggataccaaacctgtcatctcggcaaatgtagcgaactatgctttccttgttatgttcaacagcacaatgcagaaaatttcttcctcgatcatcgaccaaatcgttgtagttgttggggcatttctgtatgagctcaacgacgatcctaacactgcccatcacagcagcaacatgcaaaggaaatgatccttggatatcacaaaccagagctagggagggctctgcatctaggaacagctgaaacacgtcaaaccgctcaatttgtgatgatatagcaaagtggagaggtgttctgcccgacgaatcagctttggttagcagtgttcgaccctctggcttccagtccagtatttctcgcgcgatttctgattaaagacataaattgactttgaattttcatgtgtcattcacaaattgctcgcgtgtttgtgatcatacctttgctagtagttgccgcagaatgcaaagctgtccgtccgtccggaccagcggccgaggccggcgagggcgttccatcaggcaacgggtggagcagcgcccggacaatgtccacggagccaaccgtcgccgccaggtacagcggcgagacgccaccgtcgttggccacggaggccagctcgggagcctccgccatgaggagagccaccaccccggcgtggccgttccgcacggcctcgtgcaaggcggtggcgcccaggcagttcgtcgcccgccgcagcggcagcgccgctgacgccgcgccgccggctcgcagcatctctgacaggaggcaggccgccacgtcgcggtgcccggacttggccgcgcagtgcagaggcgtgtcgaggaacctgttgcgcgtggcggccagcgcgggcgccgtcgcgcagaccagcgccgcgagcgcggcgtgcccgcgggtggcggccacgtgcagcgccgtgttgccgttgcccgtcgtcacgccaaggaggcggctcgctcccgccggcgcgcggccgtcgtcgtcgtcgtcgacgcgtatcgccacctgggacagggagtggccatggccacggcgttctctgcccagcaggtccgccatgcggacctcgtcgccggaggtcagcacgtgtagcagttcggtgtcgagcgtctcgttgcaaggtccgaaatccatggacgcaccgtgaccgtgagtttcggctatggctttggctggtctagacgagaaggtgaaaggtaattgatctaaacccggttgaaaaatccatttcgcgctattccattccatcacttgatttcgctgaaacggagactagtagtcaacaaaaaaaaaatccccatatagctaccggcaaaagcaacacaggtgagttggcatgcgaggattgggggtctcacgagtggcagtggcggcaaaaagccgtattctctctcctcccctcgcgctgcaagtcccaactgcagaactgctcagcttttaaaattgaaacagataaaccgaaaatatgtggtgcaaacctaaaagttatcattagataaaaatagatgcatggaatttgttaattttatcaagggtaaaagttttacttgtaaatttaattatgagtaaaagttttactgggagtaaattttttttactcttgagtcttaatgacgtagacaaatttttaaaagtctatttttggattcaacagtaattttcactatatatttttcttaaatataaacggttcctcttttttccttcgtttcttggacaacgttgatgatggtctcccagtaagatcagaaggcatgcaatggttcagaaaccatctcagagacaccatacagcaccaaaaagtaaactgataaaaacatccactaaattataatttaatcaaaaggaaatgccctccaggggcaaaacgttatgcaaattaagcatcatgagaagctaaatcagttctctacaatacacaccaaacctcagctagaaacagagcgcaactgacgatcacctgaaaaatcactcaggggtgtttagatccagaggtgtaatccgtcattagcaaatgtttactgtagcactacattgtcaaatcatagagcaattaggcttaaaagatttgtcttgcaaattagtcgcaatatgtgcaattagttatttttttaccctatatttaatacttcatgcaggtgctcaaacgttcaatataataggatgaaaaattttacggtggggtcttaacagagcctaattcaatttgtaggatcgaaacacaagaactaagccaaccaaaggggggagaatggttggcttacccaaaaaccaaaacttttagcggaattaaaagttaccctcaaattcgacagattgcggtctgaccgaagtgtatatgccgatctgactgcctgaagaacgtcggtctgaccgaagttggaacttcggtcgaaccgctgagatcgcctgccagctcctgtcgccgccgccggtttgatgagcaccgctcctccgccggtctgaccgacgcgatgccaccggtctgactgccggtgtctcgccggttggaccgccgcacccaagaaaacacaaatagaagaactctcaaagtagatgacaactttattgcttttctctgtgtttacaaagtacaccaacagcactccttacaaaaatttcgactaaactcaaaaccctaactaaactagaaactcaatttctcttagaagcgataccgggaagtctcacgctccctctctatttatatatgaggtaggcagcctaaagccacgaaccaaactcatactagaagttctaatcaccctaggaaaccttctcgtacaagaaataaactttacataaccaatcataccaaatttgtactccttccaaattcgactccacaacccatacgtacacaatacctccatcatatgccatatagaatcatcaccaaccacgtgcattgaactctagccaaagtatctcgcatgatatctaacagtcacggacatcgccttaccaccaagtcgactctcgatccatcaccgcaaatactctcccgaggcatcaagtcacctacacatgaatcaaacaaagaaaccatattcccagaccaagctatccccaacttgacttattagtagcaaacaacagtattacatatgtatagtatccatctagaagccataaatatgaaacaatcaataaacaacccgaaaccgaaaccgacacagcgtcgaccagtcagaccgcgagctggccgatctgaccgcttgatcaccgccggtctgatcggcatacacagcctggtctgaccgaacccaaaccgcagcagttcctgtagatcacctgaaaattccaatcatctccaaaaccatttcgcaaataaattccaaatatcaaaaccaataaactccaattccaattgttcatcacagaataataatcaaaaacacctttgattttacacaattctacaaaaccatcatgctccagtcaattatagagacaacgagacaaatatccgcaaacaacaagaaacttcccctctttctaccctaggccgagttgtaaagagaagttcaggagagctacttcacgattttctgtgagcaccattctcagactacttcccccgtcctaaaatatagtctttttaagattgacacgggtattaagaaagtatgtgagaatgattgtaggaagtgtgtgatttgttgaaaagagaaagtaagtaaagaagaatggttgtgattggttgagaggaggaggtaggtgaagaaatagcttcatcttgtgacaagacattgtgctaaaatagctacattttaggacagaggtaatacttaaacattatattttttctaggagtttcttttaaaaaaattaaataaatctatttttaagttttcaatagcttttacttaattagtcatatcctaatgacttattttgttttccgtgctaaaaaaaagctcaccccaacctaaatttcaaaccaagccttatccatttcccatgcatttttgcgaatgcctatcgcatagacgcatagtatgtcatagcgcttgtaatcttgtatactccatccatccaaagaccaatcctagcattccaatgtaaatttaatgggagaaaacttgaaaccgaagtttcagtaaatttgcaattcaaggaagagactttgaagcgtgcaaactaatgtcatctcggctgttctaggtatatgtctgttgagtgcaaatcaatatgaacaaatgaatgttcatgcaccagctctgctcggtggacggtctaatcttcaaatcaatctgaaaatcaatatgagcctagtgataagcagtttggtcatgtaccacctctgctcgttagacgttcgcgcaacaggaacatcgccgctgccagtaagagcaaggccaagaaattcctgaagagggacgttgtcattcacgggcagctcatatgttgggtttagtcctacatcagtaatttattatggaggaacatgacttaaaaggtagggacggacctcaccgatcagattagtcttttgggttgtataggcctagaacctaaagttgtagctccggttgggcctgtgatggagcagatccaatgtgacctgggtggcccacggttggtgggccaagtggtatcaaagcccaggattggaacccggaacaataggtaacagggccaagtggtatcaaagcccaggattggaacccgaaataataggtaacaagtcttttgggtcatggtgaacaataggtaacaagttttcggggtcatggtatgggttgatgtgatgtgattgataatgggtagcacgacttacgtcaaagattgttgggtttagtctgacatcgagaattgatatcgggggtcacatcggtaattgtaattgatgatcggtaattgatgatggggagcgtgacttaaaggtgggggcagtcctcacctatcatactattttttgggttgtgcagacccaagacctaaagttgtggctccggttgggcttgtggtggagcaggcctaatgtgtcctgggtggcccacggttggtgggcctaacaagtggtatcagagcccaagtttgaaaatggttttgtcccacatcgggaattgatatcggggtcacatgggttgatgtgacgggggagattgttgggtttagtcccacatcggtaattgatgatcggtaggggagcgtgacttaaaaggtgggggcagtcctcacctaaaagattgggttgtgcagacccaggacctaaagttgtggctccggttgggcatgtggtggagcaggcccaatgtgacctaggtggcccatggtcggtgggcctaacaagtggtatcagagcccaggtttgaaaaccggaacaattgttatgttcattcccacatcggtaattgaacaattgttagatttagttccacatcggtaattgatgagagggaagcacgacttaaaaggtggtgcagtcctcacctatgagactagtcttttgggttgtgtagtcctatgacctaaagttgtggctccggttgagcatgtggtggagcaggcccaatgtgacctgggtggcccacgtaccctagaacctaaagttgtggctccggttaggcctctggtgaagtaggaccaatgcgacctgggtggcccacggttggtggggctaacaagttgtatcagagcccaagtttggaaaccggaacaattgttatgtttagtcccataacggtaactgatgatgggggagcacgacttaaaaggtgggggcaatcctcacctatcaaactagtatttttggttgtgtagacctatgacctaaagttgtgactccggttggacctgtagtggagcagacctaatgtgacctgggtggcccatggttgctcctgttgggcctgtggtggagcaggcccaatgtgacatgggtggcccatggttggtaggcctaacaagtggtattagagcccaggtttggaaaccggaacaattgttaggtttagtcccatatcggtaattgatgatgggggtgcacgacttaaaagctgggggcaatcatcacttatcagactaatcttttgggttttgtaggcccatgacgtaaagttgtggctccggttgggcatgtggtggagcaggcccaatgtgacttgggtgacccatggttggtaggcctaacaagtagtcccgcattggtaattgatgatggaggagcacaacttaaaaggtggaggcaaacatcacctattagactagtcttttgggttgtgtaggcccatgacctaaagttgtggttctggttggatctgaggtggagcgggcccaatgtgacatgggtagcccatggttggtaggcctaacaagtgggatcagagcccagagtcttttgggttgtgtagacccatcataaagttgtggttccggctgagcctgtggtggagcaggcccaatgtgacctgggtggcctatagttggttagtaggcctaacaagtggtatcagagcccagagtctggcccaatgtgacttgggtggcctatggttggtaggcctaacaagtggtgtcagaggcagagtcttttgtattgtgtaggcccatgatctaaagttgtggttccggttgagcctgtggtggagcaggtccaggactagttttttttgggttgtgcaggtctaagacttaaagttgtggctctggttgaacttgtggtggaacaagcccaatgtgacatgggtggcctacgattggtggacctaacatcatcatcagggagggcggcagcatgtcagcgactgcaaatgtggcagtgtggatttttcaccgtgccaaaaaaataaaaatgagatgggtttgggtcgagagccttactgagagataggggagggatttgcacaaatttt

SEQ ID NO: 14907 - DNA, 2348 bp, Oryza sativa
aaccggataagtcgcgcgtaacttatccggactccacgccgtttgcacgcaccggatctttcggaacgtttccaaaacaaaaacgaatccgaatttgcaacaaaacaaaactgcaaaaggaggctgcatctgcgcaagggtgaggagccaatttttcggaccattcgacgcgtacgtcgtgcacgcgcgccgcctgcccggcccggcccggcccggcgaggcgagcaagcgcgcgcgtgtgtttcccctcttctctccaccacacatgcttcaagcgactaggagggcatcctctcttttaaggaggtccccctctcctagaataagcaaggtggtactaaactccacatgcatgccatcccatgaggtgggcttttgtgattttccaaagaattaatcttcgagtgggctaaggcccattcattaattccaacaatcccccaccaaatctcaaaatcccactgagatttgccttttccaatgtactgtttatataccagcggttcgatggagaccaattaaggttgaacatccacctagaactccaagctacacttactcacaacttgaacaatggactacgccttgaattgcaagtcttgtgcaagcaagtttcactcaaagtcttatctggcactagaccgtctgtagactacccctcgggtggagcgtataagtcatactcctaggtctttagtaagcttcctagaagattcacccaaaatcttcatagactgcgaccaacagtcaagctcacaaagttgagttctttcaagaatgctctgcaggacaacatctttgctaattaaagccaacagaactcattaaggcatagccaacctgccttgcagctcacgagagtatatgcatcttcacttggagagggtatatatattggtactctcctctagtttattaatggtttgttcttcccaggatctaattcacgggatctccgatcacataggctgggttaccaccatagtataactcacatgggtctcaaacccatctccttcgatgcattgtctatcacatttcgtgatagtcccttcgtgaagggatctgccaggtttctcgctgtttggatgtaatccaacgttataactccggagtttcttaatttcctgacagacttcaatcgtcttttcacatgtctagacgatttcatattatccttagaactattcacttggacaattaccgtttgattgtcacagttcataaggatagccggcaccggtttttcaacaacaggcagatccattaatagatcacgcagccattctgcctcaacagtagcagtatccagtgccgttagctctgcttccatggttgacctcgtcaaaatggtctgtttgcaagacctccatgaaacagcaccaccacccagtgtgaaaacatatccactagtggctttgatctcatccacatcagagatccaattagaatcactataaccctccagtaccgcaggatacccagtatagtgaagccccaattccacagtacctttcagatagcgcattactcgctcaagcgcacgccagtgatcatctcccggattagaggtaaatcggctcaacttgctcacagcaaaggagatatcaggcctagttgcactagccaggtacatcaacgagccaatgatttgggagtattctagttgattcctagcaattctcttgttcttgcgaagcaacaagctaggatcataaggtgttggagaaggcttactatcaatgtagccaaagcgattcaagatcttctccacataatgggactgcaagagtgtaatcccattctcacctctaattagcttaatgtttaagataacatcagctactcccaaatctttcatatcaaaattttgagacaagaatgatttaacctcatttatcacctcaaggtttgtcccaaatatcagtatgtcgtcaacatacaagcacaaaataactccctcacccccaccatggcgatagtacacacatttatctgcctcattgactgcaaagcctgcagatgtcaatgttttgtcaaatttctcatgccattgcttaggagcttgtttcagaccatacaaagacttcaacaatttgcacactttgccttcttgaccttcaactacaaacccatcaggttgatccatatagatctcctcatccagctctccattaagaaaagctgtcttaacgtccatttgatgaacgagaagaccatgtgaggctgctagggaaagtagcacacgaattatggtcaatctagcaacaggtgagtaagtgtcaaagaaatcttcgccttctttctgagtatagcccttagcaacaagccgagccttgtacttttca

SEQ ID NO: 14908 - DNA, 3092 bp, Oryza sativa
gcaacgcccccggctgcgtctactactacccctacggcatgggcttcaccgacgggtaccttgccaccgaaaaggttcacgttggcggagcctcgttccccggcgtcggggtcgggtgcagcacggagaacggggtcggcaactcgtcgtcgggcatcgtgggggtcggccgcagcccgctgtccctcgtttcgcaggtcggggtcggccggttttcgtactgcccccgctccgacgccgacgccggggacagcccgatactggtcgggtccctcgccaaggtcaccggcgggaacgtccagtccacgccactcctcgagaaccccgagatgccaagctcctcgtactactacgtcaacctcaccggcatcaccgtcggcgcgacggacctcccggtgacgagcaccacgttcggcttcacgcgcggcgccggcgccggcctcgtcggcggcacgatcgtggactccggcacgacgctcacgtacctcgtcaaggagggctacgcgatggtgaagcgggcgttcctgtcgcagatggcgacggccaacctgacgacgacggtgaacggcacgcgcttcggcttcgacctgtgcttcgacgccaccgccgccggcggcggcagcggcgtgcccgtgccgacgctggtgctgcggttcgcgggtggagctgagtacgccgtgcggcggcggagctacgtcggcgtggtggcggtggactcgcagggccgcgcggcggtggagtgcttgctcgtgctcccggcgagcgagaaactgtcgatctccatcattggcaacgtcatgcagatggacttgcacgtgctctacgacctcgacggcgggatgttctctttcgcgccggcggattgcgccaatgtgtgatggagtaattactaccgttcgttaagtacagtataaacccaataactacggagtagaagtactatattgtacgcatgtggggatcatatacagtttttgtctagcttgctgttcatcataggacaaataaggcttaatttctcttgtgccgtcattctctgtttgagattgtgtcctaactgacaacgttctattttgccgtgtctggtacgtattctggtgtcacctgattgactatgctctgatgattttcagcactaattaaacaagtttgaatataatggaaggagtaggttttggtttttgactctttcgtttggcctacggaagaatcaattaatgaatactctctcacacacattatacttcagtaggattattaaaaaaaacaactgttgtacgttttcaagtgaaaaactttcgaagctaatagtaactatactataactaaaatatattatttgtatataatttcaccataactatactatagctaatataaattcaccgtaactatactataactaaaatatacttgtatataaatattaaaaaaataggaaggaaacccgcacaatctatctatctatctatctatctatctatctatctatctatctatctattatattattaaaacagctttgaaagaaggcaccacgttcactgtaggggctagaaattcccacattaatcggagaaaaagagaaaaaaagaaaaggagagtccaagtagaaatacaatttaaaaatagctgcaattcagaataaaaaataagcaatattgaaagaagttttcatgtaagaacccaatacgagattaatcaaaattcaaaataaaaataaaataaaatccaaaattagaaaagaaaaggagagtccaagtagaaatacaatttaaaaatagctgaaaatcagaattaaaaataagcaatattgaaagaagtttccatatgagaacccaatacgagattaatcaaaattcgaaataaaaataaaataaaatccaaaattagaaaaggaaaggagagtccaagtagaaatacaatttaaaaatagctgaaattcggaattaaaataatcaatattgaaagaagtttctatataagaacccaatacgagattaatcaaaattcaaaataaaaataaatctactactacttagaaaataagaggtgcttccatcgtctgtcaaaaaaaccgggcgaacaaaaaccgggcgaaaaaaccaggtctgtccgtaaaaaaaaccgagcaaaaaaaaagtgcgaaaaaaaggaaagaaaaaccaaaactgtccgatccgaaaaaaaaccgaacgaaaaaaaccaaagttgtccgatccaaaaaaaccgagcgaacaaaaacaaaccgggcgaaaaaaaaagtgcgaaaaaaagaaaaaccaaaaaaaagatgtccgattcctatggcaaggcagaaaaaaaaacacagtagatccgattcccttaaaagttggaaaaaaatcatattcctatattatcctatttcccgtacggttgtttgtttttcttctttttttcgtttctttttcgttttttcttttctctttttttctttttttatttcttaatactatgtatgtatataaactttatatacacgtatacaaactttatatattatatattttttcttttttatacgtatgtatataagctttgtatacttctctatctccactattaaaaaattcaaaatatttccttcgtccgtccctacttaaaaaattcacactaaaaaagatctgtccgattcctaagaaagtggcaaaaaaaaaggttcataaaaaataaaaaagcaaaggagaaaaaaagtacaaagggagaaaaaaagcacggcaaaaaaacgtccgatttctattcgttttttagttcctatatatctcttctctatatctaatataatctaatctaactatttaaaaagagaagttttcatagtacaacttaaaaagaaaaaatgcgcgagaaaataaaaacggttaaaaaacgtggagatagagaaaaaaaagcaaaaaacgcgtgagaaaaaagtcagaacaaaaaagctaaaaaaggtttccgtcttccgtaaaaaataaaaaaacacacgaggaaaaaactgttagaaaaagcacgccatttctaaaaaaatggttcgaaaaacctcacataaaaatcaccgtttataaaaaaacaagggctgcaggaat

SEQ ID NO: 14909 - DNA, 7981 bp, Oryza sativa
  unsure (1)..(7981): unsure at all n locations
tccatttcctcacaggcagtggtggccgccacctccacatccagcatgacttggattggtggtgtattgctggcattggtgccatgtgtggtcagctaaggactatccatcagctcttcggcgtccacgaccacgtctttcatcatctacccacaaatgtgacacaagattaaaacatattgcattgtaatatggacaaccagttgctcttgatacaaatcaaacaggagaatattaacaatattaaaaaactacagcaaccaaaatctgatagatgaaggtcagaaatgttatgaatgactacaaacctgcaagtccttgaaatccaacctgaatacaaactagctgtattttacatttccacatgcggtgtcttccgccgcaggtgcattacttggtctataccaacaaatataataacatcgaagttaagctatagagtacacagatttgcagcagcagaaatagagaacaagtaatgaggcagttacatgcaatatggcggcccccatcgttcacagttatttctacccgtcagcataaacaaggaatggcaaagtatatatgttctgtactgtttgggaaaatgaatttctatccaacactaggttttcaagccttacagattttttcatctttagcacattaaacatggcttagatgttttcatcagcacatgataaatcatcaagctgcacttcaagaagaaaaaaaaatcaagggcttcaagggcttagttgaagcaagatgcaaactgaaatcagtaggcagtacacaaaatattgtgtgtaaaaatgacttcgttgccctcgccagtgtcgaatctaggacaaaaattgaggataggctggactgatagtctaagtctaaattgataatgctaaaataaggcacataccattatcaagtcaaatgtaacacttacatgattaaataaaaaagcatacttataaaagacgtaccttgactttcgactaaccagtaaaatgctcattttcaccggatatgtcctcaattagtaatgcataaatggtagaagtaaacaaatgttaactaaaataagtaacataccacaaaatgcagcatccttttccacactatgttccaagcaatcaaatcgaaccaattctgttgaaaggatctccaaatcttaccatctaatgtcctaggaaaaacatgtccaggtgctctatttggaccattcaacaaatatgcccttctcacttcatctctaactagtaatttgcatgtgctaacgctacggctatatttaacaatacagatcaaatatatgattcagacaatcaaaagaatggaatcatatattgctaattatataaccatgtacaactacatgtttcccacagtatatattgcttcaagctaacattttgcatactctatatatacgcaaggcaaaccatttgcaagtacagaagaataaataatcaagcttcattgaaattgtatttcaaaccggaatagaaacaaaagtaaacacttcagcatcgctcatcttgctggtgttgatgcttccaacagctgcatcacatcactgaactctgaacaaagctgaatctaaagcagcaaagatggcaattacccaaggccaccttttgtctaggttcttcctgagatcatccagcatgctcgtcctgttgatgcttccgacatctacaacacattaagacaatgtcaggtgcaaactaatgtgcaaagttacagatggatctgtcatcttcagctagctttgtcagatggtcagatgcagtgtttttcagaattcaaacacagaggtaagaacctacctcttgacttcagctcaatagctttttatcagaacaattaatcacaggcattttgcaatgccatctaccttaaaaccttggtttagcaaacatttaaagactataaattagttgaaatttgattttaattttaattcagttgtacatatcaaagacaaattaggagatagatagtattagatatagggataatacctactaaaactgtctcaactcattgaagcaatggagatattttcaccctacagctatcaatatcaaatatctatggtgcaacaagcaatgccaacatcgaattgttgccctcagaaacgattatatgctactgaagcagaacatggaagcagctcatttacctagcgaccctagaaataaggggatcaggtgacctggtcggagagcttgcggccgtggacgaagaggaagaacatggcgacaaatcatacatggtgccccatcatcagtcatttataataaaaagattatacaagcgctgttgcttttgacagattgcattatcaccaggaaacaaaatcagtccactgacaaaaaaattggaggcataaaagcagaacaaaatgaagcccagaggcattatagcatcttgcatctggaaaaatgagtaggctaacaatatagggtagattacaatcttgttggttcctgttgttaatcatctggcctattatacaacaaaaggccttcaatcctcaccaatctagttggctgagacgcagtagtactcgtggccaccccaacggagataccctctatgaatcaaggttattcatctgaacagggcaaaaatatattaacaatctcatttgtaaaagggagtaatctggattgcatgtagctaatccaattttcatcggtatgaaattaaaattgaataaataccccagatacattagacaagatagtgagtactgataaatcactctatccatttaaaaaatattgattaaataataagtgtataactttatcaccggttgtgatacaatgagaaatacttgacatgcattaatatcagacactccctccatcataaaaagaaacataggaggggatgtgacctctctatggacaatgtatccgaaattagtttttttattcgtatccgaaattagtttttttcattcgtatccagaaaccccttccaatatcccgtcaaacatccgatgtgacacccaaaaaatttcttttcacgaactaaacacaccctaaacaagaaaaaatgcaacgctgtcatccttgtgtcattagcagaaaaatgttaatagcaccaatcaacagtggtcaccgaggaaaatggttaagcaatcaaagtgatgaaaaaacttgatagtgaagccattacttcccttttgtgtagttttagtgctattgagcatgttagacaggtaccatgacatggttcagttagatgctcataagaatttactgtttgatacgcattttaatcaaaacactgaagggctcaaaaaaattgaatcggtgagtttaacaccatatcgtgctatcagcattttcagataaggtgctgtattattcaccaattgttccaccaaacataaaaaacatatggaaaacacaacagaaaaaagcctcatatcaaacataaaactgagacgatacactgaaaaagtgagtagctagcaccctgaaacctggcctgcgtggagttgatgcgagcaggcgccgagaaatcgggggagcgacgacttgacagcgtggcgacagtacggtcattgtcattttgtagttaaatccaaacgaaactgaaatggagggcaacactacaagagaagttattgactccccccaaataacacttctaattaatccatttaaacatgagcgtatgaatatgatgcatgcatgtgatactaataatctagctaaatggtggtgattcacgatttgatcagttaattaaattgttcatatcaaagaacaaaaagagtaccttgcaactgattgttagcgacggcgccagtgcccagtagatatagcacttgcagcaaaatcagtcaggctagcggtgatagccacgctcgcaacggtgacggcggcgtccggcggcgacggcgaggacggaataggaggcagaacgccagcagcggaggaggcaacgtccacgtgcacggccagcgtgatgatgccaaagccatgctgtagcagaccgagcttcgtggcatcgacgtcgtgcgcctcctccggcctagacatggcgctgctcttgccgtggccgagctgatcggcggagcggcgagagcaggtccatggccgccgtcacggacatcgcctgcgtcaacgtagccctcgcgggcttgctggacccggacgagcggtcggaggacgatgacgacaacgaggtgggcgccgccaccggcgagacaagctgctgctgcggctgcaccggctggggcgggaggatcggtggcggcgtgaacgacggtgccacggcctcccggtgcgccgtcgccgccgccggcggctctgaggcccggttgccgccgagcccgagccccgcgcggcctgtcccgccggagcgcagcttgttcttggagcgggacttgcggttctggaaccagtagaagacgttggcgtcgccgacctggccgtactcctgcagctgcatgcggatgcgcgggatctcgtcgcgcggcgggttgaccatgccggagttgaagatggcctccaggatccggatctgctccggccgcgggttccgccgcggcttcgggtccggaaccctctcctcgcccactgcaacaaccacaaaaatcccaaatcaattccctcctaccgatcgatctcgatcccctctaacctcgcaaaacgaaaccctacctaccaagcgcaaacagtagcatgcacggatgatgcgggacctacctgacgagaagggcgaggacttgagggagaagccgccgccgccggtccggtggccgtgacttcgaggcagcattgggtagggaggatcgcgggtgatggtgagggtctgagggatacttaagggcgaggtggaggggatccggtgggtggcggcgtttagggctgggagacgcattctttttggcagaatatatagcgagtgcatgatttttttttcttttctgaaatcgccgcgagtgcgtgattttaggagagatccgcggcatgcgtgcagcggtgcaggtgggtgggagaggcatgcacgcgcaggtgggaggaatcagttggcggagatatgcgtggggaggtgggataaatctgagacgttggatcttagcgagataatctggaccgttccatgagaaataaaataatgagtaataagtaaaaccatttgttaaactgtagggtagataattttacaataatcatatattggtattcgtttttgctggatcggcaaaaattttattaggatcaaattccactaggtgcctctttggtctgtttgtgctctcatcagttataggtgtatcacttaaatggcttgtatagtaattaagcaatgtcgttttcttctccattacaaatctaccaacaaatcaaaatactaggaaatgtaaatggtaacaagtaacaaataacaatgaagaagtaaaaaaacagtatagctcactgcctcactcacactgtcacttaagactcacttagagactccggcagccagggccctgtggccgacccctccacgcctgccacccccgtggacaatgatggcagggcactgctccttgagccaccgccgccgccgccgaacacgatcaccgccaaaagtgtcatcgtcgcgtagcgggccggacacgtaggcgcgcgagggaggcggtggcacgcctaaggccatcatcgtggtcgcctctgccgccgccgtcgcggtcctcgtgctgcttgctctgccacgacagctccagtgggctgaccgcgccgctgctgagctactccacctagtcgttgttgttggactgcaacgccgtccatgtctggtcggtcgaatcgacggaattgggctcccacgagggcgtccacgcgtttgccggcaaagctgttgctcccaccggattcctgcggctccgcctcgccatggatgtcacgcacgaagacgtacttgtgcaggctcgactccatcagctcatccttcacaacaacctgtcaacctcctacacaacgatgtgtgtgccaccgccggcgaccttgccgtcgccgtacctcccgtttgacaagcacttgccattggccgaccggtccaacttgaagctcttgttttccgacgacaaggagttgaggtccgcgaccattgttgtcgtcgagctccgccatggggttgcaacggtatggctagtgctcggccttccgcgacgagctccggctcagagatggcctcgtgcgccggctgcagccccttctccctggctgcagccacttcctggacgcagttggcatgcgccgcttctccctggtcaggaccgacaccgtcttcccagctgctgctgcggccgcccccgcgcaccgctgtgcacacctgcgcacgcgagagagagatatattaggaagaggtgaagagagagaaagaccggtgggtcccacccttttttttaaaaaaaaaaatgctgactagattgccacgcgtacaccacgtaagacgaaactgctcgggattgagtcgaggggggtaattcgtccggtattgaaagttcagggtgagtttcgttaaaaaaaaaaagttcagagtaagcaatgtttggtttttgggttaaagggggtaattcggtcgaccacgatagttcgggccgaggtggggggagggggtaattcgtactttttcctattcttttatacattggtacaatagcaagtcagattattaacacttcggttgtgtggaattatataatcatatactccatccattctataatataaaggagatttggggtggatgtgccgtctgtccagattctttgtgttagnatgtgtcncatccccccaaaatcccttatatatattatgggacggatagagtatatatatatgtaataatacctatgatatgcttcatatgacatggttttttgtaagttaaaccacaatacccaaattcatatgaaattatattgaatttgaataataccggtacttctattcgtggagaatatatatataaattaaacattctgaaatttatatgggaaacagttgtacggctcactgtcactggtgcgggtgcctgagaaagaccgcaggcatcggcatgggagatcactattggcatagatcatcaatggttggaaaatcaaccattaggatacaaatagtcattatataagtacaattgatcatgattgacaatgattttaatcgtatatagtccgtggtgcttggaagttgtcgacgtttgatgtcgcaattctgatatttgcatagtatggggatcgtcggtgctaggatatacgtgatactgaggtaaaacagatggagacagggatttttatacaggtttgggcccttgaattgtcaggtaataaccctacatcttgttggccgaagccggtattgctcttattcatgataatcacaccagtacaatattttgggtagcctatctaactgttgtcgacatggcagtcgtacgatctgactcgtagtcgacaacaggatagcctttctccttaaatccgtgcccggcgagatcaaagatagcactttcatctctcctgacagtatccggagacaccgtagggtactagccgtgcttatccctaaagtcaatattcggcgacgtgtcttggtgtatgtaggcttttatgttgtggcttctatatcgattgtgttggatgttgatcccccatggtgggtgtgtggattctcttgtgtatgttgattctgtcccctctcctcctatggggccttatatttatactcatagatgtctccttgtccaagtagaaatagggaaaccaatatggatacaatccgagtagtacttgttgtttccatgtagaattttggttgtcttttcttatctggaactcctcctatattcacaggttgtttccgtataagacatgatatgtgatgggtcctgccgagatttagtcaactactattaggtatgtggtatccataatcctgacagaagttgattggaccgaatagacggctgctcatcaaagaaa

SEQ ID NO: 14910 - DNA, 19065 bp, Oryza sativa
cttaaaaaaatgttgtatgagactaaaacaggaaagattcagcttagaattcacactctttcgtaggaattgataatttgcatttgaccaggtggaaacagttttttccagtgatagtctaagccactattaattgtgactaggactttggaacacggcaatgctgtaaggcatcctggaaatttcaatgtgattgtaatgtttaaatgggagcaaaaccaaacaacatacgctgaaaatagttaacctgtaattcagagagtacatctggacggtgagtttgtgaacatgatacaactaagttgaaagcaatgaaaaaactgtgaaaaaacagaaataaaattagctataagtaaaagggactttactaaaatctaacttaatacccactcaattttcacttaacaatttcactaaagaatacatgtaagatgtaacttaaccagaacacaggaagtatctatatatgacaaagtccggacaatgacatactagcatatatctaaaaataacaaatgcggataattgacatttttcatgacctcgtcagtacgcatcaccaaaaccaccatagaaagttcaggcaaatatgttatccacgtttggtgtcctcaatgacctcatctgtcagcatcctttgttgagctacaaccacaaatgtgatttattttcttccattgtactttcctcttcgccgtcggtttccacctcgcccttgacctctagctcgtaaccagttcgtcctactcgttgatgcacccgttggtcggtcattatactgacctttcatgagcaacagcttgtgagcttcagcctctcttaatgtccatagcaggtcatagtacttctcatatcttgcagccctgtattgccgatgtagatgaaggttaattggatgaaatgtagataatgtcttctcaattaactcctcctgcgtgatttctctaccacaaattttgaatcgagagattatgagatggagagctgagtcatattcagacacaagcttgtagtcatggaaacgcaagttcaaccagtcattctgagcttgatataggaccctggccttctgctcttcttcaaatcgatccttcagggattgccataagacaaatggatctctttcagcgcgataatcagtccgaaatcctttgtttaaatggcgccaaagaaaagccaatgcctccctcttttgggtctcggtacactctgaattagagataagtgccgtacagagacctttcatgcctaaatggatttgagcctcaatagcccgttccaagtaattgcttccatcaagagcaagctcatcaaagtcttcgctgttgaaatcgaacatgttttcctacagttaaaagtatttagtctacagatagtcatgaataaaataaagattaaacaaaccatatatatgcgtcagggcttgcaatgatgtcaatgctaatatgcagtacatcctgtccaaactacaatctctgttctataaatgaggctttaaggagaacttatcatattaccaatatttttatgaattttatatgaaacctaactgcatcatccttaatactccctcttgtcataaatatttaacgtgtaggaaaatatttggtccatattgaaaatatactttaaccatagataatttttcaaatgcttagttttaagtaaaaataataatgtgcatagatttatctcgaaaagtactaatcacaatatcataaacacattttaatataaaactgatggccaaagtttcacaattttgacctctaaacatcaagtatttattaccagcatcagtatttaacggctaagcatacagcttagacagatcgtttgtcctgacgccaaatatagtattgtgaaagtgtaatttataaacctgatcaaataccatatctaaaacaattaactaggcttaggtctactcccagtgtcccaaaataaaataattcctcatcccaagaagattttagtaaggagggaaaatgactaagttcctcattaatcggagatggttggtggatagacaagaggtattgaagagtttaggaatacaactttccaaacaaattttgaactctgtgaatcaacttattttgagatggagggagtatattattttttgtgttattgtcttggttgtacttgggtgagttactataagacacgaaatgttcatgtctgtattagggttattatttttcttttctaggcatccctggttgatgtagaggttacgtgtaattcatttttaatgaattttttctcgttatcttaaaaaatgtatatgttatttgtgctactgatcaacaaattaattgttacttatgaactgattcaattgactagccataataaatactagacgaaagtatctggctatgaacaatgaagaacaaagaatctaaaagggacaaggtagccgaatattatcacacagcaacaaacaaggaattaatagtccataacacaatatctcgtcggagaggatgcccctctcgtacggcacggcggaggaaacgggagcaaaatctgggtagaactagagttaatctacatgtatgatgtatctcagcaatttatctttgtagggcaacgtctagagttgaaaatggtcaaaggggaaaatgcggaaatcaaatttcatatattggcgccggggaaggcagggaagaaatcgagaaaatcagtgagatcaaatgttgtgatcttgttgatgagattaataaaggagattttcaattgtgagatcgtggcttccgaacttgaaattggaacagaaaaaaaaaacctttcagtttcacaacactcaccatgatagtgccggacgcgctggccgctgtccgaaactgaccctaggctaaccgcgggcgccgggcggcggcggccgcggcggacggcggtgcagcgcgaccggaacggcgtggttattggattggaaccgacggcgactagcctgagagcgactgttccaatccaacagcggagtagaggcggagagatccatatataggggaggcgaaaaagaaactgacagcccagagaggaacgagtaaacgggccatccgtggacagcccacatggctctagccatccggcccatctagcccacgtcgcgtgtaagttgaaggttcgccgcgccacgcatcaaaccatatctgcatcgacgtgcggcgcacaccgccgcgactaccatttcgactgatagatcacccaccggatcgcacgcactctccatcaacgtgccactccggattcaactaacctcactgcgatgaaacaagccatatgatattatgattgatcaagcgcaatgtgggcagaaaacgcaacaaatcacaccgtcttcggttcggcttcgtgctctggtcttggctccaatggcggcgtttctggtatggattctcctcttgttaccgtacgttgccatttcgtccacggcgagccatggcgttcgtcttgagctcacgcacgccgacgaccgcggcggctatgtgggggctgagcgcgtccgccgcgccgccgaccggagccaccgccgcgtgaacggcttcctcggcgccatcgaggggccgtcgtcaacggcgaggctggggagcgacggtgccggtgctggtggcgcagaggcctccgtgcacgccagcacggcgacgtacctcgtcgacatcgccatcgggacgccgccgctcccgctcaccgcggtgctcgacacgggcagcgacctcatctggacgcagtgcgacgcgccgtgccggaggtgctttccgcagccggcgccgctgtacgcgccggccaggtccgcgacgtacgccaacgtgtcgtgccgctcgccgatgtgccaggcgctccagagcccgtggtcccgctgctcgccgcccgacacgggctgcgcgtactacttctcctacggcgacggcacctccaccgacggcgtcctcgccaccgagacgttcacgctcggctcggacaccgccgtgcgcggcgtcgccttcgggtgcgggacggagaacctcggcagcacggacaactcctccggcctggtcggcatggggagaggcccactgtcgctggtgtctcagctcggcgtcaccaggttctcctactgcttcacgcccttcaacgccaccgcggcgagcccgctcttcctcggctcgtcggcgcgcctctcgtccgccgccaagaccacgccgttcgtgccgagcccgagcggcggcgcgcggaggcggagctcctactactacctctccctggaagggatcaccgtcggcgacaccctcctcccgatcgacccagccgtgttccggctcacgccgatgggcgacggcggggtcatcatcgactccggcacgacgttcaccgcgctggaggagcgcgcgttcgtggcgctggcgcgcgcgctcgcgtcgcgcgtgcggctgcccctggcgagcggcgcgcacctcggcctcagcctctgcttcgccgcggcgtccccggaggccgtggaggtgccgcggctggtgctccacttcgacggcgccgacatggagctgcggcgggagagctacgtggtggaggaccggagcgccggcgtggcgtgcctcgggatggtgagcgcgcgggggatgtcggtgctcggcagcatgcagcagcagaacacgcacatcctgtacgacctcgagcgaggcatcctatccttcgaacctgccaaatgcggcgagctttaggattcgcatgatcaaagagatacatgaccatatgtacataacttgaattttctatcagttgcttttgcaattattctatggaggtgttttcgttcccaaggcgacattccctctgtttattgcatgtcgagaaacacacttttcccttgttctcttgcatatgcttggttgattatgcgtgtgcttggtggtgtgttctgtgttcatgttcttcaaagaagtctgatgttcatctgacttctaaaatgctaaataatttcagctgaatgcagctcaatcactgcagctaaatctgaaatccaaacttaacatacttttatttacaagtgcgtgtatattacacggactgtacattattctccacatccatatctacaagaatacgcgctgacatatgaaaaggtgatcaaagccgaacaacaaatgtatgtaactcgaaattctagccagccaagagaagtacgatcaaataattaaacaacataatatgtacatatgcaaatacgcaatagagatcactcccatcgatcgatcagtacgtgcgtctcggtctcgatcagatcttgccgcaatccgcgggctgcacggacagcacggagttcttgagctcgtacagcacgtggaagtccatctgcaagtagttcccgatgcgcgagccggtgctcgacttgccgatcatcaggcacagcacgtcgccgccgccgccgccgctctgcttaccggtgtaggcgaagtagttaccgaacagcagctccatgtccatgccgtcgaagtgcatcgtcatcgtgggcacggtgacgacgttcttgctcgcgtcgtcgacgaggaagcacaggaggccgctcccgttgacggcctcgtacgtccgagacatccgcgccctgaacgcctccacgacggcggtgtaggccggctcgaccagcagggtcgccggcgcgccgatctggaaggcgacgccgcgcgtcttggccggtgtttgggttgaacgcgaacgtgtcgttgggaatagcgaggcgtgtcccgtcgacggagatgccgagcaggttgacgtagtaattggcgtcgtcgggtaggagaggggtggatgaaacgccattcccgtccatgctggccgtggacccgaacagcacagggctggcaacgttagggttcgacgcgaggcagtaggagaagcggtccaagcccagctggcccaccagcgacagtttgcttctacccagcccaactacacctgtgttcctgtttaatttgatatgaaaaaaagaagagcccacttataccacttaattaatccatcgcccatatatattcttaatttcttattactgtttgtgaagcttgagagggaaatctattcgtgagtacgtttacgtacccgtcaaacaaatcattgcggtagaccgtgttggtgcacccgaaagtgaagctctgcacggtagctgcatcgttgctgccgaacttgatggtctcggtgcccagtatccctttgacgtagttgcggtcggtgtcggtggcgccgtacacgtaccggtacccgcactcggtgtcgctgcacgtcgtgcggacctgctcgatccggcagaaccttgcaggcctggctcgcgcacgccagcggcgagaagctgctcgaattcgcccggtcgtacagccgcgcccccgccggcggcgcggcgttgttgttgcagccgctgcatggggtgcactccacccagcacagatcgctgatgccgaaaagggcctggacggtcaccggcggcgtgccgacggcgagctccatcacgtagtagagaccagcgataacctttgattcaaaagaaattcataggaattttaaaggatttcatttctataggaattttttctatatagccctttgaatctaagaaatgaatcctatgtaatcccataaaattcctatgaaatacctcttctcatgcaagttttgaaggaaatttagcatgaggttctacctcatgttaagaatcttttgagtctttatctctctcaaattcctatgtttttcttgcggctcaatcaaatagtcattactatacttttcctgtgttttacaattctctgttttacacttatattcctatcagaatcctatgttttttctattcctccgttttttcattcctgtgattcaaaggtcctttaatttcatgcatacctccccacttggcaattaggaaaacaataataattgtgtggtgatctttactgatgcaagctagataacattttcatgcacaaagtcagaactatagcggttctcagaatgcgtacatgcgaaggtgtgtgcatgatatgtgctctgcaatttgttactctcctccgtttcaaattactctcaatgatttatcctaagtgaagcatctaaatttagaatccatatagtctaattacacgtggattatatatttatatatgaaaatatttcctaaccttctcgtaaaaaaagacatttaatatgttttgatatatcaaacttttagaaccacaaccagggtaaatttccaaaatttcggaaatttcggtgacacccgatacgatattaattcggccgaaatttgtgaatttttgaatttttttcatgaatttggataatatttgtttaaattcaactaaattttgtttaaaattttggaaatttcagaccgaaatttccgaaatttcgggatttcggtgacacccaatagaaaaccttgaaccgatatagtgaaccctgaccacaaccatcgataatttctcttgtttgttaggccaaaattttaatgcgggtggtccaggtcttggtcatttctaagtccgctcctgcggctgcctaattgtgctaccgagttttatctaccacttgacaagattaagaacatacactagtggagaaatggtttttattcccggttcgtaacctatatagtcctggttttccaaccggtactacgaatccgggactaaagatcgttatttttagtcccgggtgaaataaccgggagtaaaaatctatttttaaatatatagcctctttagtaaagatagagtcagcctaaatccggttgctcctttattcttttcttttcttcattgtttttaatatattgatttcactccatcccgcccccaaaatcccaaatcaatcatccccgaattgtaaaatctcaaattgattattacctccaaatcctcaaatcgatcatctccaaatacatcacaaaatcttaaaaaaaaattacatcacaacttctacaaaattcatcacaaatacatcacatattcacatcacacacaaatcaaatacatctcaatccgaatcacaaatcttaaaaaaaaagagaaaaaaaacctaaatccggcgcctactcccgctgccgcaccgcctgccgcgtaggccgccgcctcggcgtgccgcctgccgccgcgcccccgcgaggccgcctggccctccgcgaggcagcccggtgcgccgccgcacgccgccgctgcagatggggaggaggggggagggagaggaggagaggaagataggagttaaaggagaggagagggagaggagaaggagaggaagagatagtgtgtgaggagaggaggagaggagttaaaaggagaggaggaggagatatgtcgatctgatccgcgcgcacacctctccgtgtatgtcgatctttttttccggttggtgttaccaaccgggactacaaatagatcttttagtcaaccgggagtaaagcgtatgttagatcttttttccctgttgatattaccaaccgggactatagatatatctgtagtcccggttggtgttcaaaaagtacccctgagcttttaaatcgggactaaatatgtttctagtcctgatttttaatccaaccgggacaactgtgaaatctgatcgaccgataaagatggatttctccagtagtgataccgagtgttaccaaaaaggaagtccaaaaaaaattaccatgtgccaagctaataaacttttttttttgggggtggggcaagccaataaacttggttaaccttgggaccaatcgtttctaccatgatttctattggcgcgggcggatggcatatgctctgcatgcagtccccactctcgtcggctcgtcgcctcaattttcccctctccaggcggccactgagcgcgaccgtgtgcctctggcttctttccaccacacgtcccagatgacgtccattgaacgcggcagcatgtcctcggtatcctctcgtctctgattgtgttaaagactaaaactgtaccgagaaagaatccataaaaaaaattaaaaatcacttatgtagaatctatatatttttaatcaaaacaatatgatttctatttaaccatacaaggacgactaaagcaaagaagaggcaccaattcgttttttatatccatgtcgattccccatcaatcaatacctaatatgtggtttgcttgtgtagtggtgcacatatgtgtcctctgtataatagaaaaaaatactagtgcaaattaatacttgaagaagaagctacagtaataaaagtcaagaaacaagaatagatgtcattccaaagaaaagatacacgagacagatacaaaacacacttgaacagtactagatagagttttgcaaattgcaattaaaatcgtacgtgcaaaaataagaggacagtattattttagcaaaacggattgtatatataaacatgtacatctatctcagttgaatgaagtacccatcaatcaattcttaatgtggtttgcttctgtatgaacatatgtgtttctccatataattgaaaatataatacttcgaattaatactttaagaaaaaaagtacaaaaatactcactctatttcatgttacaaattgttttgactttttttctagtcaaacttttctatgtatggctaagtttatagacaaatatagtacattttaaacataaaataaacatattatcaaaatatattcaatgatagatttaataaaactaatttggtgtttaaaatgttgctaattttttataaacttagttaaacttaacaaagtaaaaaagtcgaagcgacttatagtataaaacagaggaagtaaaagttaagaaaagagaacatagttgcagacaaaaacgatttttttatctataataattaattatcccaaaaattaaatatttagtaaatcaggtgcggacgctagagccaacggcgtccagatgtggacgctgtagcgaacggcgtccagcgcaagtccaacccaacatgatcaggctggagcatctagcccaaggtcaggactccacgagtttaggttaactcccccacagatcgaagcaccgaaactagagttcacaagctcgagatcgaggaggaggtccccctttccctccacagtgagcagcgccgacagcgagccggcgagcctcgccgcaacaatcgaggcagcgcatgacggagattgaggagagaaatgagggtggcagctgttggtgcattagtctaatcgagtaaacctagacagttagatttgggttggagcttgggccgcaccactgcgatggacaccgttggctgcagcgtccagagccggacgcgttttgtccgagtgtccacacctggacgctcttgctagcagcgtcctttccatttttctaaataccactactgatttactggttatttaatttcagaaaaaataattattacaataaaaaatggggatacaaacgatagaatttgcaatcaaacaataaaaaaaagagatcgaaatcctgcaaaaatatgacaacactatttagaaaaactgattgtatatatatatataccctctacacctatcttagttttttttttagggagggggggggggaacggagatatattactcattgaatgtgatgtgaaataaaattacaactgtcatccggccagaacacggttaaagattcgcttctgcctttattcgctaaaaaatggctaaatctcgatgaacttttgtgagtatagtctcctttagttgaattgatctatatctagatgaacccgtcaaagaagaaaaaacagaaagaaggaaaactatgcatggaacgagtctgtctttttttgttagaacattaaagcgattcttaatagcaatttgcgaagtttaaatatgcaactaggccggatcatctatgagttgttgaaatggtgtttataagatcaacgaacgctcatcgaatcaacactgcaagattaaacgaaaaaggagatcgagatatatacactcgaaacatggcgtccacagctgctatactagccctcatcctcctcctcctcccgccaatagctctcgccgccggcgacctaaatggcttccgcgcgacccttactcgcatccaccagctctcgccggggaaacattccgaagcggtgcgccgcgacggccaccgcctcgcattcctctcctacgccgccaccgccgcagccggcaaggctaccaccaccggcaccaactcgtcgtcggtgaacgtccaggcgcagctcgagaacggcgcgggagcgtacaacatgaacatctccctcggcacgccgccgctcgacttcccggtcatcgtcgacaccggcagcaacctcatctgggcgcagtgcgctccgtgcaccagatgcttccctcgacccacgccggcgccggttctgcagccggcgaggtcgtccaccttctccaggctcccgtgcaacggctccttctgccagtacctgccgacctcctcccggccgcggacgtgcaacgccacggccgcctgcgcctacaactacacctacggcagcggctacaccgccggctacctcgccaccgagacgctcacagttggggacggcacgttccccaaggtcgcgttcgggtgcagcacggagaacggcgtggacaactcgtcgggcatcgtcggcctcggccgcggcccgctgtccctcgtgtcgcagctcgccgtcggccgcttctcgtactgcctccgctccgacatggccgacggcggcgcgagcccgatactgttcggctcccttgccaagctgaccgaagggagcgtcgtccagtccacgccgctcctcaagaacccttacctgcaacgctccacgcactactacgtcaacctcaccggcatcgccgtcgactcgacggagctcccggtgacgggcagcacgttcgggttcacgcagaccggcctcggcggcggcacgatcgtggactccggcacgacgctcacctacctcgccaaggacggctacgcgatggtgaagcaggccttccagtcgcagatggctaacctcaaccagacgacgccggcgagcggcgcgccctacgacctggacctgtgctacaagcccagcgccggcggcggcggcaaggccgtgcgcgtgccgaggctggcgctgcggttcgccggaggagctaagtacaacgtgccggtgcagaactacttcgccggagttgaggcggactcgcagggccgcgtgaccgtggcgtgcctcctggtgctcccggcgacggacgacctgccgatctccatcataggcaacctgatgcagatggacatgcacctgctctacgatatcgacggtgggatgttctccttcgcgcccgcggattgcgccaaactgtgataataataagctgcatatataattgcgcacgtgtgcggatgtgccgtttgatcttgctgtgtgcatcgaggaggacaaggctctttctcctgttacatcatcctctggaatattatttttcaataatgaaaatggtttgtatatttccgttcatcaccggtctctgcgttggtacagagaaaaaggtcttaaagctagaaaaacaaaaaagaatacggtgatgaggcaaacacccaatttcgctaataagagattaactgatataactttttcaaagtcacataaattatactccctctgttcaggttataagacgttttgactttggtcaaattcaattgactaagcttataaataaatatagtaatatttataataccaaattaggtacattaaatcaataatggaatatattttcataataaatttgtgttgagttgaaaaatattattattattttctaaaaatatggtcaaacttgaagcagtttgactttgactaaagtcaaaacgtattataacctgaaacggaggaagtagcacataattttataggtactgcaccattcaaactagaacaaaagatacatgttccctaccaattgtaatgtgtagtaccattacgtacaatattttgctattactttgatagcatcatgcataaggagtggagccaattaaaacacatagatatagcatgcatcatgttagataactttttgttgttaaaatctacgtcaaattgaccaacataaataatagcccaaaataaaatcatttgcattacgtacaggatcctcataaaacactccttatagccaattaccaaagataacttttctattatagggaagagggatattaaaacagacaacatgataggcaaagaaaaagaaaaagaaaaagaaaaagatgttcaatggtcttttatgcattataaaaacattactatcccccccccccaaaaaaaagcacaatttctctttgccaagtcatcttttgttaggatttcttttttcaaggaatcgtataagacttttattttttagtggtagtaccttttaactccaaaaaaaaaaaatcctcttacaaattcttacattgaagttcatgctcgcattgtacatggatttgataaaaaatattttttttatatagaaactagaaaaacggtctttttatctgtcagggtatgttaactagtcggtaaatcaaatcattccactcaattagcttatgtcctacatttgatcgcccaaaagttatattcatcgctgttgtactcatgcataatctcttccacgtaagaatgttccttttgagtcacatcataaagagaaggtatcgatactgtgtttcaacggtaaagaagaatgtttcaacggtgttgtactcatccactctagaatccagtttgatattctgtcctgatcgatgacgttctaattgccgtgtcccttgattgagattgactatgctctcgattgactttcagctctaagttctaattgaacaagttgtatgaaaagaattaatggaaggagtaagtatcggtctttttcattggcctagctaggaaagaatgagtacacgttcccatctcagggacatatatagcacagaaaatgcatgtcagtttacaacaatcctcttatgacttctccactacatggctacccgtgctggcaaattagttacgccatgcggtgatatatatggcctacatttttatatgaaaatatttcctaaccttctcttaaaaaaagacatttaatacaagttttgatatatcaaacttttagaaccacaaccatcgataatttctcttttttgttaggccaaaattttagtgcaggtggtccaggtcttgaactcttgatccatttctagctaggtccgctcctacgtctgcctaaatgtgctaccgagttttatccaccacttcgcaagattaagaacgtactgagtgttaccaagaaaggaagtccaaaaaattaccatgtgccaagccaataaacttggtaacattgggcccaatcgtttctaccgtgatttttgttggtgcgggcgcggatggcatatgctctgcaatccccactctcaccgcctcacttttcccctctccaggcggccactgagcgcgaccgtgtgtctctggcttcatcccaattcagcacacatcctaggtgacgttcgacgagcgcggctgcaatgtcctcggtttcctcaggactggtctctgattgcgttaaagtgttaaagactaaaactgtacctcgaaagaattcataaaaatcacaacctatgtagaatctatatttttttaatcaaaacaatatacggtgactaaagcaaagaaggggcatccgttacaatttgttttgatatatccatgtcgattccctatcaaccgatacctaatgtgtggtttgcttgtgtagtggtgcacatgtgtcctctatataactaaaaaatactagtgcaaattaatacttaaagaagaagctacagaaataaaagtcaagaaagaagagcagaggtcattccaaagaaaagatacacgagacagatatatacaaacacacttgaacactagatagagtttgcaaattgcaattaaaaaattaaaaaaagatattgaaattgtacgtgcaaaaataagacgtcactattttagcaaaactgatagtatatataaacatctacatctatctcagttgaatggattattacccatcaatcaattctaatgtggttttcttctgtacggtgcatgcacatatttgtttctccatataatcgaaaatatactacttcaaattaatagtttaagaaaaatagtatagaaatactcccttcatttcatattataaatcattttgacttttttctattcaaacctttctgcgtttgactaagtatatagaaaaatatagtagcatttttaatataaaacaaatatattatcaaaatatattcaatgctagatttaatgaaactaatttggtgtttaaaatattgctaatttttttaataaacttagtcaaacttaacaaagtaaaaaagttgaagcgacttataatataaaacaggggagtaaaagtcaagaaaagagaacagagttacagacaaacccgaatttttatctataataattaattatcataaaattaaatatttagtaatcaggtgcggatgctagagcgaacatcgtccagatgtggacgctgcactgaacggcgtccagtgcaagtctggcccaacgtgatcaagctggagcatccagccctagtctggactccatgagtttaggttaacccctccacagatcgaagcactgaaactagagttcacaagctcgggatcgaggaggaggtccccctcccccccccccccgccacacagtgagcagcgccgggagtgagccggccagtctcgccgcaacgatcgaggcagcgtatgatagagattgaggagagaaatgagggtggcggctgctgatgaattagtctgatcgagtaaacctaaacagttagacttggtgggagcttgggccgcaccagtgcgatggatgccgttgtctgtagcgtctatagcccaacgcgtttcgtccgagcgtccacacttggacgctctagctagcagcgtccttcctatttttgtaaataccgctactgatttaatggttatttaatttcagaataattaattatctattatatactaaaagtccattaaactttctataaacgctcccaaaccgtcatgcagcactctacaaacgtcctacgccgccacgtggcgatctaataaatagagaaaatcatataaattctaagaaaaaaaagcaaaacatccaattatcgatttttatttaaaatggtggacccgttaataaaggttttatatttgaaagaaggttttaaatcaaaaccaaatcaagaaactcctaaagatagattgtaaatgaaaatcacaaaagaaattaaacataagagagttttatgggagttaatttttaggggggtccctctaattataatttcctaggtttacgagggttaataagaatataagaaccggcatgatgcaagattagaaaatggttaattttcaggatgttacagagtatctaaattatttaataaggggaagagagcatagtaaggtaaatgttggacagataatccatttatatcgtggttggtagcagtgtacagtctttaatcttgttcagttcggacttgatcaaaattcctgctaagtcctgtcgaaatgtattcatatccctctgcataatgtaaagggagtgcattttaaatggttttcataatgggaagcattggtgcaaaatgttttcatatccctttatttggttgttttgtttcctcttcttttcaccccgtaattcgtctatgtctggcatgataacttctttattcgtttgtgcttgaaaaggaggaaagttagtaccattcacatgagcatatgtcacgatgaattagcatagtacctattgttttttttgttggtgtttgggttctgattatgtcctttttaccccttatttcgtagatgaagtcagtccgatttgttggtttatatgttcttcctgtaggacctgtaagcctcttgttgctttgattgcactggttactgctgtcctgttaggtaataatgttcacgttagtattatgataagttgttgtaacgttagagagagaattaaaattcactttacgttcgtttcacaagtcatgtttacatttgggtttatataggtctctttgtgatgatttgatcatataggctcataggatcaatttgttcttgttcaacatcttgcaatagcgtcaatctttttttagcgatgttacataagtaatattgatttacagtctactttatgatatttacctcaaacacatgcatagtatcttttcaatttgggcattttgaatcattttcatgcaatctagtatcaatgatcgcatacgtggccaaaaatccattgtgaaaccgttgaaattattctctaaagtttggatcctttcttgtagccttccttgtaaagtgatattggctgattgttcagtggatgttatagagtgtacctgaatagcacaagtgagaaaaggatgtcaaacatattttgttaaatacagaagtgcattgaaaatcttgattgctatgtgtatctgagtctttgtcctgctctttttcattgaggatttcattgcaatctatagttcccctaatgttgtcgacaacctatgttttagtcaaaaatgtttattagagattttacagacaattgatataattaatacatagtattgaaaatgagatagttaccttcccttcaccaaaagggtaagaaattcggtcttttttattttttttggtcccagtactgaattagtggcttgacggccagaataatatattgtcgcggccaatttatctaatcgcactttttcccaataccaaatctgcaagcatttgtacatgataatcaataccgtaataaaaaaataacggagttatatgtgcatgccatttttttaaacaaacacaatttgttctatgttttgtaacaaacctataagaggcatacgttcccctcaatgtttgttgtcttctctctaaaacttaatatgcctttgttgtcttctctctaaaacttaatatgcctttcattaactgattgaggattagacttgacccgtttagttcactcattttgtccatgtcgtcaacgagattgagatattctgagcgcacatatctttgagttgtacgacatatgaatgatccaattgagaaaagaataaatcttcgtatgaagtggtcatcatagctagaagagttgaatattgcttcctgtaatgcttgtaaagtaattgttgtttgtccttcctttttgtacaggttgaacaatttaggtttgttgatttttggtgcctcaaatatcttctctccttttgatgtcagtccaagcaaacaatagacatcatcgagtgtcattgttatgaaggtaccatttatattaaaggcttccttctccttgtcgtagcttcttgcaatctcattgcacaagtttcggtcaatatgaattttgttaatctttagcaagttgcctgaatcctcgatagcttgcttttgacgtggacatagttggagtcctagctcatacatggcgtatggggagcatactagagttccctgattaacagagaagaaaataagagtttaggccaatcttcgtacataaccttcacaagaatacccaatcaaatcatatcagtgcatatcaatgcatcatggagttcctttagattcaggctagtattatgctcaacatgttcttatgaaacagtagttgtataattgttttagtgttctagttgtgaaaaattagtaatatgaactgatgtatggttccaaactttcagatccagaactatgattattggattgctagatagatgcagcagcggcacagctttggaaaccaacagtgtggcagactagcagtgaaatgcttgaaggttttagcatggcatgcggtcttgaacattttcatttcaaaagatgggtatgattttgtgtttttgcttcgacacttagctaaccagacattcccacagagcagaacagatttgaacagcagcacagcagagcagaacatagatcaagttttgcatgttttgaggctatata

SEQ ID NO: 14911 - DNA, 669 bp, Oryza sativa
  unsure (1)..(669): unsure at all n locations
cgctggttnaatganattgcacttcgtaccccaccgccatcctttccgcgctctcccgccacgggcgcccccgggaggccctctccctcttctccgccgccgcggtcgcccgccccgacgccgagctccttttctgcgtcgtctcctgctgccgccgggcattcgcctccctccccgctcgcgccgggcacgcctacgggtaaagaccgcgccactgctggccttctacgcctcgggcggcccggcgctcgtcgcgctgtattcgatgtgtgggagggtgagcgccgccaaaagaatctttgatcgtatggacggcgaggacgtggtgtcctggaacgcgatgattggggggttcgctggtgccgggatgaatggcaaggcgtgggattgcttccgggagatgcgcgcaagaggtgttcgagggaatgcccgtaccgcggttgctgtgctgggggcttgtaatttggagtctgaaagacaggtccatgggcacatggtaagaacccatggtgatagtggttcaaacgcaattttgtggaatgcgttgatgaacatgtattcacgtgttggatgtgtcgacaatgcagaacatgtgttcttcgagattgaacggaaggatgttgtgtcatggaatgtgatgataggtgctttcgcaaagaatgggcatgg

SEQ ID NO: 14912 - DNA, 521 bp, Oryza sativa
ctcggtacccgtatatagaaggagttctggatgaaggaaagcaaatgaagttgtatatggaaacgaaaaggactactcggatcgtatccatgcttatctccctagttctatttggacaagagggcatctatgagtataaatacaagaccccctaggaggagaggggttaagccccaagcccaagatcaacatagatgattacaagccaacacatgccaagacaaaccgccgaatatcgacatcaaagataagtctagacaaacccaatattgtgtctgcgaaagccaacaagagggatctagcgctatctctgatctcgccgagtgcggatttgaggaggaaggctaccctgtcgtcgactacgagttggttatccatgccgccaagtcgacgacagctagataggttatcctaattattgtattggtgtgattatgatgaataagagcaataccggcttcggccaacaggatgtaaggctattacctgtcagataaggggcccgaacctgtataaaaacc

SEQ ID NO: 14913 - DNA, 614 bp, Oryza sativa
aggtcttgtattcttcataacccagttatacactccagcaagatttgttgtcatcacaccatacctcgatccatctgtatcgtacaacaacgaccatttctcccttggctcaaattctacccactccgtgaagcacttcgtgacccttccacgcttcctgcgccgagtaatacttggtgcttcattaggaatgggttcaagtccctccggctcctcctgtctggcaactataggttttttcctaacctcttccatgtgtgtagtggtcaaacgatccagttgatcccatatggcatcaaactttctttgttgattctgcttgcataacttcttgaacaggtccatcaatctcttactcctgaattgtctataaaaattagccccaaaatgtcgcatgcatcatctgctatgtaaatctggccatggcacggactgtgtgacatcttcttgaagcttctgtatcgctgatagcaaaccggcgtgtcggtcatgcagaacacacacatttggtctgttttcaacaacacacattttaatgtgccgcaaaaaccatagccagcttgatgtgttctcgctttcaacaaatgcaaaagcaataggaacgacatggctat

SEQ ID NO: 14914 - DNA, 786 bp, Oryza sativa
tataaatgtgttgaagcttatgctcaaagattaccctgactagcgtgagaagtgtatataatatgaacacttgcatttaatcttaaaatgcaccttctagatttatttcatcaatatcaattgattcagtgagattgtaccatgtcgactattgtgaagtatgttatgtttccacttcttttttcaggtatgaagcactttcagattgttttttcttatattgcaggaacttcaaaaacatggtagtcctgatattatcatggttttggttggtaataaagctgatctacatgaaaatcgacatgtatcttctcaggtcagatcttgtgtgaagttgtagtaaacatagtatcacaatatgctgcaaaattgttttgacgatatggtgcacattctgaaggaagcacaagagtatgcagagaagaataatatggttttcatcgagacatcagcaaagacagctgataatataaaccaagtatttgaggtatgccccctagcatatgaagctatttgctttcacgatgtccaagaagcaggatagctaacaagagaacatgctattttatttcaaattaatcaagctgaacaaaaacaccaaagcttcaaattcatggaaatcctaactgtttcacccacccccttacgtgtaagcattgaatggacagctactgcgttaggccatcaatggtcatcatcatactaactcgttatggtatgatatttttccattcacaggtcaccgtttttgcattagggtaccgagctcgaattcgccctatagta

SEQ ID NO: 14915 - DNA, 635 bp, Oryza sativa
gcagttaacttctaaactgtgatggctattcactaggtagcttcacaacagtacttatttagttttataatgccatgaggtcgggaacttgggattctgttttgcattgtatgataattcttgtgtcatcaaggcatattttattatttgctgctgacattttggctcactgcatcacagggtaagaagagaaaagacaccatctgcattgttcttgctgatgacacctgcgaggagccgaagatcagaatgaacaaggttgtcaggaagaacctgagagtacgacttggtgatgtcgtgtctgttcatcaatgcccagatgtcaaatacggcaagcgtgtgcacatacttccaattgatgatactgttgagggcatcaccggaaacttgtttgatgccttcctgaaacgtaagatttctttatcactgaagtattttgatttttctcttatagaaggttctagatagagaattttagagctttgctgccatgttctaaaacagtattagccatttcatttgaacttgcttgtttgatacttaattatgtcgaggaaagtttttgtggctcctaatttccatgaactgtagtacctatattacgatgtacattataacattaactacattgttgc

SEQ ID NO: 14916 - DNA, 683 bp, Oryza sativa
ccaatgagttcttgattgagaaaaaccatatgcatgtgtggcacgtaagatggatcaattgtaaaaatcagtaacacatactactagaactttctcacaaaaccaatgcttctaatgcaccaacagcatgccattatcccaagattggaagaagctaaaaccatagtgctgtatgtgtacctctcttgtccagcggtatcccatatttcaaatttcactattgttgagtcctccaaagccaatgtttgtgataaaaatgatgcaccgacagttacctgaaattatttgaggaaataagtttaaaacaatcgaacttctgaaagtaagaatcatgcatctaaggtgaagaataacattatcaactgaaactaagagactcaaaacagtaatcaccttggaagtgggatcaaactgaccacgaacaaagcgaagaacaatgcaacttttccctacaccagagtcaccaagcaataccaactacaacatcaaaaggatggacacgttaaagaaagctgctagtaacatgatatagaggcattattgtagtaataaagggcaaaatgtgcagtaaaccttagcacgcaagtcctttgaatcagtagcggagttatcgttgctaatattgttcaaccctccagtgcttcgagctggatgacaaaacagtgctatgtgttaacaaatgg

SEQ ID NO: 14917 - DNA, 967 bp, Oryza sativa
agcttagctattagcgcgcggcgcggcgagcgatgcgtttgccggataactggatatagactgctctctgtgttggcacagctgcaggttaacttgagctgagatggtatcatctgcttgcttgcttgattaatccgcatgcaggaaaggggtgaagtgccgggtgctggagtcgtcgccggagctccgggcgtcggggttagccatcgcgacgtggaggaatgcgttgcaagcgcttgacgcccttggggtgggtgacaagatcaggaagtgtcatcttcatcttcaggagtaagtactagtgtactttcttcgtccactcactaaagtgcggttaaacttggcgcaatttttaaaactaatttgtaactttaaatttctcatatattataatgtttgtcgcaataaaattataattatatgaaagtaaatttaaataacaatccaataatattattttcatcgaataaaatttaatttatagtttattggtcaaatatttaaagagttaaatattaaaaaacgtgcgcatttaaagagttaaatattaaaaaacgtgcgcgccttaatgagtggacgaagtcgcacaagacttaacaaagacctaaacactgcaggagatacacctttgttatttcgtttttgcatgtcactcaaacatgcataatttatttttagatgaaacaaaataaattcatgtgtatactttattaccatgtatgtctaattcgagctctacaagttgcaaaaaaaaaagaatatacggccgtacgtgatatatgaatattatgtacattttaatttgttagtagttaattcttaattgagaaattgtagtagttaatttaattttgtactttttgagtgatatactgtatattaattattttttgaaaaaaatataaatgcaagacacaagtggacatttcctagagcgggtaccgagctcgaattcgccctatagaag

SEQ ID NO: 14918 - DNA, 508 bp, Oryza sativa
aatccctcccccgaaaaccccgcgagtttcttcaatagctcacccggtttcgttcttgcggcttcggtttgatttcccaggtgaagccgcagaagaagagcagcaacaagtgggtgtgcgtggtgtgcaaccagcgccagtccgtgatgcgcgtccacgcccgcgggcaccgcgccgccgacctccgccgcttcgtccaggaagccaacctctcgcgcggccgcgccgcgcatgtgcccgtgcccgaggaagactgggtccctgcggtgccgggggagcagcgggatgagttcccgaaggagaggaagaggcggatggactggtccgactatctggaagatccgggggagtacgatggcggcggccaccacgaggaagctcgagatgaaggtatgcgcgaaacctgtttgatgtgatgtcgcaatgtatgtgtatcacagtatcagtatgatattgggtagcgtgtaaaatgatatgctcattaggaccaatggtaagttgattttgc

SEQ ID NO: 14919 - DNA, 517 bp, Oryza sativa
attttgttcctgccatcttgcctcttgttaatgcacttttgatctggagctctctgcaaatgttgctgctagcttgtcccaaacctttctatagttttatggggtcatcgtttttaaaagtttcagaaaaggaaacataaacagccagccctgcagaaagaaaatttgtgtcctaaaaaactgatgagttggctgtctgatctatacctaaacattagtaactgctgacacattagcacctcttcgttttcttttggaagttatagaagaactgatcagataatatgtcccaggctttttgaagttatataatttgccattgttttggacctttggtgcaggcacgtagggcattccgtgcattaaaaggtatcataagactccaggcactgatccgaggacatcttgtaaggagacaagctgcatcaacccttcgtgtgacatggttgatcgtgaaacttcaagctttagttcgtggaagaaatgttaggggtaccgagctcgaattcgccctata

SEQ ID NO: 14920 - DNA, 587 bp, Oryza sativa
tgtgtatttgtgtgcacgctttcaagcttctcctcgtgcttcacatcgtcaagcggtcaagcgaataatgaggtatttgaatcatacacttgagtttggaatttggtattctacttcatcttctatatgcttaagtggatattccgatgctgatttcggtggttgtagaattgatagaaaaagtactagtggaacatgtcattttcttggtacatcgttgattgcaaggtcttctaggaaacaatttagtgttgctcaatcaactgctgaatctgaatatgttgctgctgctagttgttgttcacagattctttggcttttatctattttaaaagattatggtcttacttttgagaaagtacctctattttgtgataatactagtgctatcaatattgctaagaatcctgttcaacactcacgcacaaagcacattgatattcgttttcactttttgagggatcatgttgagaagggagatgttgaattgtagtttttggacacaaagttgcaaattgctgatattttcactaaatctttggattctaatcgttttgcttttcttcatggtgaattggggaataatt

SEQ ID NO: 14921 - DNA, 758 bp, Oryza sativa
ctcactttatatctgagagtcaacctatctatgagattcatttactttgtggaaccaaaagaaacaatttgtagattgtggtatgttgtagaaactgaatatccaatgcagtcagcagcatgtcatgttcagtagattccttattttattttgttgctatgcatgctatcggcaactctaatgttcgtgtaatataatacaggattcaattgtggagaagctgccaattttgcgactccccaatggttgaagtttgctaaagaggctgcagttcgaagggctgtgatgaattatcttccaatgctctcccatcaacaactattgtacttgctagcagtttcatttatatccaggtttttttttctttttctttttggagtttggttttgtgctgtccaaagtgtctttttagtttttgcacctcattaataggttgatgaaacaaaatatattacctttgtcctccaacaaaccaaatgctacagctagtgggtaggggttagatgcttgttaggtctgccatacagaaggattacgcataaccgcaaaggtgaagttgtcatggtgctcctgggagacgccgcattacaggatcaccacaatgctaggtgtaagctagacttcaactaaatcacattatattccaagtatatcagatggaaatataaacggcaaatggaaaatgtagcgcataaaacccactcaagccgctacacccacccgctacccagtccatgagcccatttctacaccctctc

SEQ ID NO: 14922 - DNA, 641 bp, Oryza sativa
agacttgcagctgggcggcggccaaaacccaaatcacgtcaacaagcaccggaactcgagagcgtgccgcaatcgtagtcgggcatcatgagcagcgtcttggcgagcaccccggacaacagcttgtcacgcaggaagcccacggcggggtggtcgctctgctgcacgaaccccaccgcgtacgacgcaccggtcagctgcgcactcctccaccgccgggcgtccgcgtaccggcgcagcgcggcctcgacgacccggtgactctcctcggcggcgcagtcgccggtacggagcagcagcgcctcgccgaggcacctcgccaggacgacggcgtcctccagcgccgtgcacgcgccctgcgccaggtccggcgtcgtcgggtggagcgcgtcgccggcgacgcacacgttccccttgctgatgctcgcgaacgggagcgacagcggcgatcggaaccgcagcggcgccgcgagcacgtcgttcatctcgctccgctcgaccgcctcgagcacctgtggtggcacgttcgtgctccggagctttgtcagcacgaactgcttcgtcgcggctgaactcttgtcgacatccttatctgtcaaaagacacggcattaatcagtaatacgattcagtgttcatgtc

SEQ ID NO: 14923 - DNA, 582 bp, Oryza sativa
tccgcctcattcattgtattataaggaatatggaaaactaactgcatctctgagttcttttactgaattttatctaagctgtatttcaatattccacaggttcgtaatgacaaatgtgtgtttttggctgctgcttcaaatttgttgccaatactggagatgtaccaagcgggtgacacgctaagtgaagaactattacacaaaaaacactagttttaccctttatttgcatactcgatgccggaaactcgatagatttttacttgtacttatgttcatgaataaaaaatagcaaaacaatccttatcatatctcttcctgctcgctaattggtttatccatttttctggaaggcttcccaggtactccctccgtcccataaaaaaccaacctagatgtgacacatcctagtactacaaatctggacattctagattcattatactagaatatgtcaaatccagtactagattcgttttttttttggacggagggagtattccttatatgctggtagattcatagttcatatcctgtaccaaacatggagtttcagtttacaaaacaatgatccttgatata

SEQ ID NO: 14924 - DNA, 722 bp, Oryza sativa
gaccattatcacagaactaacctacaccaaaaaccggtcgtagctgcgcttcttcctgcccaccgcatgccctggcgcctccgtgctgcagcatatcatgtagctgtagtaaggcgccatcctggacttccatcctagagcctcgaatctcccgcgaggtgtggcgcttcccagcatgatgtccgagatattgggagcctggtccggacaggagtccgtctcatagtaatcagacatccacagaggattgctggcctctgcaaatctcaagcaatgcacccattggcccttcagtaagagattgttagggtgatcaccatgcaaacggagctggttgcgtatgtatgccctcaggtacttcagagtagagcaccagaactgggcattgaaattatccctcagtaatccaccaatggtgtatgcagccagaaaggacccgctgtactccgttgcaatctccatggctaccgaagcaagcttcgggtgctcatccgggtctctgcttccaaatgcaagcttcttgaagaaataccagtaggcttctggatgcaagaggtccagccgaatagctgctgctgttcccagattctcgatcttatctgacctgctggtgatgattattttgctcccacgggcccagcaactcatcgaagattttaagctttgccatgtttgttcactgatatcgcaagctacctcaataattatcaaccaccttttac

SEQ ID NO: 14925 - DNA, 1742 bp, Oryza sativa
tttaaccaataaggaggagggtttgactagccaaatagcttggccagtgagttggtgatattgatggagcatgttttatttgatagaatagccaaaatttaacttgaagagtcaattagagagactgttggagatgctcttcaatcaataacacgttaataacatgttgaaggtagccatattaatggagccggacgtagtactattctgcatagaaccgtcctccggtatgtatatgcgtcatgtgcgtcttccctgtcacgagtgcgtgaactggagaagatgaacgaaatagccagagtcccatgtgccgaccgatgtgcggtgcactcgtgcaaccgcgtcgtcgctggatgctgcagctctgctgctgcgtgacgtgacggatggggggacacactcgcaaaaaccccagctgacctcatcgccgggtggtcccccctctctcccctcctcctaccgctccccatggccgccgccgccacccgcgccgtccgccgcctcctcatcgcctcgcggagtctccacgcaagtacgccacctctcgcgcactaactctgacctccaccggccaccgctcgctctcacacctttggttttttttttttttttgcttcctccccccgcgcgcccagtctcttccgagggagcggcgagggaggcggccacgagcttcgtccaccccgccgccgtcgtccaccccgacgccgtcgtcggacaggtaaagatctcccccattccgattgctcccactcaccagccgcggctctggctgagttgagttgctgtatcggccaacgaacttgtcgtggagtctctgcgcttggctgttggatttggtccatgcggaaatgtcgaatgcgtgctagccttcgcctgcttggtgcagatgctcataatctgagatgattactttctgcttcataggaaataaaaatgcattgatttctggtagtaaatcattgtgcatatgtgccttgaacttgaaccactatttgtagggtgtctcgataggcccattttgcaccgtgggagcttcagcgaggattggtgacgcttgtcagttacacgctgggagccatgtcatgggagataccgagctaggggagagatgtgttgttctcacgtaagatataatttttttccccactttctgttttcggctccatcgatggatctagaaatgtttgcattcttctgatatgataatagaacattcgggtgatatcgaaattgaaaaatgatgggaaaaaaaaaacaattctccaccaatagaaattctagtgaaagtaagctactaagcttggattatcactggtgctatgtggagctaagatgttgttcttgtaggtacttttgaatactacacatcccctgttaggctatctaccaggacaatagttctaatttctttcctcgccgcatcaagctaatttgttgcaataacttttctatcaacagctgaaccatagccagcagcattctaagcttcaaatatgcaatattggagaacaatgcatcatattgcatgtttgtcaagaaatctgactatatgacatgtgaacaactttaatgtggaatttagctttctggcagtggcgctatccttggttcagacattcctgggcaaaccattatcggtgaaaacaatgtcattggacaccacgctgtagttggtgttaagtgccaagatctcaagtataaggttagaattttttttttgtttatcactggatttttag

SEQ ID NO: 14926 - DNA, 25008 bp, Oryza sativa
caccgtgtccttgataggaagaagcgtcttaggcagctggttacatgaaatgaagctgatcatctcgtttcatcttgtcatggtgtatgtagatccgatcctctgcagcggctgtgcgcgaaattgtacattgcattaagttgtggtcccacgtaatgtgtagttgaatcaaactcctccgcctcccaatgcaacctgtggattgaaactgtggcgccaacaacgaagttgcgccaaatagcatcctgccatgcttatgaccgtatgaggagtttttttttttaatcgtaccgtgctctttattaacaagggactttacaaactccggaaggggatcagcccaatggacatctgacccgggtacacacatcgaccttgtcaaaatccacatagatcatcattttaatttgcctgaagatgacgcccgcaggagcatgatcatagtcagttgacttcaaagcacccaccaggatagaacaatctggcgttgaagaacaatctgacttcaaagcagccatcaggatagaacaatctggttgcttctgacctggcgaacaactcctggatctctgacatccgtgccctcactgtcctggtcatgtcccagtttcttcttatttgggatgcggtgcttcacgtacaactctcgccgggtgtcgaggatcgtctcgtttggcgttggacctctaaccagcgctactcagcgcgttcggtgtaccaagcattcttctatggccagcattcctttgcctatgccgatcttctctggcacgaaaaagggtattgctaaatgcaggttcttcctttggtttgcattccagcagcgctgctagacaactgatctcctccagaagcgtggcatcgataatcactcggtctgccccttttgcgctcaggatcttgagacggcgaaccacatgctcctcgactacgtgtttgcttggcaggtttggctctgtgttctgtcgcctcctggctaggctaccctctctcacccctgtggcaatcggttccaggattggtggctgccctccagggcctgcttacctaagcatctccgtgccggcttcaaccccttagtgctcctaatctcttggcaattgtggaaggaacgaaactctagggttttcgactctgcactctcttcaatctcagtggttctggagtctatccactcggaggaccatctgtagtctttaacaggcgttgccgtttttggggacttgtttggagtgtagcgtggctcggccccttcccgctgtttggagttttgttttagccgccgtagttttctaagcttcagccttttattttgctttttctcccttcccttggcataagctggtttggctaattgtgttgtgtaactataaatcttttaatatattgacgtacaattgttttgcgcgttttaaaaaaaagatagaacaatacgttcctatggcgaattggcgatgtgtgagattccatgacttgttgcagtaagcagagcatacaagcaagcttcagcttcgacactctgagcatcatgcacaaattcaattttccctgcacctgctggcacgccatttccgtcatgatcccgaatcacaaatccccagccaccagttttgctagcttcatagaaagcaccatcaatgttcagtctcacctcaccttgaggtggaggtcgccagttttcagtactcgaggatttggctgggttttatcatatctgaccgtatgagtagttggcattacatctcgcttgcccatccaattatgaacatgccctccgtcccatattataagggatttttggtggatatgatatctctatccaaattcatcgtattagaatatgtcacgtccacgaaaaatcccttataatatgggatggagggagtacttctcaaaaagcacgattttttcaggaatttgttcagttactaaaaaaacccttcaatccaaaaccccttcttggcgtggtattcagcccacgaaccattaaaaatccaagcccacaatttggtccacaagctgcatctattcccaagcccacccgtcactcaaaggcccggttggtctctctctccctcgccgcgtcctgctgggaaatccggcgatggctgcgggcgctatctccgccggcgggcgcgcggcgcgggcgtccgcggcggcgctgtggtcccggcgccggcagtggttgcttctgcgcgtggagtccctgccgcccatactctccgcccgcgcgatccccgccgcggacctgcatgccgagccggtttgcgccgccggccccgtcctcctccccgccgcctgacttccacgccgccgtgatgggtaaatagcatagctaggtaggtagccgttggttggtggatttgttgtgatttccatgttctcatcggataggttgattggatagattgattttgttgtcctaaatgtcgtgctctctaaacgcttagcatgtagggagatctcctgacgagttggctatcgatattggggatgaatggctgcttggggtactttcctcagtaaattacaatatgattcgatgtaactgttgagtagtccaggtctcagtgccgactgccgagtgtgggctgggtttgggggctgtaattagtaacattgttgctgactttgtacatgtttaccctctactcccccatcccaaaaaaaggcaacctagtgatttgttgtactaggaggtcgtctttttttttttaggacggagggagtatgacttaataaaaagttcgattggtgcactagtgtcggtccagtgagattaggccaccaagctctcttgcagtgctaagtggtaaactgctaatacacgttctgaaatccacaatcacttgccctcaatgccccggcctagcagtgcctttgtagaatcattgtatctagatagcagcctccaatgatttcaatgtgtccacatcacaattccttgtcgctaatctatttaagaaacatgcctgattgccgtaagtcttgctcctgcagtacggcctgaaacacctcttttccctctatgatttataacagttcaccatggagaccttcctttctgcagttcttggtgatcttatcagcagatccatatccttcctcattgatacttgatactactggaagcaacagggtgtggacgagaatctgcattggctgcagtgcgcgcgtctgttgatccaaaccgttgttgaggaggccgataggagacacatcacaagctaagcaatgatccttcaacttcaaatgatgagaaaagcgatgtacaaaggctactacatgtctgaatctttcagttaccaaatcatcacaggtaaatcccaaggtgagttggttgacctcttgatcgctttctcccatttagttcagcaaagtggttttatttatccactggaacaacggaaatactctgtaaggggaagagataaaagagatgcaaaagatggttggtatcttgaaaaaacatagaatagagcagtcttttctactacaaatgagcataggtagtatgaagtagaggattattgataacctatgttaattggttgagtctgaatcgagttgatgtttgctaattgtaaggtatgagtcgtgttctgaaaatcaccttctcagccttctgaatggcccactgtgtaaggaaaagaaaaaaaagaagccaaagcattgaaatgttttgaaggtgtgactcgttctctgaaccttctcagtcctcacgaaccttctgttggcgacgggccacctgtcgacatgactaattgtgcagtcaacagctgaatgtctgaaacggacaatcatatgtcaatgagtgatccactgtgtaaaacaagccaaagcattgctcctagcagcggtcttgcaatgcaattttgtttttgaagacacttgcaatgagttcaacagcaacaggacaacttgtttaaattgccagcctgattgctctccctcttcctatcacaaaaatctcaccatggacaccatcttttctgctgttcttggtgatctttttagcaggtccatatccttcgtgattgatatataccatcaccatcaccagggcggtgtggaggagaatctacagcagttacaccgcatgctgttgcgaatcaaagccgtcgttgaggaggcagacagtaggtgcatcacaaaccaagcgatgctgctgcaactcaggatgttgagagatgtcatgttcagaggctactatttcgttgataatttcaggtacagaatctttcaagctcaagctaaagacgaggtgggtgatcactctctcgacctgccccctttcaatccattagaacgattttttatcttcactagagcaagtaaaatcgcatctgaaatcttggagaaaaaagagctgcaaaaagatgcttggtcacctggaaaccattgtttcagacacgcaagagtttgttgtgcttgcgagcagctaccctcgtataactcgccaaccctattgcagctatgtgttgctggaaaactgcatgtttggtcgtcatgcagaactggaaagggtcatcaagttcttgctagaacaacatcctctttgtggtgcaaaaggtattgatgtgcttccgataattggaccaggcaaagttgggaagagcactcttgttgagcatgtctgccgtgatgaaagagtacgtaaatgcttctctacaattgttttctatggcccggatagcattgataatggagacatggtgcttcttccagacaccagggcaatcaaatatcgaaatcctgcctcaggcgaacagtcattagctatcattgaacttgtcgatgagatggatgatgaaacatggagaagaatattacacagcttgagaggagaccacataacatctgtgagtaagatcataataacgagtcgatcaagaaagatagcaacttttggaacaacaaaagcactccaattagattttctcccaaaagaagccttttggtatctgttcaagacggttgcatttgggagcacaaatcctgaggaggagccgaagctagcatccatttgtatggagatcgcagacttggtgaatggatcattcatggaatcaaatgttgttgggagcatactcagatctaatattactgctcaattctggtacaattttctcaaacgcttgaaatatttcactgacagacatttccgtctgctaggtgaacacccaagagactcatacaagtctaaccgtgggcgtacttacatatggatgcataaaaactactatggtgacggtgacgcagcgacatacaatctttaccatgcaaattctgcaggactaaataatctaccaatgatacgaatgagcgatatgcttatcggaaatgttaagcctcagaagaaatgtgaagccctggaatggcaatccagcatacctccatactatagctatatcgtgcaatacgggatacttgcacggcagccgcttatgctacctaaaaggaagcgatcccgggcgctcttagaggagttagtttgatccaaaataatgttggttgtcaaactagtttagctccatccatatggcacatcaaacaaatatggattctataacagcaacagtttataaaatatgtttgactccattcttatccagttattttgatgtaaacttactattacttgtgtacatctttatgcaggaatgtcgtgccatcttccgtcatataatcttttagtcatatggttttgttttttttttgtaaggttggacatatctttttatgtttatatatttataaaattttatgaaatttgaatctgtatctctatatcactccctttgttctcgaataacattgacatctgactcaccacaaattatatttgaacgattagattttgatgaatgaaacttgtatggttatatttgtgaagcatagcactttaataatgtaacattaactaacatatttaggtatttatatattttttaaaaaaagaagtggtctaagtttgaaattgaacagtacaaacatgactaaaaggagccatcatattcattctcaaggcttagaaattattatgttaaatgaaataaaaaagaaatatctatgctatccatcaaagtggaacattatatagtatagatcgatagccacagatgtataagaaacagttttattttaaaaaaggagaggaagagtggtgtagaacatgcaaatttacttcaaataacactgcccaactggttcgttttatgtttagcttagataattcttcattcaaccttttgtcaaaggagggattgttttataaagaaaaagtgtggagtgacagtgactgaaatgtagcaaattttcagttgcctcaggatgaacaagaaatccctctctttttcttttttttttttggctgcagtaaaatgtgggtctttgttcatttcttaaaacagagacaagttggcttttaaatttctccctcgtgcattttttttgtaagacccaatttgatttgtcatggtcttttatgttgaactttgacattaaatatatttgtaacaaaatgttacttcctccgtttcacaacgtaagtcattctagcattttccacattcatattgatgttaatgaatctaaatagaatgacttacattgtgaaacggagggagtactaagttagaagagcatgaccatatgaaagcgtgttgaaccataattccagtggcgactcaagtatcaagcaatacaatgcctttaccactcagaatctcacatcatctgtttgtacgtttttcgtcagacttccatgcttgttttctctcatgagttctgacactgagagaacacaagaaggttcctcatgcttctatggcttaatctgatgatcataccatttcttctgttttctccaaatataagtaagaaacatattgcatcacattctctcgtatgacacctgcatggattttttttctaaaataaacaaaaacacatattgctttctccagcattccaagagtcaaggaaacatggaacaggacagtcttttctacgaataaagcaaacaataatatgaagtggagggtaatttatcaaagagtaaaatgcatggaggatcacttaacttgtttagttgtgtcaagtaggtcactctacttttaaaatacacatctagatcactaatgagtcaagtgagtcacttgttcatctaactatccatatgagcataccttgtacgcatgacatgctacctatgattgaaaaaaatgctttgacatatgtagaaaatcacatatgtatttttttcccattctcacagcacgaccacttgaaaatatacgaaattaggagaaccaaatcattttcactttgcttttttatgagttattgtacaatcttaaacaacaacggaggcaaaatcctattaggcaatggcggcggatgctcaaacatttttttcaaccctaggtgacatgctatatgtatgaggtgtgctcatgtgaatagttaaatggctaaatgactcacttaacttacattaatgatccagatgtgcattttaaaagtagagtgacctatatgatacacctaagcaaattggatgaccctccatgtatattactccttatcaaacgcctggcttaattacctaattctgaaaacgtaagggagctgacgtttgctaattctaaggtctagcacgtgtactgaaaatcatcgcctcttatgagcccttcgttgtcactatcggcgactgaatgtgcagtcaacactcaacaactaaaacgtttgaaaccaacaactcagcaagaaatcgctgttaagggctgacctggagcaattcaacaacaacatgtacagctccctgtggctaggcttcagtataagttgcatgcctgccctgattatacccttgttccaatcataacaaaaatcttaaccatgatggacactttcttttctgctgttcttggtgatcttctcagcaggtccatatccttcatgattgacagatacaaacagcaacagcagagcgtggaggaggagagccgtctgcagcagttacaccgcgtgcttctacggatcgaagccatcgtcgaggaggccgacgggaggctcatcacaaaccgagcgatgctgcaacagcttggcatgttgagagagatgatgtacagaggctactacttcctcgatggtttcaggtatcgaatcgctcaaccacatgctcaagatgaggtgggtgatctgtcccctttcagtccattaaagcggttctgtatctccactagagataggaaaactacaatatccgaaattttggagaaaaaagagctgcaagagatgcttggtcgcctgaaaaccgtagtttcagacatgcaggagtttgttgtgctcgtcagcggctaccctcgtatgaaacgccaaccatattgcagctacttgttgctggagaactgcatgtttggccgccaaatagagaaggagaggatcatcaacttcttgctagcaccacatcctctcggtgatgaagaagatatcgatgtgcttccgataattggaccgggcagagttgggaagagcacactcgtcgagcacgtctgccgtgatgaaagggttcgtgaatacttttctacgactgttttctatggcccagatagcattggcgatggagacctggcgcctcttacagacaccggtgcaatcaaacatcgaaatcctgcctcaagcaagctgtcactagcgatcattgaacttgtggatgagatggatgatgaaacatggagaagaatattgcaaagcctaagatcaggagaccatgtagcacctgtgagcaagatcataataacaagtcgatcaaacaagatcgcaacttttggaacaacaaaagcactccatttaggttttttgccaaaagaagatttttggtatttcttcaagacggtcgcatttgggagcacaaatccagaagaggagccgaagctagcatctatatgtatggagattgcagctgttctgaatggatctttcatgggattaaacatcgttgcgagcatactcaattctaatctcagcgctcaattctggtacagtttgctcaaacgcctgaaatttttcacatacaggcatatacatctgctaggtgaacacccaagagacttgtataatgctaacagtggacgtacttacatttggatgcatgaaaactattgtggtgacagtgacttagtgacatacaattattaccaagtaaattctgcaaggttaaatggtctacaaacggtactaacaagcagagatattctaaccggaactgttaagcctcaggcagcaaaatatgaagtcttggaatggcaatccagcatacctccatacattagctacatcacgcaatacgagatacttgcacaacagaaacttatgctacctcctaaaaggaagcgatccggggcgctctcagaagagttagtttgatatggaattagtgttgtcaaactttagattaggtccatcaacggactgtttggtaaacatgttccatttcgttccaatccaattatttttcaaatggtgttactcatgtgtgcccccttctctttcccaccctctttgatgatgtaaactaactagtattaatcaattgtgtgcatcttcggtatcaaatcttttagtcatgttgggacaaaatccaacaagtatgcgtgtatttctctctgtattggatgcctcaaccgcgggcaacgtttacacatttatatggagtgtacaaagaggaaattacattgctacccacattgctggctaatctaagtggttggccggtgggccagcctgacggccatcgggtaaattccctggtgacaggagggctgcgcccattaaggaagcggcgcatgttcccgagggtgcccgctattacccggataaagccatgctccgggtaatagcgtgcgccatctcgccatcgtcagtggtgtcagaggtggttggcggcgtgtagtacgtatttatgccatcccactgagcgtccagtcctccatctcaagcctagggctcttgaagccctggtttcctccggggcagcagttagccctggaggccttgataggcctccgaagtccttatacggcttcggaggccacggagcgctccggaggccttggtcaattccggagcccctgggtagctccggaagcctcaaacagctccggagcctacgggaggctccggatgccttggctgcctccggagcctcaagcgggctccggaagccttggttggccccagagcctctaaattgctccggagcctagggtagtagccatctttagtcattttcctagggtggatggctccgttgaagctcggttcgtctttcggaggcttgctcctttacccggagccattcccccaacaagtcatatggtttttttttgttgcacatatcttttgtcttgatttattttctaaagagttcgtgaaactttgatctatatattttaactattagattttttatgaatgaaagttgcatatttatatttgtgaagctacatacttcaataatgtaacatatttttcaagtatttatttatttttgctaaaaagagttcaaaactaaattatttcaagaacagagatatctattaacttattaaagtaacagaaaaagggaaaactattctaatccctcgaggggatgttccctcgtttgcttaaaaaccatctaaacggttatgaaaaattctggaaaaatttgacaacattcatacaacacatatatacaactccacaaaatattaagtccaaacttaactcacaagtcaagatataaaaaaaggcaaatttagcgtatgaatagtatcgtactgtttatatctaaatttatcttttatgtttcttgatgtgtagatcgaatttgaacatgaattttggtggactagtaggtaccattatactctatattgtcaattgttttcagaatttttcacaactatttgcatcgaatttaaaagaaaaaggtatacgaggggatatcctctcgatggattagaatccactccctagaaaaaggagcctccacgttctctcacggcttagaaattctcatattaatcggagaaaaagaaaaacagtaaggaatattagaagaggagactagagtccatatagaaatacaatttagaaatagttaaaattcggaattaaaaaataagtaatattggaagaggagactagagtccatatagaaatccaatttataaataactgaaattcggaattaaaaaataaagaatattagaagaagagtatagagtccatatagaaatacaattaagatataatagaaatttggaattaaaaataaggaatattagaagtgagtattgagtccatatagaaatacaattaagaaataatagaaattcggaattaaaaataaggaatattagaattagagtatagagtccatataggaatttaaaactaactaaaatttagaataaataaaataaaattaaaaatttagtttagagttcgcataaaaatacaatttacaaataactaaaattcgaaattaaaaaaaacatggaaagaagagtctaaagtcattataggaatacaatttaaaagtaactgaaattcgaaattaaaaattaaagaatattgaaagatgactttagagtccacatagaaatacaattagaaataataaaaattcagaattaaaaataaataatattgggagaaaagcctagagtctatatagaaatacaatttacaggtaatgaaaatccagaatttaaaatatatatataaagacgagtctagtgtctatatgaatataatttacgaataactaaaatttgatattaaaaataattaataactagcacatatataaaatacaatatgaatattacacattagtagtttcgtaaagttagtataaaatttaaaattatgttgtcttcttaatatatttgaataatatattgagaaaacatatatgctattatatgagataaaatgtaatgatgctagccgcgcaatctgcgcgggccaccatgctagttataaatatggctaaaaggagccactatgttcattcttgaggcttaaaaaaattaccatgttaaataaattaaaaataaatatatgtgtaatctatgctgatgggactaaattatagtggattgattgatcgctacatatgtataagaaataattttaaataaagggataagtccgagttaccatctaatatatcatattttgccacttttgtcttgaaactatctagggcttgttcagattgtagacaaaataaatctatgccaaaatttagtaagttggcaatattaccaaaattttagcaagatttcttatgtatttaccaaatttggcaacaaactaaacgcatacattttttttacaactttaaaataaaataatatagttgaaaatagcatcaatctgaacagccccttactttacccatccccttggttcaaaccaaccctataatttttcgtctatgtgatgcttacatgatgatccagtcagccaataatattttaaagaaatggtcggttttcatctacgtggtgcttatatggtggtccaatcaggcaacaaaattttaaataaatgataggacccatgcatcaatctttcttctccttctagcagtctagatcctggggcatttgactatttaccacccacaatctatgacatgtggattcagtagtaaattcttaattgccacttgtaaaaatggtaaatagttaaatatctctattgcagttgcaacctcaagcgtgcttgccgccctccaagatctccacaaactaactgcctcgggtgtctcctccttgatcttcggagttcagtggcttgttagctcaggttgagtttagctccaaactttttttttcaaactttcaacttttccatcatatcaaaactttcctacacacataaacttccaacttttccgttacatcgttccaatttcaaccaaacttttaattttggtgtgaactaaacacacccttcaatagttttgaacggtaactgccatagagggttagttttatctgcaatatctattgatattgtaaaactcttgcctaaaaaaaatatcgtcaacctccggcaagttccaccttccatttccgcacatccatgtggttgtactactgctgttttggtccagatttttgttttaaatctttgtagtcctcaggacctctgccactggacatgcatctcttctacaaatacttcccctttccacagccttctcgacatgtgatgatttctatatgtcagtggcatctatactccaaatttaaaaataaccgatgtaaaatagaccacgaatttattatcttgataaagtaatagaaaataaagtcaccaatgtttgctcttatagcttagaaatttatgcattaatcagatctaagtcattgattaaagtgtgtgtcaagagtatgacggactagattaaaactgagttcaagtaggaatataatttaaaataagattaaaaagaatccatattgatcacaatgtataatccaagttgacatacaatttaaaatatagaatgcatgaaaaatagtgtatcagaaaaggagtgttaagtatatgagaagaggacacaaaattcttatatataatatcattcaagtttttatgtgtatattatatattattctcaagaatgaatttattaatcatgtattatcgtcaagttacatctaaatataaactttagctttcaaatcatctattaaaatatgtttatttgtaaaatcatggtgattaagttacgattaacaattggtcgagatgttgataaaatgctattttttaatgtttgtgattttataatggtttacgtatgtaacatgtgctcgaaaatatggtttcttagttgttaatgggcaaccgttgcttgtggttggaggggcgtacgttgttgccttgttggtgatcactctcttggcctgtcccatttctgcccattgaagcgtctctgcatctccactagaacatggaaaattctgtcacaagtcctggagaagaaagagctgcaaaagatgcttgatcacctgcaaagcatagtttcagacatgcaggagtttgctgtgcttatgagcagctaccctcgtatgagtcgccagccttatggcagctacttgttgctggaaaactgcatgtctctcggcctttgtacatttactactcccttcgattctataataattatgttttaaacaaagttaagatcaaacttttataactttgaccattaataattttaaaaatatttagtttaaaaaaactagaacaacatatatagatttgtctttcaaaacactacaataaaagtaaacatacatttatttaatatatgtattataatagaaaaataaggtagaccgtattaattgtttaaaacgttaattaaattgaaagtagtaattctaaggtctagcacatgcactgaaaatcacctacccataacgagcctttcgttgaccacctaccgatgactaatactccatccgtccctaaatatttgttaccgttgactttttaaaatatatttaaccattcatcttattttaaaaaataagtaattattaattattttcctatcatttgattcattgttaaatatactactactactactcaagtttttcaataatattcataaaagtttttgaataatatgaacacttaaatatgtttaaaaaaatcaacgacgtcaagtatttaggaacaaagggagtactaattgtgcagtcaatgaacgacctagacagcggccttgcaatactatgcaattcaacagcaacacggcaagtggcaactccttgtggctagccttttgtataagacaacaggtgcacctaattggtttcttctaatcacaaaatctcaccatggacgccttcttctctgctgttcttggtgatcttctcagcaggtccatatccttcacgattgacagatactaccggcagcatcagggtgtggaggagaatctacggaagttacaccgcatgttgctgcggatccaagccatcgttgaggaggcacatgggaggcagatcacgaaccaagctatgctgcttcagcttaggatggtgagagccgtgatgtacagaggctactacttccttgataatttcaggtaccgaactgttcaagcgcatgctcaagatgaggtgggtgatcgctctcttggcctgtcccctttcagccaatttaagcggttttgtttctccactagaacaaggaaaattgcatccgaagttttggaccagaaggagttgcagaagatgcttggtcacctagaaaacattgtttcagacatgcaggagtttgttgcgtttgtgagttgctaccctcatatgagtcgtcaaccttattgcagctacttgttgctagaaaactgcatgtttggtcgccagatagaacaggagaggatcatcaacttcttgctagaaccaaatcatcctagtgcaaaaggcattaatgtgcttccgataattggaccgggcagggtaggaaagagcactcttgttgagcatgtctgtcatgatgaacgggtgcgtaaatacttctccatgattgttttatgtagcgcagatagtattgggggtggttttcttacagacaccggtctaatcaaacatcgaaatcctacctcaactggacaatcattggttatcattgaacttgctgatgatgatatggacgacagaacatgggcaagaatattgcacaacctaagaggagagcacataacacctgtgagtaagatcatattaacgagccgatcagacaagataagggcttttggaacaacagaagcacttcatttagattttcttccaaaagaagcattttggtatttcttcaagacgattgcttttgggagcaggaatcccgaagaagagccaaagctagcatccatttgtatggagatcgcgaccttggtgaagggatctttcatggcaacacacgtcattggtggcatactcaggtctaatcttagtgctcaattctggtgcaggtttctcaaatgcttcaggcattacacagacatgcatatctccgtgctaggagaacacccaagcgacgcgtatacaaaaacaagtggacttacttacatttggacatctagaaatatgagtgttgtcgcagcgacatatagcctccatcaagcaagttctgctcagctggctgatctatccccaattctatcaaatgatgttcttaccggagacgttgagcctccggagaaatttgatgccctggagtggcgatctagcatacctccttactacaactatatttcgcattacgagatacttgcacaaccaccggatatgctgcctaaaaggaagcggtcccggtcgctctcagaaggtttggtttaatctagaatcatatgaggtttaagcaacagacggagttggcaactttgttgattcacttagccagttgttttagcaattagcatggagtttgtccaatgtaatttccctttctgacaatgtaaactaaactaaacttctatgacttttgaagttgatgtgtagtactccctccatctcaccatctcaaaatacaggactgaagcacaaccccttttttttcatgtcttatattggccactactaaaatggtatttttgcatgcatccaaaagctatttttgcatgcggttgaaccgtccgtctgccaggagatgattgcaatcgctattttttcatgcgaatggcgcacccacatggaaaaattgttttttggcaagcgggtgcttgtcgtcgtcgtagtctgccactgctcgtcgtctccgtcgtcgagtcccgccagctcatcgttgttgtcgtcgtcactcctccttgcgcctctaccactatccctccgcaccccgatggattcactggatctgcccatcatggcgccacattcaccactgatcccttgctgcccggtcccactcgagcccgccgtcggtcgctcctactcaaggtccccgttgccgctcgctccgcacgaggatgccaccagatatactcatcaattattttaagtagaaatacaacttaaaataactgaaatttggattaaaataaagaaaataaaaagaaccatattgaacccaacatataatacaagtagaaatacgatttaaagtatctgaaatttgaataacaaataaaaataagaagagtccatgtagaacataatatgaaattaattgaaattcggaataaaaatataataaaatcatcaattggattacagcaccaattccaagttaaaaattattaaaactcaaaatgaataaaataatatgtaacaagtgtccttgccaaatgtggagtatataattggaagaactatagtataactatttttttgtcggcaattttttttgggaatcaacacctaaaccctaactctaaacctttcgaattatgggccattgaatttgctccaagattcatgcaaatgggggcgtcggaaaaaatgcaatggggcagccaggaagaatagaacacgcaacctaagatttgcgtgcgtgcgccttcacaagtgaaccagcacctcgttttgatttcttctgtacaagttatataccggttacaatataactacgtacaagttatatatcggttacaatataactataatcaagttataatgtaattatactagtttataattatagttacatttgaaagtttttctattgaaagttatattggtacttcaatttatataagaaactaggactaaatataaagattttgtcaaatgctcaacaagttagcggcgcataaatcatgttagtcaaccaagtttgttcagtggtcgttggtggtgaaaaagaaatttagtgtttttttgcctttggttatatattgagccttgctggcatttgtatgtgtaatgaaatgtggtcaagaaaaacatgaaacgcaagtggcttttctggcagtcaaggaaacatggagggactggtcaaattgtagctaaaataaatcttacctggtaagatggtaatattatcaaaattttggcacgatttcttatatatttaccaaatttggcaacaaactaaacatagatatttttttggcaactttactaaaaaatagcatggttgaaaatggcatcaaagtgaacaggcccgaaacatactcctccctctcatttcaagtgtaattgtaggtttccgtatctaaggtttgaccatccgtcttatttaaaaaatttatgagaaaataaaaaaagtcacgtataaagtactatttatattttatcatctaataacaataaaaatactaatcataaaaaaattcagataagacagacggtcaaatatagtacacggaaacacacacctgcacttaaaaagggatagaagtaaatggtaggaagtagatgattatttatcacctaaactagataactgcttacttccgaagtgagctggtatttgctactccctccgtttcatattatatatcatttaatttttttattagtcaaacttattaaagtttaattaagtttgtaacaaaatataataatatttttaatacaaagtaaatattatattaagttatattcaatatcaaatttaatgggactaatttgttgtcgtagatcttcatgttttttctataagtttgatcaaagttaaagttaaagaaatttaacttaaaaaaaagtcaaacgaacggagggggcagtaattctaaggtctgacacatgctatgaaaatcagtggccagtctaacaggacaaattgtgcagtcacaatggaaagtctgaaaccgacattgcaggcgccgtcaatgatgaatgaacaactgtattgcatatactccagagttctagaccgcgggtcttgcaatccacttcttcttcttttttttctttttcttctttccgactcttccatcaaagactcttgcaaatgcagttcaacatcgacaagatagcatgtggctagcttccctgcctcactgcacaccttcttccaatcacaacaccccaccatggacaccttcttttctgctgttcttggtgatcttctcagcaggtctgtatccttcctgatcaacagataccaccagcaacagaaggatgccgaggagaatcaacagcggttacaccgtgtgcttctgcggatcgaagccacagtcgaggaggccgaccggaggtgcatcacaaaccaggcgatgctgctgcagctcaggatgctgagagacgtgatgtacagaggctattacttcctcgatagcttcaggtaccgaaacatccaagcacatgctcaagatgaggttggtgatcactctcttggcctgtcccatttctgtccattaaagcgtttctgcatctccactagaacatggaaaattctgtcacaagttctggagaagaaagagctgcaagagatgcttgatcacctgcaaggcatagtttcagacatgcaggagtttgttgtgcttatgagcagctaccctcgtatgagtcgccagccttatggcagctacttgttgctggaaaactgcatgtttggccgccaaatagagaaggagaggatcatcaacttcttgctagaaccacatcgtcctgccggttcaaaaggcattgatgtgctcccaataattgggccttgcagagttgggaagaccactcttgttgagcatgtctgccatgatgaaatggttcgtaaatgcttctctaaaatacttatgtatggcgcagatagtattgagtgtggagaattggtgcctcttactgaaatcggtgtaatcaaacatcgaaatcctgcatcaactggacaatcacttcttatcattgaacttgtcaatgatatggataatgaaacatggacaagaatattgcacagactgagaggagaccactcaacacctgtgggtaagatcatcataacaagtcgatcaaacaaggtagcaacctttggaacaacggaagcacttcaactagattttctcccagaagaagagttttggtatttcttcaagacgatggtatttgggagcgcaaatcctgaagaagagccggagctagcagccatatgtatggagatcgctgccttgatgaatagatcattcatgggaacatacatcattggtgacatactcaggtctaatctcaatcctcaattttggtacaagtttctcgaatgctttaaatattatacagacattcatatccgtgagctaggcgaacatccaactgaaacatataaaaggataagtggacacacttgcgtttggacgcctgaaaatcggtgtgttactgaagcgacatatgcattgacatacactctttatcaagcaagttctgaagatctgaatgatcagcccatggtgctagcaagcgatgttcttgttggaaatgttcagcttcaagggaaagttgatgtcctgcaatggcgatcgaagataccaccttactactgctacatggcacatttcgaggtacttgcacggccgctgcatatgccgcctaaaaggaagcgatcccggtcactgtctggacagttagtttgatctgaaatcgttggggtcactagagtctagagttggttgatccatatggcacaggaaacagtatggatgccgtaacaacaactgatagtttagttcaacagagagtttgctcacatgtttcccccgttttgacattgtaaactaaactattagctatgtacatctctttgcatggatgtaatgccatcttcccttatctaatcttcgttccagatggttttttcagtcgcattcaagtaatgaaccttaatttaaccggtttcggcctgtgctttataaatagctttggcagaaaagacaaaacagtccctccaacgtataaatagttgtgacttcacgttttcatcgtctttagtaaaatcaagtccaccacatagaaactcatatcatgctctaccatattttttttgcagataatctcaattttagtttactaatacattctaataaaggacaatcgtacttgttgaacttatcccttgcaacttagataccatgaggtggtccttgaaaagtttttgaataagtagagggaattcgtaatcctctggacgtagagcactagagcgcgtggggctttgaaaccaaatacaatctccgttttttaatagatgacgccgttgacttcctgtcacacgtttgaccattcatcttattcaaaaaatttacgtaattataatttatttcgttgtgagttgttttatcactcaaagtattttaagcgtgatttatatcttatacatttgcataagtttttttaataagacgaatgatcaaacatatatttaaaagtcagcggcgtcatctattaaaaaatgaagggagtatattacccaaatggaagagtccctcttcaaaataggtctaatagataagctatataagcgatatattgattttcctttccaacaatgggcttgatgtgatagcataagcctttgtagcaatcaagactagtaagtccattaatccaaacaattgtccatgtaccagtagaagatttggtagctattgtagcctctcctttgggcggaaccccccgtctgaggagttactcggaatgctgtcgatcggtgtcattggtttcgtactctcgtctcgggtgtagtaagtcaatttataattcttgacaccagcttgaaatttaacattttctttagtttctgtttccggtgacatacatccatcccacagttcatgaatttatgctatagttacatttgaaagtttttctaaaaaaaaatattgaaagttgtgtatagcccggttccccaccttttggaactatcttgatacttgcatgggtttgttttgaagtgttttcagaacatgtgcagcttctttatcttattttgagaaaaaaaaaaggaaatttgaggccttgagggggaagcactagcagaaggacggtatgactattcagcccgcttaagattaaaagcccaaccttaaaactggcccatatatcttgggctcttcccttcctgcctcccgttgcaaggctcggttgggttctctggccgcgtcacaggctcatggtgacggcgtcaggtccggcgatggccgccggggagatcttccgccggcgcgcctccaccatcctctggcaggtagagtttcctgccgcacaaactcgccggccgcgccgctcgagctcgtccgcgtatccacgccaccgccgcccgtgctgcccctggtttgctgcgccggattaatcctcgctgcctgacttccacgacggcgcgattggtagggtaaatatcttgggtagatagatgcatattgggtgctggatttcttgtgatttcaatgctttcatcgactaggccgatacaatagctagggttggctttgggctttggcgcggccctaaatgcgttgctctctaactgtactgagtgctatagcacgcatctatgaacctttcccattcttgatgccatgaattgttctcttcgacaaagcctcattaaaattatgtatgatcatggcaaatccgccttgtgctcttccaaatgttcctattcaacagctgaaatcaacaagcactcagttagtcctcagtgacccacgtgcctttgaagaattgttgcatttagatagcagcctgccatccaactatttccatggatcaacatcatagcatttgactaacctgcctaattgtcacaggtcccactagttcttgcaatagggcctgaaataccacttttacaattcccttcacaacagttaaccatagtgacattttttttgcctgcacttcttggtgatcttataagcagatccatatcctacatattcctcattgatatatactactggaatcaagcagcggtgtggagggagaatctgacatggttacattgcggcactgctgtcaatggaagctttcaagctgtgctggttccagatgttggctaattctaaggtttgacacgtcctctgcaaatcgtggcctcttacaagccttttcattggccacctatggctaattgtgcagaaatcaactgagccatcaataaatgacccactgtgcaaagcgttctgtgcattgcaccttgacagcggccttcccatgcaattcagcagcaacatgacaactctttactccttctcgctagctttgtgtttatagagttgcattttactgttgagttgccttcctgattgatttaccttttctaagcacaagatatatcactatggataccttcttttctgcagttcttggtgatcttctcggcaggtccatatccttcatagttgacagttactaccagcagcatcagggtgtggaggagaatctacagaagttacaccatgtgctgctgcggatccaagccatcgttgaggaggcgtcaagtaggcacatcacaaatcaagctatgctgctgcaacttacgatgctgagcaatatgatgtacagaggctactacttccttgataatttcaggtaccgaatcgttcgaccgcatgctcaagatgagctgggtgatcgctctcttggcatgtcccctttcagtccatttaagcggttgtgcttctccactagaacacggaaaattgtatctgaagttttggagagaaaagagctgcagaagatgcttggtcacctggaaaccattgtttctgacatgcaggagtttgttgtgtttctaagcagctaccctcgtatgggtcgccagccttactgcagctacttgttgctagaaaattgcatgtttggccgccaagcagaacaagagagggtaatcaacttcttgctaaaaccatgccgccctggtgcagaaggctgtgatgtgcttccgataattggcccaggcagggttgggaagagcactcttgtagagcatgtctgtcgcgatgaaagggtacgtaaatacttctctacaattgttttctacagcccagatggtattgggggtgaataccatgcgcttcttacagacaccgttgtaatcaaacatcaaaatccttcatcgactgaacaatcattgcttgtcattgaactttccaatgatatggatgatgaaacatggagaaggatactgcacagattgagaaaccacataacacctgtgagtaagatcataataacaagtcgatcaaagaacatagcaacttttggaacaacaggagcacttcaactagattttctcccaaaagaagcattttggtacttcttcaagacaattgcattcgggagctcaaatcctgaagaggagccgaaactagcagccgtatgtatggagatcgccgtcctgatgaatggatcgttcattggagcacacgtcattggtggaatactcaggtcaaatcttagtgctcaattctggtacacctttcttgaatactatagatatttcacaggctggtatatccacctccaaggtgaacatcagagcgacatgtttaagaaaagaagtggacttacttacatttggtcgtataaaaattggtctgctgtgacggcgacattccatctttatcaaataagttctgcgaatctgaatgatctgcccgtgatacgaacaagcgaacttcttactagagatattaagcttgaagggaaatttgatgccctagaatggcgatctagtgtacctccttactacagctacatggtgcatcacgaggtacttgcacgaccgccaattatttttcctaagaggaagcgatcccggccgatctaacaagggttagtttgatctagaactagttttgagacatactccggagtatctccatcagtatggcacaggaaacaaccatgatgttataacagcaatagagtaatagactgagtttagcaattttgttaattcacttcttagcaagttattctagcaattagcatggagtttcaactatgtattttccctttttgactgatattattagctgtgtccatctatggt

SEQ ID NO: 14927 - DNA, 662 bp, Oryza sativa
gcggcgctggcgccggcgccggcgccggcgtgctgcacatagttggcgtcgcgagggtcgggaagagcaccctcgtcgaacacgtctgccacgacgagagggtccgcggccgattctcctccatcgtgtgcttgagccgagaagaccttgaggacatgggagaccatcgtgctctgaccgtcaagcacggcagccatgcctcccacgggagctcgctcgtcgtcgtcgacctagccgaggacgaggagcccgtgggcgacggggcatggaggcggctgcggtcgtcggcgatgtgcagggcgcgggggagcaggatcatcgtgacgagcaggtcgccggagacggtccgtggcatcccggcggcgcgcgccatcgagctcaagttcctccgcgacgacgtctactggtacttcttcaaggtgctcgcgttcggcagcgcgaacccggacgaccacccgaggctggcgtccatcgccatggacatctccgcggagcagaagggcggcttcataggcgccaccatcgccagcagcctgatgagggccaacccggacgcgcactactggaccctcatcctcaagaacatgagggagtacacgcggaagcaccgcgccatgttcggcaagcacccgcacgacctgctgcggaacaaccacccggtg

SEQ ID NO: 14928 - DNA, 3119 bp, Oryza sativa
cggttggcaggacttctacaaagtaaaaaaaaaactccaatgataatcatatttgatttttaaaatctcaatgacaataaggagaggcagcgggcgggtcgtacaggagtatagttgcagagccgccaacggttggtgagacttctagaaaataaaaaatgaattacaacgatagttatgttcgatttttataatcccaatgacaataaagagtaggcggcggacgagtcgtagagaagtacagtggcattgtttgacgtgacttctaaaaattataaaaaaatgaaacccaacaagacaataaattctaaaaactacaaggtccaatttttaaaggttcggaacttctaaaaattaaagaaaaaaacccaatgatgatcatgtttgattttaaaatctcaatgataataaagaaaggagacagtgagcgagctataaaggagtacaatggcaaagcctctgatagtttggcgggacttatagaaagtaaaaaatgaactcgaacaataattatgttcgatttgtaaaatcccaatgacaataaagagaaaagacagtggacgagccgtagaggagtataatgacagcgtttgacaggacttccagaaattataaaaacgtaacccaacgaaataataaactcaaaaaactataatatccaatttttaaaggtttcaaggagaatgaatagaaatagtggtaaaccgagcaagcaaataaagaagaatatgacagaagtaaggggtagcagctggtgtgacttttaacaactacataattagaaatacggggatgatacggggatagctatttaataaattttaagtaaaatcatactaaaaagtatatgattttgtttgggtgctaaccgcaattgcgcgggccacccagctagttatattattaaaatagctttgaaaggaggcaccacgttcgctgtgagggctagaaattcccacattaatcggagaaaaaagaaaaaaagaaaaggagagttcaagtaggaatacaatctaaaaatagctgaaattcataaagaagtttccatataagaacccaatacgagattaatcaaaattcgaaataaaaataaaataaaatccaaaattagaaaaagagagagagagagagagttcaagtagaaatacaatttaagaatagctaaaattcggaattaaaaacaaacaatattgaaagaagtttccatataaaaatccaatacgatattaatcaaaattcgaaataaaaataaaataaaatccaaaattacaaaagaaaatgatagtccaagtaggaatacagtgtaaaaatagctaaaattcagaattaaaaataagaaatattgagagaagagtccatataagatcccaataagagattaattaaaattggaaataaaaataaaaatctgaaattaaaaaaaataaagaagagttcaagtagaaatacaatttaaaattagctaaaatataattaaaaataagcaatattgaaagaagaatccatataagaacccaatacgagattaattaaaattcagaataaaaaataaaataatatccaaatttagaaaaattaaaagagagttcaagtatgaatacaattttgaaagaactgaaattcaaaaataaaaaataaaaatattaaaagaacacaatatgatattaattaaaatttaaaaaataaattatgaaattagaaaaataaaaataaaatttcaattaggaatacaatttataaataactaaaatttatgataaaaataaagactattgaaagaaaagaccatctaaaacacatgacgagataaattaagtaacagacctataaaggagtagagtggtggcggttgatacgacatataaaaactgttaataaaacaccaaataaaatcctaatgacgattaaaaggagagacgacaggcaggccgtgaagcaaacgagcaaggcgcttcccgggacttctaaaaagtaaaaaaaaaacccattgataatcatattcgatttttgaaatctcaatgacaataaaaaggagaagcggcgggcggggtgtataggagagccgccaatggttggcgggacttctagaaaataaaaaatgaattccaacaatagttatgttcgatttttagaatcccaattacaataaagagtaggcggcggatgggccgtagaggagtatagtgacatcgtttaacgggacttctaaaaattataaaataataaaaccaacaagacaataaactctaaaaactacaaggtctaatttttaaatcacaatgacaataaagagtaggcggcggactggctgtagaggggcatagtggcatcgtttgatgagacttctaaaaattataaaaaatgaaactacaagtccaatttttaaaggttcgaaacttctaaaaactaaaaaaataatgataattatgttcgattttaaaatctcaatgacaataaagaagagaggcagcgggtgagccgtagaggagtacaatggcaaagccaatgacggtttggcgggacttctagaaattaaaaatgaacacaaacgataattatgttcaactttttaaatctcaatgacaataaagcgaagagacagtggacgggccgtagaggagtataatggcaacgtttgacggaacatctagaaattataaaaataaaacccaatgtgacaataaactctaaaaattataaaatccaatttttaaaggttccaagaagaatgaaaagaaatagtggtagatcgagtaagcaaataaagaaggagatggcataaggggtaacaactggtgtgacttttaaaaactatataattagaaacacgaggatgataaggtttggtctttaaaagtcttaagacaatcagataactatttaataaattttaagtaaaatcatataaaaaaatatatgattttgtataggtgctagccgcgcaattgcgcgggccactcaactagttatagatgattacagaactgagatgttgcaagaggattatgatactccatcctgatccatcaaggcaacagcttctcagggtgatacacaatacacaatagtagtgtcaacaaatgcttgttcagcacaaacaaaaaaaggagaaagaaatg

SEQ ID NO: 14929 - DNA, 3320 bp, Oryza sativa
tagtttctaacataacaactgttgctagagtaccagaacgtatccattcacgcgcatgaacagtgtgcacaggtagtgtatcatgcatgtggcagatggcctacttaacattatcaactggtcttaataattataatccatggacgacctgataccaagtcaaactcccctatgccaaaaaccgcttcctcttgaatattatatgctgctgtgcttgtgcttcacaactcattacgaactcatggtagggaggtatgcgtgatctccatactaggacctcaaattttccatgagctttagaagttccagtatggacttcatgtagcattaccttaggatcatcatccctgagacatgttttatagccattgactagaatgaattttggatccctaaaattttcaacaagatatataccgtgatttttttgaacaagagtgtatggatgttcaccaaatagaatgacatgtttttcaacgatgtttctgtgacatctaaggaacaaatgccaaaactgggtgcaaaaattagctctgaataatgaagcaacgaaattagcagctacaaaacatctgtactctgctgccatttccatagctgctgattctagaaatgggtgctccacagggtttgtgcttccaaaggcaagcaccttgaagaagtaccaatgggcctcctgaggcaacaaacttagctcaagaggttgagttgttccaacattcctgaacctttcagatctacttgtaataataattttactcccatgtggtatgcagcttcttgaagagtacaatcttctccagttttcctcatctacatcgccatcatcaataaattcgatgatgataagtgaccgttcatgtgcaacacaactttgatgcttgactatgccactatctctgagatcagcaaagcttttgcttccgatatcacttccactacagaaaacaatagaagagaaaaaactgcgtaccctctcatcatagcaaatatgctcaacaagagtacttttcccaactcttgctggacctattattggaagaactcccaaactttctgccccaagagattctcgcaacaagaaattggtaatcctctctatttctgcttggcgaccaaacatgcatttttccaaaattaaatgttggctataaggttggcggtgtatgtgaggatatcccttcaagaaaacaagaaactctttcatatcgtcagtgatactcagtaggctacaaagcatctctcccacctccttcctatcctcaccttgaaaagccatggtgaacgtcctagtggagaaacacaaccgcttggtaggtctgagtttgggaaaggaaaatgagtgatcaccaacctcatcattgaccatctcatgctgaagcactccattcttgatagtatcaaccaagtagtatcccttgtacatgccttctcttagcatctgaagctgctggagcatcgctcgatttgtgatgtgccgcccctcgacctccaggacagttgcctcgatccgcagcagcaagtggcgcaggcattgcagatccacccccatgcccatcttctgctggtagtatttgtcaactaagaaggatatggatctactcacaagatcaccaagaactgcagacaggagcacctccattctgaagctcccacagtggaagagggacggtttcttgctgggggtactaaattaattcagggatcaggacacagctgatctctggctggatgagtttaaacactcgcgtgcaacatttcaacggacaatgtggttttttttttttgaactaatcaatgtggtttattcaaccccgtgtgtttgactatagaaattttgggtgcagcctaaagagaattctaaaccatcgtgaccgtggataggctatttaatttacgatacgagttgtcaactaagatgtgcatagtctacaattaccgcaagcttacgacatcgttcgaccacatttgcgttccccgacctcattgtgtccatcttgacttgttaaggaaactggaggattcgcaaaactcaaatcgaatcaggaggagttcgttgcttacccgcaggctagagagtacggacgcggccgcgcggcgccgcggagcagtgtgccgcacccaaggcccgcgcgcacgccaccgcggtgggagcggcggccgtacggcggggtgtgatgtccagggcgccgcacgagaagcccacgcgagaggtccgcgtccgcccgcccgcccgcggcagcatccgcgaccgccacgcggccgagcatcgccgccgcgtcggctccgcgcggaagcctttggtcgcgaagtggggatacggggaagagaaagacctgagaaagcgagcaaacgttgcacgggacgggggttattagcgaaagaaaaccgttcgttggtgggggattgggagggaatgcactgccttttttcacgcacacatttcccaaactattaaatggtatatttgttaaaaaaatctataaaaaagttgatctaaaaaacatattaatttatttttaaaatttaaaatagttaatactcaattaattatgtgctaatagctcatctatctcgttttgtgtatcttctcaatcttctttttttctctcctctcaaacacttaggctgcgttcggcagctgaagaaagtgagtgagtttgtttcgattttcgcgcgcacgcttcttaaactactaaacggtgtattttttgtaaaaattttctataggaaagttgctttgaaaattcatattaatctatttttcaaatttaaaatagttaatactcaattaatcatacgctaatggctcacctcgttacgtatcttcccaattttctcaatttcctcctcctcaaactcaccttagggtagatgagttactgaacttaattagatcatgattacagaactagatatgctccaagaggatgatgatcctgatccatcaaggtagcagctttgtcagggagaaacacgaatacacaataactagtgatactgaactgctgtagtttaactattgtagctcagatctatctattatattagtaaaacagctttgaaaggagacaccacgttcgctgtgggggctagaaattcccacattaatcggagaaaaggaaaagaagagtccaggtagaaatacaattttaaaatagctgaaattcggaattaaaaataaggaatattgaaagatgggtctatataagaacccaatacgagattaatcaaattcggaataaaaccaaaataaaatccgaaattagaaaagaaaaggagagtccaagtaggaatacaatttaaaaataactgaaatt

SEQ ID NO: 14930 - DNA, 12180 bp, Oryza sativa
ttttttcgtcaataagttattggtttttgttcacactggagcctcactaagtaaatcaattactcgtgaacatattgttagattaattcgttattgttgagtaataattttactatctagttaaatatagttaaatagactcaagtatttttcacggacacttattagcacatggtaaatgttttacaataagcctacacgatatgaatacaatgagaaatatgagaatagtaacttttttacaataagcctacacggcatgaaacaatcatacggtgtgagtaaacattttactctatgacaatataacatagatctagagaccggccggtggttggtggcggagatgactggcgctggctggacattgacggcgtcgcggcatggaggtggtcgttgctgctcctccatggcactggctagcaaccggatctgaaaatgtacttggttgtattcacatgagcataatgtactctgctatacctgaaaatgagaaagcaaaaattaaatccggactatagtgttcttgggctcgccttactcccagcctacaattaaacattgtgctactcagcggaatgagaaaacaaataccaaatccagaaataaatctatttggtcaagatgatcggaataaatcattcagctgcaaggttcattttctagattttctagttcaactgagccgaatgaatcattccgctgcactatattacagatgggcaaatggcacagttctagaagggttaaaactagagggtgagcatttaagtaaaaccaaatagatccgtctaaaacaatgataaattctcagatcatgaatcatgacacatcagtaaataacatttgaaaaatagatttttttcctccgtgatgcaaaactgggataaaaaatggctcattttttccttcgcataaataaatgggaatcaaggagttttaatccttcactgataaaaaacgttaccatcatcacgttaataggttgtagattattttattcaaacacctatgctctgttgaaccacaaaatttcagagagcagttcagagaaaatcaattgatatgctctgttgaaccacaaaacttcatagaactgctaccgaattgagcttctagagttttcatttatcaaacatatcagagaacctgatgatgatgctattggcagttttccaaatattgcacgcacaaatatatcactaaacaaatgaaattcacatgggaacacttttctgaatatattgcacaaacaactcatgactgaacaaatgaaaattaagatgagagcatggttcttcatgcgttgcaaaaaaaacctctggtatcagggctattcactcatgatgcttgatccagcaaaagcagcaatcatcacaacaatacatagaaccaaattcactaagaatacatgatcatttatgaaaatatgtccaattacagctatttctgaaaatgcaagctctaacagatagcaccggtggtttatacaagttttgagttgtataaatttgagattactgtcgaaattcaaacatacacagatcatatcagccatgacatcttaatttatgaataacgctagcacaagtggcttggataatttctgaatcatataaattttgaacagaacacatgaacattgagaatttagcaggcttattacaaactacaaagatataaaggggcaaatttttcatttaatacctttatcgctattgatttgtaatacttggttactgctaagcaagggaataatattaagatgctcttagaacagctctgttcaactagatcgagaccacaaaaagccaaaagcacaatagtaacaagctcagctcagaacttccatcgatccaataaaaaaaaggaactaaccagcgccgctgagggtgcagcagcaccaaatcccaccgttctccagtcaggcctggcaggactagtcgctggcgcctacagcaatgcgatcgacgagcactgtctgtccacgggcagtggcggacctgcaagcagcaacctacacctctgcctgggtctctgctatgcttcgacagcccaatggtcgtcgatccaccccagatcaggcgagtcccgagcctacattgactgcatccagcgggggacgccggcggcggctagagagggaggtcggagtcatgggagaaggcagcaccagtgagcacgaagccttccccggatcagccgttgcccagtcgtagccgccggatctggcaccactcaactcgcatgccacgggagttgggagcaggtcccggtcgggtccggcacgagcagtttgcgcgccccgcccatcacctccaagacgctcgcgccctacccagcggcgccgatggcctcggcgagcgcgggcggaatggcggcgaatgcgcccgactggaggagcacgaagcctcttccccctcgcctcccccatcctccaccgccgcaagccgtcgccgtcgccggccacaccattgccgactcctccgctgggctctcctcccgccgccaccgggccgccgccgccggatccgggaggaggacggccgcccgccgctgtagccgtcgccgtcgcaggccgtcgtcgtcgccggccgcgcccgccgctgccgcaaggcgtcgccatcgctggctaccggaggaagcccgagccaatagccgcacgccgcccacgcgcctcgtcatcaccggattcaccgcccgaacctcctcgtctccgagccgtggctgggggggggggggggggtgctggtctggggtaaggggtagaatgtgaaggggagcattttagttctactttcaatattccttattcttttaatccgaaattttaattatgtctaaattacattctatatagactcttatacttttattttaatattccttattttttaaaatttttaattttagatatttataaattatatttctatatggactctaacctctacttttgttcttttttttaatttcgaatttcaattatttataattgtatacgtatatgggctctagccttctatttcaatattcaattttttttaaaaaaattcgaatttcagttatttttaaattatattcctatttaaactctatttttcctttttcttcgattaatatgagaatttttaagccgtgagagcgaacatagaggctcctttttctatcactttaataatatcatcgaatagtccgatacaatagctggattttttgtgatttcagtgctatcatcgaatgccttgttctctaactgtacctgagtgctagcacgcatatatgaaactgtcccattcttgatgctatgaattgttctcttcgacaaagcctcattaaaattatgtatgatcatggcaaatcgaccttgtgttctttttttttttttgaattttcaacgccggggggggggagcttccccgcctgaatttacagggatgaaagggcagaagcgaagcaacgcttccactgcgaaactatgggacgtacattacatttcaatcgttctgaccaaagggatgcatcttcaacacatcggcgaaggatccgctggagggagggggattcttttctgaagaccacattgtgtcggtgattccaaagacaccaaaagcaaaggaggtagaagcacttgaattctaccgtcgagattatcggaggcggcttgagctgaaataggagttgtgctaaggggatattcgggtgaactcggatcacagaccagaaagctaaagaaagggacagtgtaaaaggaggtgatcttcgtcttcatcttggcagaggcacagctcgcatgcagcagttgacaatattgttttcttgtagaggtttgcgcaagtgggcagcctgttttttttcatgagctaggcgaagaattgcactcttggcagagctgcattgttccagacgaaatcccagttggcacaattaggtagattggaagaggaaaggaattgatatagggagctggaggagaaggtctctgagtggccatttggggagtagatccgctgatccataccacttgagagctccagttgttggatgatatcctgcacttctgctaagtcttctcgggcggctgaagagagacgaggggtgagtcccagagggagccccgcttgcttcacttggcggactgagcagtgttgtctagttgagtgcgacaacagagccggaaaggattgggaaagaggggcgttgccatgccagacatcgagccagaaggatgatcttctcccgtttctaattattactctggtgattcgcctgtactcggggagcttgtctgcgatagatttccaatgagtgccgaggagtctgctgggttggagggcttcgtctcggaattgttcccaaatccaattaatccatgcagagttttccgtgtggagggtgtggattttttcgtgtgttcttcaaaatgttcctagtcaacagctgaaatcaacaagcacttagttagtcctaagtgacccacgtgcctttgaagaatcgttgcatttagatagcagcctgccatccaactattttcatggatcaacatcatagtagtatttgacgagtgatggtcctctgcagtactgcacatatagtgctgcccactgatatgtgagtcccacagaccctcgggtccacatgtcagtctgcagtacttgcatgtgcatgtgcacacgcagaggatctgaattgatatttgactaacctgcctgattgtcacaggtcccactagctcttgcaatacggcctgaaataccacttttacaactcccttcacaacagttcaccatagtgactttgtttttttccccctgcacttcttggtgatcttatcagcagatccatatcctacatattcctcattgatatgtactactggaatcaagcagcgttgtggaaggagaatttgacatggttacattgcggcactgctgtcaatggaagctttcaagctgtgctggttccagatgttggctaattctaaggtttgacgcatgctcttaaaatcgttgcctcttacaagccttttcactggccacctatggctaattgtgcagaaatcaactgagccatcaataaatgacccactgtgcaaagcgttccgtgcattgcacctagacagcggccttacgatgcaattcagctacatgacaactctttactcctcgctagctttgtgttttcagagttggcattttgctgttgagttgcattcctgattgctttgccttttctaagcacaagatatatcactatggataccttcttttctgcagttcttggtgatcttctcagcaggtccatatccttcatggttgacagttactaccagaagcatcagggtgttgaggagaatctacaatgcttacatcgcttgctgctccggatccaagccatcgttgaggaggctgacagtaggcacatcacaaatcaagctatgctgctgcaacttagaatgctgagcaatatgatgtacaggggctactacttccttgataatttcaggtgccgaatcgttcaagcgcatgctcaagatgaggtgcgtgatcactctcttgccctgtcctctttcaatccattaaagcagttttgcttctccactacaacaaggaaaatggtatctgaagtttcggagagaaaagagctgcataagatgcttggtcacctggaaagcattgtttcagacatgcaggagtttgttgtgtttgtgagcagctaccctcgtatgagtcgacaaccttattgcagctacttgttgctagagaactgcatgtttggtcgccaagaagaacaggaaagggtcatcaacttcctgctagcacgacatcctcccggcggtgaagaagttattgatgtgcttccgataattggcccaggcagggttgggaagagcactcttgttgagcatgtctgccatgatgaaagggtgcgtaaatacttctctacaattgttttctatggccttggtagcattgagaataatggagacatggcgtttcttccagataccggcgcagtcaaatatcgaaatcctgtctcaggcaaacagtcattagctatcattgaacttgttgatgagatggatgatgaaacatggaagaagatattgcacagccttagaggagaccacatagcacctgtgagtaagatcataataatgagccgatcaaacaagatagaattgtttggaacaacaaaggcactccaattagattttctcccaaaagaagttttttggtatttcttcaagacgattgcatttgggagcacaagtcctgtagaggagcctaagctagcatccatatgtatggacatcgcggctttggtgaatagatcattcattggattaaacgtccatgggagcatactaagatctaatatatgtgctcaattctggtacagttatctcaaacgtctgaaatattacacagacaagcatgtccgtctgtttggtgaacacccaagagacacaaataaaaataacggtggacttacttacgtttggatgcataaaaacaaacatggctgcagtggcctagcgacatacaaactttatcaagcaagttctataagtcaaaataatctaccaacgatacgatcaattgatatggtttctcgaaatgttaagcctcgagcgaaatatgaagtcttggaatggcaatccagcatacctccatactatagctacatcgcgcaatacgagatacttgcacaaccgaaactcatgctacctcctaaaaggaagcgatccggggcgctctcagaagagttagtttgatctggaatggaattggtgttgtcaaactgtattgtaggtccatccatatggcaaagcaaacaatttggatgctataacatcaacagtttagcaaatatgttagtccattcttatccagttattttaacttgttgtttgccccatgttttccccccttttgatgatgtaaacttacaacagttatgtacatccctctgcaggaatgctgtgtcatcttccgttatccgatcttttaatcatatggttttgttttcttttctgaaggttggatgtacctttttcgctttatacatttctaaaaatttataaaagttgaatctgcatatctctatattaccccctctgtctgaataacattgtcaactattgacatctcactcactgcaaattatatttgaacaattagattttgatgaatggaacttgcatggttatatttgaacaggagcaacaagaatgcctcctgtttggtgagcatttgagctcaggggagggcctcaggctgagcccacagcactgggctcctggagcgcaccatggttgtgcctgagcttagccgtctcacatgcatctcgaacaaacacaaagcagtgataacaaacagttaaacatgcagggaatagcaatcttcaacaaaatggtaaaagctagcctacaaatttagaggctaattctgagtacaagcaacttcggtatacaaagtagagaaacaggatgaaagaaaaccacatgcaacacaccgttacttgctctgattaactatgacatgattcaaatccgggcaaaatttaaaggtgacgccagtaaaaacaatgcttataatgctcttataccgttcacatccttgacttttcttttctttttttttttgtgaaagaaaacatccttgacttcccaccaaggattatattgcctttgtccttcagtaggcttcaagagctaattgatgctcacatgttagaacaaagttcaccagactgaacacatttttttcaaaaagagagagagagagagagagagagagttagagagagagttagaatcattcacaaaatctatagttcaccaacaaaacaattatacccaggcgctctcagaagggttagtttgatttgaaatcagggggtgtttagatccaggagtgtaaagttttggcgtgtcacatcggatattatatagggtgtcgcatagggtgtttggacactaataaaaaaataattacagaattcgtcagtaaactgtgagacgaatttattaagcctaattaatccattattagcaaatgtttattgtagcaccatgttgtcaaatcatggagcaattaggcttaaaagattcgtttcgcaaatttattatttaatacttcatgcaagtgttaaaacgttcgatgtgacagggtgtaaaattttggggtggaatgtgaacagggtctcagtgttggtattgtcaagatccagagtaggtccatcatatggcacaacaaaacaatacgataccgtaatggcaacagacaagggtcaagtaatttgattgattcacttcttacttcttatagctaatgttttagctattagcatggagtctcccacttttcgaatttgcgctactattgtacattgcggccgtgtttagatctaaagtttttcttcaaacttccaacttttccatcacatcaaaactttcctacacacaaacttttaacttttccgtcacatcgttccaattttaatcaaacttctaattttggcgggaactaaacacagcctgcatctaggacggagtacaagttggccgtgtttagttccaaagttttttttcaaacttccaacttttccatcacatccaaacttttctagatacataaacttccaacttttccatcacatcgttccaatttcaaccaaattttctgtcacatcgttccaatttctaccgaattttcaattttgtgttaactaaacacgaccgtaggtgtgatctaaaaatatatagcaagctagaaggtctctgttacggaccatgtttttatgttggcttttgtaacttgagcagagcatgcttcttcctgtttagttcaagatttcctgtttgggtcataaaccagcagttcgtacggctgtgtttagttcacaccaaaattgaaaatttagttgaaattaaaacgatgtgataaaaaagttgaaagtttgtgtaagaacattttgatttgatgaaaaggttataagtttgaagaattattttgaaactaaacacgccgtaccaccagacaccccagacacccaattctgactagctcgtgcaattgcggaagagaacggaccattctgcagtttgtccttgagctcaggctgtgtccatagctctgggctcctggagcgcaccatggttgtacgctgaggtctcacacagcgtaggacatcatcacacgcaaacacaagccagcggcaacagcagctaataaacatgcaaggaatgcagatttttaacaaaatggtaaaagctagcctacaaaattagaggctaattctgacaagcaactccggtatacaaagtagaccaacacacgatggaaaaaaggcacaggcaacaccattatttgttccgattaaccgtgacaatatgattcaactgcgggcaaaatttaaaggtgacaccagtaaaaacaatgctgcgatgctcttagaccgttcacgcacgcggcttcccaccaagggttgggaactgagcctgatcttcaatggatggtgcagatgtagaatatgggccacgttggtaaccaccaccatatccacgaccgccacgatctccacgcccccttccacgaccacggccgccatagtacctttctccttccgcaggcttcaggaactcattgatgctcacagactggaacaaaatttaacagattagaaacctgagtttttttttccaagataaattgagttgctatcaatcgcaaaatctaggaatatccaataattacaccataggcttgtttgaaaatttattagtagtcattttaccaaggcatccccatgttcttccaaacagatgtcttattatcatatccatctacccaacactcacaaccaaaacgaatgtgtacaagaacctcaaatttacaagattttggcatccagactgacctacgaagaatgtgtaaaggtctgccaattactacgtatgtaagttaaaataccttcttggcacgctcatcgcgctcagcattttccttcttcttatccttgtcagaaccctaagaaaatggtacatttaatcaaaaaaaaattctagaatcagacaactgtagggattgaaatagagcacactgagaaatataccagcttaatgaaaatttcatcatttcctttcttggtagaaagtggctgcatagactgcaggtccttatcgacctcaaccttcctctcttcagccttgaaagcaagaagagctttccgcttttcctcccttaatttctcaaactcctcaagagtcatctcctagatagtagaatataataacattgggaggtcagtgctgatcttattatacagcaaatgcattagcagaagcaataatcacaattaaattcactgggaaaaccagaaaagtgtaatagctgttcaaagctttcaatgtaactatatatagcttgttccatgggctgaacagatagagcatagcaaccaagttcaagaaataagcggtaacaataaggtagcaacattactagcaaagtaaattagttctagaaaaatgcacaggaaaaaatgacagtaagatgaaatcaccacatcataatacacaactaccaatctaccatacatctactgggtgtgttaatacaaaacattaccagcaaattggcttcaagcaagatgtatagacaaaacagtgtagtaagataaaacgtctatattctggaacccataataccgcacatcaaaagtgtacacaaacacttttatcccattgtattacacgcaaattgattaagaatgctgtggttgaaattaagtatcgcttgagttgaaaaatatacagtccatcagcccagcacaatcctgttaacatgatatgtgaacatgcatgtgcagatagtagttaacttgggttgataactcatgtgtaaacccaaccaccaactgaatttgcaactacttgtcacatccagggtgatggaattgcatcattttgacagtagaaaagtatcatatagtaagcaatatgatggcgacatgccaaataataccagcaacacagaacaacaatagactcgtaaaagtgacgtagcaaaaatagttccaaaatgtactattagacacacaagaataaattttttatttcagcaaacctctaaaatagcagtgcagtttcctcaatttagacagagtagagaacagatgaaaatcattaccttatcctcttccttctcttcttcctcatttgcagcaccctccttgttatccttctctccagttggagcatcatcctgctcaccctgtttctcagcaataggagcactctcctcaaccttcaaggcttcctcagtctccctacataccaagaataacactatgagttatctgtgccttcactatccaagacaagaggcatcataaacagataaaattcccctactgtgcaagagcctcatcagtagcagttccccagttcccacgccctgcaccatcacgcttcatctcataaccacggccagtaccactgtggcgctcataatttctccggggcggcctctcagaatcatccccatattcaccatttcggtagccaccacgcctacctccatggaatggagctcgagggcctctctccctgtcaccttctccaccagcagcaacagccccatctccatagcctccaccgtaaccaccctggtagccattggcattgtctccaccaaaatcacggttctggccatatccccgtccacctctgccacggccacgctcaccacggccaaatcctccacgtgatggtgcaccaccaccccgtgcctcccgcgctgaaacaaatacaattcaggcgctgaaatcagaaccagtggtgtttgcaggaataaattctaaaaactgatcgaagattcgaacagcaggttttaagaggggaataaattctactttccagcaatgcaaagctcacgcctttacagatcatagcaacaaagtttacagccgacatgttcctaactccaagattgagcaaaaagaactacaagaataatctcctagcaagtagcaacatacaatccaatcacaaccactaaaccatagtaaaaaaaaactcatcatacaaaactaagtatcattcagtataaacatctcacgacgaatatcagatctaaacactccgcggcaaccacaactcaccagcctgggtgg

SEQ ID NO: 14931 - DNA, 1261 bp, Oryza sativa
tcttataatgggttcatgccatatagcacatgattgcaggattggcaacaataacatatttgctaacaatactctatttgctggccatgttgttgttgaagtgggtgattatttaccatgataatcttcatccattttcttggtcaagaacccatctgtgtattgatggaattcattgtttcaggattgcacccatactgcaggggctgttgttgtccatcaattttgtcatattgggtcattttcatttctaggtggaggctctgtggtatgttgtgtcgataagctttcatctgaattctgtaaaattacaaagttcttatgccaacaaattacattgcatgtaatcttgatcgatcttctcaaggaatgataatgatgcaaataagacataagaagcaggcctcgtgaactgaagtcatagaattagcatgcacttcatctggtgatacttttctaggaataggtgcatgatcactactactaggtacttatgtttgttagcttattagttgcagccaacatttgaattttgaaacttaattttagagtcaatattgtttttttttatcatagcctactttgcagcattggcttttaaaccacgaataatacatatacagaagttccacccatattttttttgttgcatcgttcatatttctatggcttatgagctgtagctcaaccaatcagaggcctagacttgtatgcggtcaatcatgtcaagtgtcagtacttttgcatatattttctttccaacaacattcttatttgatgctgatggcgttgcagttctcacctaggctgtccatttgtactggcactgcaattctttagtctttttttggggggaatgaattcttgtctttgaactctgaatatgatgtccgagagtatgaaattcattcagttcaatttgaatcagatcgcacaagatgtgccaagatacatgatggttgcaggtgatagagcagagcttcgtgggctgaatcttgaaggtcttaagcgcaatggtttctcagaccaagaggtttccatatacttctgaaatatgtagcctttattcataacatgagtgcacttctttatgttcctctagtagttgtgcgagggtacttaaagttctgttgtgatgttcctttaccaatatggtaatgtttaaacatattgtcatcttatcacatttactggtaaagcataacgaggatgatctggaaccaacctcaattgactgcaccttcttagttaactatataac

SEQ ID NO: 14932 - DNA, 9286 bp, Oryza sativa
cccccccccccccacacacacacactttgatacatcagctgataatctgatctgttaatacaaggctcaagtatgccaacagtcatgaagaaccatgatgattttttttatgttaccaacagaatgatgtgttgttaagtactctatgcgccgtttaaggattccccatattttgggagattaggcttgaagtttaacttagtgactagatatctgcagccaattataattttttctgtcttatataattttatctcacttcataaatgaaggtacggatgttgaggaaagcttatcaacaagtatttatgccatctattaatagtcagagtagctttgatgagagacttgctgaactggtaaacacacattggccatctttctagttgttacttccactccatgtatttatttatttgggaatctgtgtaacaggaacgggaaattgagttatcagaaactcatgtatcctatatggtggaatctattcgcatgtcctttggccaaggacgtcgtggaatttgcaaatttagaagttggaaccgctgaaatttctataaactttcaagttttactggcaatttccgagacatcacttaggtaatgcattcaattatcaaactttttgtgttatatgaggtggatgataatatttttgggcaaatgcgatgtcataagaactaacttatacaaaatataatcatggaagagacaatccaactccagaacgaggaaatatcgttccagaaagattgaacacaaccaacaaattgaaaactgcacacaaatgtgcctgaagattgacctggactttcaatcgtgaaagttgaaaccaaccaaaccaacttcttctcttactgcttagggaagtgcatgagctcacataaacatgtggagatacacttcttttcccaaaaagttgcttcctggtgtttcataatttctagaataagttttggattgattctggttgggttgttttggtcctcatgtttattgtatgtttctggttgcaggaagcatcgctcattctttggactgggcatgtttcacatcgtgttcttgaaagaagtcgcccattctttgactgttaaagcaagagtttctcgttgatattctaatacctgaacacaggaatacatcatacagatgttgaatgccccttcactccagatttgaccaaatactgtcgcatctggatataggacacttggaagttgcgtgtcgtttctttttcttttttattttctcttgagatgagatgagtagtggtgttcgtggatgcacaaatgctccttagtcgttgtacatatatttggcgttgcctcggttttgttcatcctgtacagtgtatgtatgtcgcctcctggatctcaggctcgaatttgtattgtctgaacgatgttactgctagtgctgagatggtccaaaatttgcattggtgttcttcggacgacatacagtttgactattaatgttgaatctgcttgcttcagaaaccttcagatcatcagatgtgccggacccaaatatcagttctaaaccttccagggcctatggaccgtatatattgtcattccaggtcttgcgggttcaaatgaatgatagctctcgaccgtacacatttgtcatttgatataatcagcgacaacaataaagataatggccttgtttggatcctccgagctattaaatagtcctctggaatcttgctatttaggagtattaaacatagattaccgataaaactgattctataacccctaggcttttttgcgagacgaatctaatgatgtatattaatccatgattagcggctgattactgtagtatcactgtagcaaattatggattaatatacctcgttagattcgtctcgcaaaatagtctaggggttatggaatgggttttgggttatggaatgggttttgtcagtgatctagcggatccaaacaaggccaataacataaaactgccatcacatgacatgaaagttgctgtggtgtagtggttatcacgtcagtcttacacactgaaggtctccagttcgatcctgggcagcaacaatttttttgttactttttccaataatgttttttttgttgtcatagatcccccttaaccaatatatgaacgcataatctttcaatccaacatcatctattctatctttacctttttttttaaaaaaaaaacatatctcatgcttacttaccgtaaccttgtcttgaatctcgacttcataaattatgataaaaaaaatctcgacttcatcttagatattttttattattaaaatgtactattacagcaactccaaattaacaacacattacactagctccccaaccaaactcaattttcttattgacctaggcagtctcagtagccaactacaatgatattttgagcattgcaaggaagggggtattaaaaagaaaaatataaacatcatcaaacaaaatgtgcaaaaagatatgttgaatagtttcttgcccgttactagctctccttcatgaaggctataaattaacatatttgtttatgcttctatggctattgtaaattaatgatggaaaattgaaccaatataaagaaaaaagaagacaaattcataatcgaaaaaacttatattccctttcgatgaacattgaagttcgagtaccaacattttgtgtaatatgtatccggtacttttcagtatatcaagactagactaatgcaaattgtatgtacaatattttggttgagaagagagagctcaagaataagtaatagtagtagtagtaaacattctattttgtttattctagcatggactgtttttattggtaattaattaagaaagaggtgacaaatagatagtcattttcatattgctaggtcagcatcggtgtcacttatagctaggtcaatatatgatccgagttgcttaatcttggagccaagcagggtatatattcgcacaaattcacctgaccaacagtccagggactaacattgcttctttaagctgccatctagcggcggtgcaagcataagatatgtattttattcttttttaaaaaagaaaaagaaaacaacgttgaattgaaaattatttttatggctttcatatattggtaagggggtaaattttaacagaactcaagataactatgcaagttatcttcatgtcttttagctgacttcactttgatatcataggtgggtcagaatattgtgtgcaatggtgctatactattaaaattgataataatatgtcttttatttcactttagatggtgtagtatttatagaatactccctctgtcccaaaatatagcaaccttatataggataggacacatcctagtacaatgaatgtggagagaggtactccctccgtcacaaaaagaatcaacctaggagaggatgtgacccccctcctaggttgatgtatgtggacacccccatgtccacatacattgtcctaggaggggatgtgatccctcctaggttgattctttaagggacggagggagtatatccacattcgttgtactagaatacatctcatccattataaggttattatattttgggacggagggagtatcatggaaagaatgttttttttaagtcataatttagagaaagttgagggtttgttccaataacttatgttttttctgttaaaactcattggtggtgtgttttatggcaaataaggatatgtaaaccaacttttttgaaatttgtttatgtaattattagaaaatatttacataaacattagttcggtggaaaagtttttataaaggactgtattaattttttatgtaaattttttaaagaaacaccaattaaatagaagagaactgatcttaagccgtggtttattgttttcaatgaatataagaaactttttggctcatggctcaagcttttacgccatgatcagacatgcaagtatgcagccatccggtaccattttagttaactgttttcaccggaaaaggcatcgattttcttaaagtaagttttgggaggatataccagcaaataaatatgatcagctatttattagccgccctaaacgtatgcatgatatgatcttgagttttaaacaaacaggccgatttgtgccttttatctggagttttcggtccacacattctgacacttacggattgcctcagccctagaacatatgaattttgtcatactaatatatatagtaaccaccacactaattcattttttacataagaggaggacattacatctttgacctttgcatttatcatataggatgcacatcacattactatacgttttgacaaagcaaaattcagaacagacaaaacccatatgagatactgaataatgaaattaattaagctagtatacgctttagcacatctcataaagcggatgaagactcccttgacaattaatctattctaaggcttgttaagattgatggatcgattgatccaaaaccatctactacctcagtagtcataagaagttttaaaattagacatgggtattaaagagtaggtgaaattaaataaaaaatgattgtgattgattgagaagatgaagtatatggagaatttaaatgatgaaatgttgtgaatatttgagaaaaaatataggtgaagaaattattatattttacacaaattttaaaagctaaaattttttatgttttgggatagaagaagtaactcctaacatgatgttcgatttgtgctatggcttgttatcatccgttgtcaagtctcttccatagccaaacccacagctcttcttatagtcggtttagtgtgaagacagattaacttgccctgccaaaatgttgccattttggacagtaattttagcaatgtttaatttgctatcaatacttatctatatatactacatgtatgttgctaaaatattagcaatagtaaaccatataagcctttagcgatcgcattgtccacgaaaaattggcagatcgcctcatcatccggaatgagtatggactggatgtccctagagatgaaaacggagctggtaatacttataccatattcgtttttatatttgttgttagatacgaaaacgaataccaataggttggatatgaaaacaaatacgaaatatctcaaatacgaataaggatcaaatatgatcggacacggataaaaacatttttttctcagaatacaaaagccacctcagcttctaatagaaacaaatatcatcatatataattaacttgtttataaaaaatatagtatactttataaaatatttaaaagtttaaataatattaataatatggattggtgttaagagatgtgctactattaaaatctaaaaaggtatattgagggtcacagagttataaagaaatggagtatgtcttatggcttcagcgaatatccgaatagcattgttcaccggatatccgtatctgaactatccgaaaattatctactctgaaaagtatccgtatttgttttttatccggagcggacgttttcatccctagatggccatgtgatagcctggtccaacaaacctgttattgtgtgcctctagccataatttttccttttctttttcggaacaaaccacaaattaacatatacgctcatatacacgtgaatatactcaccctacacacacttattactatgaacatgtacatgcacacactatcgcgctctacgagcacattttatctataaacgagagcactggtatcaaaactgtaattaagagttattagccgagcacctacatcaagtcaacccgagtatataagttcgatcgcaagaaacctaatgtcgctgcatcgtatatcaaggactacatacccagcccttctatttttcatttgacattggtaattcaaaatggaactaagccctgtttgattcagcttaggattattataatctagattattagttgtaaactgaaacaaacaagtagattattatgctagattattataatctataagctagattactataatccaataatcttctctagaggagctttttccaaattattgagtggctaaagacccactactcttagatgcctctaataatccagagaaacaaataactcgtggcttattttatatcagcttattataatccagcttagagtaatctgatttaataatctagattacaataatcttaagcagaaacaaacagtgcctaactaatgtgaaataacaaaaaaaaaaggaggaggaactatgaacatgtgaataagatgcacaataaattgaaatttttctctttttttggaaattaatattatgtctgcaattaaagctaaagtggccaaactaaacatatagccgcgacccactaatattaggttccttaatttgtcagcatgcgctaaattgtcaataacatgtaaatatatacatgtccaaaacataagtgccattcaaaaaagatgaggcaaagcatcaattaataaggtatggtatgtaccatgacataatcttatagggtaattttaccatatttgagaagtatacctggaggtacacatctctaggtactaagtattttaaggtataaaagattttaatataaatttaggtatctcaagataaaggtaaaactcctcaaatatcatatatcactattctttcttcgaagggctaatcctatctatctactccatccttatttattatttatccatctgcagttgcaactttgcacggcaattgaataagatttgctgaaacttcgtatatggtttctagtggacacataaattaaaacggtagcagtacacctgttcaaaatgtgtgatttggagataagatcacaagattttgagacctaaagaagttagatggacttgatggattaggcaaggaacatgctgcctaatatttatgcagtacacaactaaccattctatgctagtctccccaaaaaaaatatgcaattaacattgctgtgacatgctagccaattaaccatagcatcagctacagcaacatataggaaagaaacgatgtgcaagaattcgcatgcatcacaatcacacagctcgtgtatgcattttgatgaacattattggtgtacgagttttgacgaacattatctatcttgtaacatcacaagcagcatggtcgtatacatggtcaactcggtgctaagctgagcggcggccgtgcatgctgattagctggtggttggtgtgagatgaaattaactaataaatactctagtaaattataacaattcaaattggtgcttggcaccttaattatataattgatggttgatcgtatatagccaaaacatgaaacatgagacaatcagacaacagcaatttccacggacagttagtacaacaaccttacttccattggctaattggcttgttctcgcagtagtaactcacgacgaaaaaggaacacggtctttggtcgagaaaccgaggcggctgctgtttgtgaaagaacagcaaaacacatgttgttttaaaaggtgggaattagttaagaacgacagaaacgttcatttgtgtgggtgggtgaggggggggggtggttttaaaaaatccggttttttaacaaattggtccttttcaaaaacttatttcgaaactagtcactgcaaaaaacttcaaccaaaaataggccgtggactcagcgccatagaccttggcgctgagttataacgtctcagcgccaacgttgttggcgctaacatctaatccgaggtggcatgaatttgctgagtcattatagctcagtgcaaagttgtttggcactaaggtcctgacgattcaaatagacgcgcaagcatcttagtgtagcaaaatagtgatagcctagtggttaatgtctcaagtgaggcataaggttccaggttcgaatcctggtatcccccgcctcaccctttttttttattttggattttttccttttctcttttttgttctctcgactactctcttattttgtaattttttgtattttgggttttttccttttctcttttttgttctctcgactactcactcttattctttacaaaatgacagtttcgtttgtaaatttgttttattttgaatttgatttgaaatttcagtttaagttctcaattgccatataatataccactttaatattttttcccaaattcaaaaaaattgcaatttaaacatatcttttgaagatagtatcatgagataaacagaaaagaaaaaataaagagtgagagagagaagaaaaaaaagaaaatgaaaaaaatgggtttttttttctctcgactactcactcttattttttacaaaatgacagtttcgtttgtaattttttttattttgaatttgatttgaaaattcagtttaagttatcaattgccatataatataccactttaatatttttttccaaattcaaaaaaaatgcaatttaaacatatcttttgaagatagtatcacgagacaaacagaaaagaaaaaaataaagagtgagagagagaagaaaaaaaagaagaaaaataaaaaaaatgggagagaaaaaacgaaaaaaagaagaaaagaaaaaaaagaatggggagagatgggggatccaaaaaaagaaaaaacgaagaaaagaagaaaagaaggaaagaagaaaagaaaaaaaaattgggggagatgggaggtcgaaccctgcttcataggattagagtagaatcatgctaccactatgctatcggtgggttgttgaagctgaatgcctcctcagcaatttaaatcattaggaccccagcgccaactcaacaaatttatgccacctcagattcgagcttggcgccaacgttgatgacgctgagacgttatagctcagcgccaaggtccatggcgctgagttcacggcctatttttggttgaagttttttgcagggactagtttcgaaataagtttttgaaagggaccagtttgttaaaaaaaggtaaaaaactggcagatttttggcaagatagtggaaacagattatatgctttcaacatgctctgtttatctatctaactggaaagtaacttttcggttcaaattggccacttgcttgtatcctgttaaggatttgtttcatgttcttatcacttggacggtccacattatatacccagcagctggaagcattatccggtaagattttgatttattttcggatagcattgtcaaatgggaattttcttttttctttttacatcttcagcagttgaactgtcataggtttcctgtacggggctgcaggaa

SEQ ID NO: 14933 - DNA, 11871 bp, Oryza sativa
  unsure (1)..(11871): unsure at all n locations
caataatgtgcgcgtgagaaaggtcaggaatcgcagggcatataattggatccatatatacatgcactacaatcgcttgcgtgcgtgcatacagcattcacatatgtatgtactatattctcgtatctatctactaaactaaaaattcagatatggttagtgtgcatgagcatatacaaactacacaagcaacatgcatggttattgattaactctatgtttatgtgtgtggatgaaacacattgcatcaaccaattggagaaggaaccgtaagaatcttaatcagaacattctactcttgcagctacggatcacttcaaggaagaacacagcagcagaaaatgttttaacatgcaccacatgttttactagtagatcaatatcgattgatgaaattaacgggaccagaccggagtcagtccccattttacctgacgaacttctccaactacgttagatatacgtagagctagcatatagatgacgataatcacgtaggtcatcagatgctactgttttcgtttcacagagaccagatcaacagagattaattaatccttccaattgtttacagtagtcatttggcttgcgacattaccaatatacgtgcttaatgtccgtatcaagtgcacatatgcattatttctgctcatcgtagaccgaagttacgacgatggacactaccgaaaaggcactgactgcaagcaagcgtcacttatcttgctatcttgctggctttacttgtagcggagagtggaaagaccagttcagattcagtagttttactgaacctgaacctgaccatttctaccacatttctgcatttcatttcagaaaaaaaaagtagtaatagtcttaaaatcttaatacaagcggaaaacggaaaagaaaaacaaatactatttttcagcttttcttttttgtttcctgaataattcgacaacagtttggaagtctaatacgcatgcagctaattcagcatctgtttagttatccccagaagaaaagatcatgtggccgagaagaacatcagactggatcactggaactagcgttcttgtgttggaagtcaaaattaccattcaagaaaaaaaatataaaactggttataaaaattggttgcaacgtccaatggattatatgctcatctagataggagcatatacgtacgacgaactgcggtagttgccaagttataatcaagttaggtcctcctaggcctgtagaatatatgatcgctgatcagagggcacaagcaagcgcccgcccatggacattatttctgtcgcttgaccaaagcatttttctatgccgcacatacaccttccctacaagaaaaaaccgtcgagtcgatcttgaaattaaatcctgcaaactcaaataaataactagtcggcgacagggacggactaagtacaattataatcattcttaaaaaaactagacatctcatttttaatttattccatcctaaagacaacaacgaaagacacggttgtctcaccatcggtgtctctcgtaaaatacacagagagacgaagctgaccggtggtggtggttgaagttttctatggcttttcttgacgtctcgcgatgtgagaggcgatgtgtgtgtgtgcgagcgagcgctagctaggtcaactttgctctcagctctcgctcccgatgccacacgctgacgctgtgctcgttataaacccccggcctcgccggggcctcaccaaccacggccgcgcttcgcttcttcctctgatcagagtggggtgaggcgaagtgctcgatcgggagcggtggtggtggtggggagagagagagagagaacttaacgatggggaggtcgccgtgctgcgacaaggcgagcgtgaagcgggggccgtggtcggaggaggaggacgccatactcaggagcttcgtcgagaggttcggcaatgccggcaactggatcgcgctgccccacaaagcaggtgcgcgtctgcatgcgtccgctgcttctttctttttgaaaaccgtgtgctacgctagagtcctagacgagttcgtgcgtggttcgatgaacagtggtcaaaggcttctgtcacttgcaactttttaacggcagcttggtagtatatggagtacttagcttctctgaaatattgctagttgtatacttgtatctctctctgtgactttatctagctcggtctgtcagcgtagggacgggtgagtttactgataactcgctcgtacgtatgcacacgtaaggatgacgtcgttaatgtgttgccatttgattgtcatcgtcagggcttaaacggtgcggcaagagctgccgcctccggtggctcaactacctccgcccggcgatccggcacggcggcttcaccgacgaggaggacaacctcatcctgtcgctctacggcgaaatgggaagcaagtacgtgcatgcatgcgtgcgctctagtctacctgcattcacatgacctctacctctgtgcgagtatattgattatacttctgcgtgcgtcgccgtggatgtgcacaggtggtcggtgatcgcgtccaagctccccggccggacggacaacgacgtcaagaactactggaacaccaagctcaagaagaggtacttggccgcggccgcaacagaagcaaccactcctcctcctcctgccgccggcgacgatgacaacaacccaacgacacaagcctccagccaacccgctcctcctactcctccggcgcccctcgtcaacctcgacgcggccggcctcgacggcgccgtgggcgacaacgacgagctcctgctgcacaagtcggagcagctgtacgccgagctgatgggcctcatcgagcagcagcagtactccacgatcaccgccgccgccgtcgacgcggcgacgacgacgacgtcgtggtcgtcgccgtcgacgggaacgacaagtccgaccgctagcagcagtactgacggcagcagcagcagcagcaacctgccgtggccggccgtggacgtgcacgacagtacgatgatgccgccgttgtcggagtccagcggcagcagcagcggcttgttcttcggctctcacgcgttcggtagtggctcgttccaagacctgctcggctctgcagcttccttcgacgatgtcatgctgtcgcaagagatgctgtactactagctaggattaataagaagaaattaatgtttgcttatctcattagtctagctagcaaagtggtaattgaattatctcaattaagttataagtatgctgcattggctagctagtgacggaacgagacgtcatgatatgtaccgtgcaagcgtgcaaatcaactatgactgtgtgagtgcgcgtaaacgtacgtgtgtgtgtgacacgattgtatatatatggtctcagaagtgtaagaaatagtcatgcggtactggaagatgacatcgcgcgtgctgggtcgccccaacatatagccgtgtactaaggtgaatctattgacttggcactaaaaattttatcttattggcaggtcaattagtttgtcgtcgtcaagttttagattgaatcatcctcatcacaacaccttgcactgtctcattgccttttcatcttgttcgcgcgcgctagctaaagtagttactccgtttcacaatataagttattctaatattttttatatttatatttatgttaatgaatctagacatatatatttatttagattaattaacattaatataaatgtgagaaatgatagaatgacttatatttgtgaaacggagagagtagcaaataatgcatgccatcgcctaacgacgccgtcgtcgcagcattgttattgccataagacgcagcacaaatcctgaagcgtgtgtccttccatgccagcaatgcaccatgccgccatctgatagagtgagtgtacatcagaagagcggctgtttgtggtgtgggagcgagtctgctctgctgctgggccaaaagtgaaatttggctggaccaagttgcggctcacgagtcacgacacgtttccgctcatttgggccaacgagcagcaccagcattacagaaacgggataagctagttcactttaggcccctcaatttgtcagccaatatgaaattcatccctaaaccgaaataccagatataacacgtccctcaactttcaaaaccacttgaaataagaccctaagatgatttggatggcggtttcagttgacatggtatctacgtgaatggtttgactaggttatcgtctcacgtggcgttataatcaagattaaaaaaaaattaaaataagagtaaaatatatgggcccatatattagtcaatacaaacataataaggaagtgggacccacatgtcngtggtnccacnttcttcacctcacccctctctcctctctacttcctccttcccattgttcgcaatgaggaatcagtggcaacggcggccagcaagaaggcagcgacggcggttggcgggaggtgtctattgaggagggagccatgacgttccgaggcgacggagaagaggatagaggcgagctccgaccaaattattcacagtgataatttcaaaaatggcgcaacgcctggcggagatggtgatctctccccgacggacgcctgcctcacggtgatggagctggtgaacatgatctccgtccttatggcgctcaccgctgccatccgccttgacgtcccagccaagctctgggctagaggtgccaatgccccgttccccacgggacaccctaacccctttgtcctcgagcgcctcctccgcctgctcacctcctgcagtgtcttctgcgagcacaagggctccccgcgccacttcgcgctcaccaccggcgatgatgaatcctagagctggccaccgctagagaggccggcggtggcggtgcaaatcaatagcacggaggagctagtggaggaaaaaatcagcgcggtggatatcaaagtcgacgggcaaaggtagaagagccattggaggaagaaatcagcgtggtgaagactaaagtcgatgtctgacaggaatacgagtggcgtccgctccaattcgctcactgaccaccaaccatggctcgagcccttcctcctccccttactcctcgtctcgttcttgctcacgctcgccgccacggtggctgcattcatcggcctcgagtccttcttggtgatggtgtgccgcccgtgactcctccgtcggcaatgaaactttcaccaccctccttgccccggtgttgatgtaaaaacacggtggcctgggagatctgcttaacttcagtgcatgtccaaagctagcctaagtgtgtcaaggcgtgccaactgatttggtcctgcaattagcaagaaagacaaaaagtagagttagtcagccgacagtcgatcggccaataggccgatagcatatcgttggtggtctcagccgatgtagttagaccaaatcggctatagactgggtagatcggtgaatattaaaccctaaacatgcctcatcggctgtaatattgtctatcaggtttaataaagaagtttaagatagtattataaaagtagccgatggaacaatatttagggtaagagagataatatactagctaatactctagtacaggcttatataggcagatcaatctatataaatatatcaaattgtggttggttagtagtttagatagcccagccgataccaatctagcttgatataactgtatagggagatctatctatataagtggcaaatatacataaaactttagtaaagaagcatgtatattaggtaagatcggctaaaacctcgatactacccttattaacaatcaagaagcaagctagagatcatggttctgaacacgacatagtaggtcgaatgtactaatgcagcactaagtatgaaaagaaatatgatatctagacaatcaagtcgttgactgaatttttaggatggtagatgtctaagctaatctaatctagtaagacgaattagccaatactggcagaaatcctaaagcaagaagcagccgatagagctaaattgatatgctaagactagaataacaaagacatatgataacaatggttatgatacaaggactagaatatctaaaacgacatagtagctccgatagtacaagccatcgagacgagttacctcttgcgaagcgaactcgtcgaaaagtaaaagggtggtgatgcgccgaagttgtattggattgtccctcgtattacaatgctataaggttcatatttatatcccgagtacaaaatagtccattatggacatgactcaaacatttttaaagataaaatacaaacaagaccatatacagcggtctcttgccaaatctaactcaaaccgacataactaacctagttaataggtacaattgccatacacgagctctatctctgattgacaatgacagttatcttgatctaggcctatgccgagcctagattataccatatcggcagcttgccatatcggccaagtcaagcctttgtctagtgtttagccgatacgatattcaaccgatattcaaccgatgtgcagtttgacttagagatcaactagattttacacctaatccgcttcgatctttcttcttctccaaatctgatgccaaattccgttgttaacacccggtcctctagctctcggccctgaccccactcctccccacctgcacccgcctcctctccctttctgtccaagtgcccatcactgtccgcctcgccgccgcctccttctcgctcaccgtcggtcagacggacaacgagattaagaactactggaacatgcacatcaagcgcaagctcctgagttgaggcatcgacccgcagacatatcggccggtcaacgccgggagcagcgccgccacggtgagcgggctaaccacgacggctagcaccgttgccttgccgtccctggcaccgacaatggcgtgagggagctcgagaaggggtccacattttcttttaattttaatttttactagcaaaaatgcccgtgcgttgcaacgggcgaaaaaattctaatcataatatacgtttttcatgcataatgatttcaatgacagtgtttgtattttaatgagcggcttgttttttttataaacggtgttcgcgattttctcaaaccattttttagaaatgccgtatttctttctaatattttttcttagcatgttttttttgcttgtattttcgaatgttcctttttgcttttttccaatacaggagaatatatgacgaaataaaagccgtgtagtatgtggcaaaaaattgatggattctatctgactcaagtgtccatcaatttagctttttctaatagttttttcagagcgatttgtttttttaatagatggcgttttttttcttgcgatgttttctcaaaccattttttagaaatggcacatttttctggcggttttttccttgcatgttttttttaaaaaattttttaccgacgatggaaatagcttttctcgcacgtttttttattttttttatggaagatggaaaacatttttagagtgttcttttttgcgcttttttctgacttttttctcacgcgtttttttgaaccgtttttattttctcatgcattttctctttttaaatagttagattagattagagatagagaagagatatatactgattagaaatcagactttgtttcacccattctatttttttttctcgcgagcattttttaattcatacgaaccaagtttttattttttacgaaccatttttttgccactttcttagggaatcggacgaatttttttagatatttttttttcagattttttttcgcctttataggaatttgacttttttccgtttttaaaggaattggatttagcttttttcaccactttttgtttgccttttataggaatatgattttttttgtttcggatctatggtttttttggccatctaggggaaacagacttttgttgttgttgtttttcttttttcctttttttgcggcttttctttttctttttatgcacctttctgtttttgttatctcccttttattatttttttaaaaaacgacctcaaaataccttattgcaagattatagggactaatgtaaatataaaaattacagggactcaaatacaaaagtacatacccaaaaattaaaatcatataaaaatagaatgctctcgacatgtaggttccgtttttgcaaacagatctccaatccgacgcaacaatttttttcaccaagatgtatgggatatcacgggagattaaaaccgagcggagtggtgcgtgggatctcggactcaagcctagaggagaggtgccttttatttttcgtttttaaagaggaatcagatctagagttggatttttttcgtttagagatagagaatcggacagatttttttttaatttttgtcgtccttcttcttacccagagacggattcgtttttctttaatggacagatccggttttcccaccttttttcggccgtttttttgatcggacaggtttaggttttttctcacccggttttttctggatcggatagatttggttttttcgcccggtttttcgttttttcgccttttttatcggataggtttggttttttttcctttttttccgcccggttttttaggacagatttggtttttttgtccggtttttttgacggatgatgaaagcacctcttattttttaagtagtatatagacgttttggttctaatgtcacctcactgtcgtgtaggacgatgaccaagtcaaaccagctacgtaggcaccatgtcagtcgaaactactgttcaaaacatcttgtgatctcttttacactggtttttgggagttgggaaatgcgctatatatatggtattgtggttcagatatatgattcaaactcggcgacaaatggaaggacctcatgtgaacttattctttacaacaacgggaaaaatacaaggcccacagttgtagcgagctgcgggaaagcaccggccgaactactaacatacagtacgtgggaatacgcaaggtcgaaccgtcgctgcagaccgcaaaagtcatcgatgcccaactaggccgccacacctctacacggccccatccggcagcctcctgcccgcgcggcgcgacgcaccaccggctcactacgcgctagctgcatgcatcaggactgcggtgctacgatttgatatgtccctgttttgaatggttaccgtacgcaaatttaagctgcaaattaatctagtagtactactatatatgtattgcatagttaagctgcaaattgatctcgcatataatgccctcgtgcaaacgcatctattgcgaatccgaaatttgattgatctcgcatatgcaatatgaatatatatttggactctggtgttcctagtttctacgtctcctacctagctacgaaaaaatgtacattgtacacgatacgaactcgtgctttggtacctgtccataaaacacatattttacccacgagtgcagcagctcgtctcaggtcggccaccatctatcggcaacgctagctagcccatccatgtggacgatgccgttgccgccgctgcggccgccgccgaggcggtcgccaccgacgacgatcggggaagcgtacccggacgcgcggggcttcgcgacgctgaagtggatagtgatactgctcctcgtgtcgtgcatgttcgccggtggcctctacgccctgacgcccctcgtatccaaggaccctctctacctcgcccgcgtcccgtggcgtctgccggtgcgcgtcttgtgtgactcctacctgtcgctgatcatggtgatccgcgcgtacacgttcatgcacctgccgcgcgcgccgctggtcgtcgacgactatcttatgctcctcggtctcggcgttatcggtggcgtcactgtcgtaacgacgtccaaagttttaaatctccggctatagctgccgctatagagatagctgctgggaacggacggagctaagagatgcagtttttagcgctaagaatagcgggacgctaatagcgccatttagccggcaatagccgctaaactggccgtaatttagcgtagctaaattgtaaaacgcggccggtctggcccaagaggaaaccggcccaactagaccagagtcgagaggtgggtaaagtgctgcaaaccctagctcgtaagctcccagcagcacactatccattccaacttcaaagcgctcactctccagctgcaagaaaagtggaagcggccggcggcggcggcgcagaggcgtccggcggcggcggtggcttcaagcggatcgaccaacgcaggtggctcgtggaggcgaccggcgccggctgctgcttcgagcgggcgtccaaccagcggcggcggctgtgaaggcagctgagcagcggggcaagtccgacgaggaggtccgtcagtgcaacgtctccgaagcactgaagcagcagcaccaaaggtgacggcatggcacaacaatccggtcagttctcacatcgtcctctcttttttgcttgtatgttgcagatcttacaatatgtgaacaagttgtccatatttgttacctgtaatttcagatacttgccttatgatgtagatcttactatatgtgaattattttcttactccctgagatctctcgtttgcttgtttcgcctgtttaggtggtaatgataatacgtgctatatcagtttgcattattttgatgcttaggcagctttgacgctagcattaatgtgggctaagtttgctttttatataggtaatccgtccagtgctgcctctgtctcagtagaagctggaccaaaacaagctggtatcaactcagatgatcctgcatgggctcactgtttctgcccagacataaccaagaaacatcacctacggtgcaagtattgtgacaaggtctgcactgctggaattacaagaattaagtaccatcttgctggaattaaaggtttcaatactactaagtgtcagaaagttccaagtccagtgcatcaagagatgtttgatttgcttaccaagaagactagtgaaaaggaacagaaaaacaaagaaaaggaagtggccagagctcaagttgacatagaaaattcagattgtgaaagtgcagtgaaggttcagatcatggcaataatgttcttgtggtgaagccaaaggagacaacaggatctagtagctctagatctgtagcaggtggtcatactattgacaagtactacaagcctccttctatagaagaatctgccagtatgacacaaagagtaattaagctaagcaataaggttcaaacagcattgacaactcagaaaagagaagagaggaggaatataacttgtgagtacatatgtcagtggttctatgaagctagtattccacacaacacagtaacccttcctagctttgctcatatgttagaggccattggacaatttggtagaagtctgaaagggcctagtccctatgagatgagtggatcgttcttacagaaaaggaaggaaaaggtgatggatggattcaaggagcacaaggaatcatgggagctcacaggttgttctatcatgacagatgcatggacagataggaagggtaggggagtgatgaatttagttgtgcatagtgctcatggggtactcttcttagattcagtggaatgctcaggtgacaggaaagatggcaaatatatctttaaacttgtggacaggtacatagaagagataggggaacaacatgttgtccaagtggtgactgataatgctagcgtcaacacaattgcagcaagtctattgacagcaaaaagaccatcaatattttggaatggatgtgctgctcattgcttggatctcatgctcgaggatattggg

SEQ ID NO: 14934 - DNA, 4330 bp, Oryza sativa
actatcaccaccgttggatgtggggtttgacgtggacgtcccagatgcatccctgatggcggttggagggcatttcggacatttcccctttgccaaccgtcatacctacccctatataaggacctcatctcactcacttcaacacacacttccaagcttgacctgaattataagaggctctattgtactatattgtatactagaataggaagagagtagagtagaaggagtcggaagaattccggagttgtcggtaatcttctcctattttttttattctgttattactctgaatttaatataatgtttctcttgagtaatttagatttatcttgtgagaattatctcttggttagttcctaagtagcatacggaattattgttcactataatgaactaaaatatagtgattgctttggtgagttataaacactaaagtagatattaatagcttagacgtggtgtttaggtaattgttatccagtaattgctgcgtatcccacagtacgtttgaggtaggtgtagaggtggtgatagccctcgagatcacttaagtcctccctgtctgggtacgtagtagagcgacatctgagaacagcgggttgccagtgcctgaagtattgcattaggattaaagttaagctttccctagacactgtttctcactagtaaatcctctctatcctggcctatcttttgcttggtgtccttggatgaactggaggaagatttgaccacacacgttcccttggattcgatacccttggaatactccgtaggggaagtgctacatcagtatatccgtgcgcttgcggattttatctgtgactgtattaaataccaacatggagccgagccgctgacagcccgatcccacgcctccttccctccaacagcagccaacaggtgggccctccctgttgttgtccagtgttggaatattcccttcccgttaataaattgatttccaatattctatcaaatgctttaatctttgaaaatccatagaaattcaaccgtaactccgtttgaccccgttcaacttcccaattttttttctaaaaattgagatctaccagtggcactgttgtttctctgatttgagattgttttattgccttttgttggttagttttacttttcgtgtatagagcccgttacgaggaagctccggacgccgcttttgagggagaagatccattggatacgactaccgaggtagttttgcttagccatgcttacgttgtatagtcgtgtgggaaaattggattattccaattatatgcttaaaaatccggtacgttgtaccgatgtgttgtgaaataaaatgtgttgtgaaaatggtgatgatgcgaagtcatacctttgtcgtttggctatgtattgtcattaaggaccgttttctttgggaaatctatccaaacacattacagtgcgaccacatgggtgtttatgagatgcctctggctaagtaaatggttatcacatgggaatttggtgtgccaatggttgtggaatgccgaggatgaggagatgaagtttggatctttacagcccttttgggcatctttattgcctctattgtggcacacgatatataccagtagaagtagaagacatcctcggtatttcctgagtggatgaaggctgaccttgcctgatactcggctaagagacttagcccaactaggtggtgtcgacgagtgatactcgtggaccagatgagttgagtattggggtacgttggaacgagggtctacgtagtacgacatcaagcaaacagaagacaaggattatactggttcagaccccttgtcaggtaatagccctagtccagtttatatagaattgataatgatgggaacatattacaaagagagtagtcgaagcagacgatatcgacgagatcgtagtcgatggcttcgacgagatctcccggcgacttggctccgtgtactccgcttcgtaaactatggtgggtgtgttcgcgatggaattggatgcttttcacccctccccgggggtcccttttataccgtggatcatcttgacccccaagaaagatctaagtgtatttgatctggtacagcataacagaaactctatcccttccaagtaggactttggaaatcgcttgactcgtagagatattttccataatttgggacggatttcaaacgatatacatgggaacaatccgtgtacgtgaaggtataccttatcggtatattccataagtcgtaggatagaaggtatgccctatccgtaaccctgacaggtgacatgcaattttcatgggttagctttggaaaggccttatcacgaacttctgttgctgacgggtaaatggtgtcaattttgtgtcgtgtgggtaaagtgcacaacctctgcagagtctaataaactgttcaacaagctgtgcccatggtcaagggcgagtgcaaggtgtttctcatagcgtagttttgattgacaaaatatttgtggaaaatttttagtgggaagggtaacgtttccagagtctgcttatgtggcagatggctaacctttgtggttaggaacgggtctcttaagaaaatagatgcataacggagacacgaattttacgtggaaaacccttacgggaaaaaaccacgggcgccgaccgcaatgatcagtatagaggagttggatacaaacacagtggatacattggactatcgcaccctccccgtgcggcttacaagggatatatataggagaaatcaagaagtcctagtaggcaaagactcgaagtcctaatagtaaactaatcctataatgcagagtcctattagaaaactaatccgaatatactgtgagcccaaaattcggatcacatatttaacaatctccaccttgagacgaatttcccttgtagcataaaaatcttcaatctccaaacaacctcatgatgataatatcaatgtgcgccaaatagtcacttggactataatccataataacacccttgatccagaagagttagaccatacttcaaactcgccattgggaacaaatcctgaatctactggtataatttgtggaaccctagcagaaacacgaaacactctaagtgtataaaatgaagtgcataaaacgaagttgatctccgtataaacctcctggtaaatttggcttgtgaatatagcaattgaaagtgagttggattcaccaaaacataaccggaagcactgcaatttaattgatatatggtacgaagaacgtgcacaatctgaacaggagtgaattgctccaaatcgacgactttggcttttcctgtcctccaggtgcatgcaactagtagtggcttcagccctgtatatttttttttctttcccagcgaacaggcgaacaagcagtgggaggacgtggacaaacagatcgaatcgatctgtagttgcggctaacgtcgacgaggaacgaggaacaacacctcacgctgctgccggggtcttgacgctggaacgatctgtatgttcagccatgcatgctgcctttattcccttattttattttttttatttttaatgcccgagattgatctcgatgacaagccgctgcgctgcgcccccgccaactccgcatcaggatgatctcggcgacagaaaacaactcgacaagaggacaaacccaacggcgactgggaatagtagatcgatctccaatgctctgataccacttgcaacggatagatttcttctcatttggtaacttcatcaattcccatttttttcaagtgactccatctcattatgtatagcagttataaatctatctattgcaatcatcagaaacaatagcctcaggatacgtagaaggttctgtattaccttcaatttcttctgccacactaaaagcataagcaactatgttcgcttcttcaatatatcttcgaggaggtttagtatttcttttgagcttatcttttgcaatagaatgttttgtagactgctcaacaatagaagaatctgaatcttcaataacaggtgcatcttggttaatagcaacatcttcgttttcttgtgcacctggggtgtcgtcaggcaccaaggtgttgttagggccgagatggtgttttgatgtgttgatatagctaggttaactatgagaaatagtgttgttgtaataatattgctttaatctagttgttgtgaaagtgaaaagaaactaatagaggaaaacaagtaattattgttaataatcattgtgacaagttgttgcaaagtaacttgtgaaatgagacgaggagtgagcctcctcccaacagcaaaaacttgactcaccagaagttttgtaaaataaatatatt

SEQ ID NO: 14935 - DNA, 648 bp, Oryza sativa
tcttttcgggcatcctcccagctagcgagcaagtgaccagctgcatcggaagcttctgcggcaccaaaaccatctccaccatgaccagcagagtcaggtaaaagttccttgcaggtacccgccaagagtgcctcatctgtcgcctcaacgggacgcattcagtgccaccattgccaagggtttgggcatgtgcagaaagattgccctagtcaacgggcctatgttgctacagaagatggctacatcaccacctctgacgtggaagaggaagagggggaagaagaagttgatgatgaggatggcgaagtctttggtcgtgatgacacaacggactacaggaccatcatcgtgcagcgggtgctcagcacgcaggtacaacagcatgacaggttgcaacgccataatttgtttcagattttcttcgtcatcaacaaccgttgtgcacgtgtgatcattgatggaggtagctgcaacaacttggtgagttctgatttggtcaagaagcttggcttggctacacgtacacatccacacccttaccatattcagtggttaaatgattccggaagagcaaaggtaacacaggtttgtagggtttcgttttccattggctcatatgcagattatgttgattgtgatgtggttcct

SEQ ID NO: 14936 - DNA, 608 bp, Oryza sativa
agccccatcgacagtggcaatggtggccccaggctcttggaaacctaggtcatcatcgccgtcatcgatgtcctcagcgggggcctttgcttggcctcacttcgccgattgccggaaggaaccgccggggacttgccctctcggcgctcctgccttctctcttctctcccacttcctcgtccgctcagccaaacttttgactgcacggcagtccgcgaggtcgtgaagggaagtgttgtggacggtgcaccacttgccggttgggcgctccctgctgggagcgccggcctccttctttttgtctcccgcaggcctcccctttcgggtggcccgcggagcgccctcgacggcgaggacatgaccctcgtcgtctgaatggactgacctcttctttctcctcctgtcacgcccccctgtctgagcggcggatccgggggcggccgaagctgccacaccggaaccggaagggttccaagtccaggcctcctccttgcgagccactcggtccgcgagctgaaaaaactccgcggtagtctggggctccttggaggcgatcttttcgagcatgccggtgtgccgcacgccccccctgaacgcgtagattaccg

SEQ ID NO: 14937 - DNA, 604 bp, Oryza sativa
ctagaatgacttacattgtgaaacggagggagtacctttcactcttcccctattggtggtcatcaggtcttcaggcaacatttcagagaatcaagttatttgcttgtaaaggcttaaaaatgaatgttgaaagttgaaacctatgacaatcagtgcaatatttgccaacaaactaaacacagaaattgtaagttacctggacttctcacccttccaccagtcactgaaggttcttcactgcttggtaagatttatccatgaattttatagagggcttgcctcacattgagggatatactgcaattttggtagtggtagattgtttcactgaacatgcccaattttaccctctgaagcatccaatttcagcagtcatagtagcagaatttgtcatggataatgttgctaaaactcatggtattcctacattaatagttactgatcaggatatatagattactcaccagtaattttggaacgacttgcttgcgaagcttgatactcaattgaacctagtaccgcactccatccacagcctgatggacagacagagcggattaatcagtaccttgaaatatacctacaaagcacactccatgaaacg

SEQ ID NO: 14938 - DNA, 1894 bp, Oryza sativa
gccccaacttaaggcccgtttgagatatggaatgttatctcaatcgggcctaaagttggtgtccgtcacggatgatggtcatctgtgacgggccccaacttcaggtccgtttgagatatggaatgttatctcaatcgggcctaaactacggctcgtcactgataggtgtcatccgtgacgggcttaatttttatgcacttctaatatgtctgtgcgaccatatctcaatcgggcacttttttggctcgattgagatgacttccttgtgacggcccgctatttccaggcatgttagaggccgtcaaagatagaaggatctgtactagtgtaaagaacaatttaagcatatatgtctagctctgtactccaaagagtatcccatttatgtcatgtgaccatgtcatgatactgcaaagagtatcatttattcattttgaactgtactcattacacattgtgttctctcagctactaaaacacctgtactgaatatatgaacaatgaagaatgctattcagttctttcttttctgcacaactcggaataactcagaatgctatagagttacactgttgcagttctgattcttaggaccataactcttaggagtaattcaagcacagaaactataaaacctgtttttttatgtacctcaacttggttctggaaggactgtagcataactgatgatctcatccaaacggagggcatttcctgtaacctgcagaaaagcgcagttgtatcttcttcttttttttttttaggagaacgacggcaggagatctgccggaattttaaattgagaagggtgaaaaacagagttttacaggggtacaaatctgaaaaggagagattacaacttatttcaagatacaaggattacggaggtttaaaaaccagaatacgaaggtcaatatcatgcttaatctgaagagctatagatagctcagggctagaggagttttggaaaattcttttatttcgctcaagccaaatgttctaccaagtagttagaagagcacccttgatcgatctcacttgctctttagaacccgcatgactaatttcggcccaccatgttgaaatatctgaaagaatagaagcgctggcagggccgaaattctgaaaacgacaaaccaggctccaaacttgtcggacgtaagggcattcattgaaaaggtggtttgtgtcttcgaacgcacaggtgcaaaggcagcaaatcagttgcatggccaatgcctatgcagcaagatttgggcagttaatgtttttttatggaactagccaaccaaaaaaatctcattttaggttctgtcggggccgtccaaagggagctgaagtcaattgaggcaaacgaaccttaaaattgaaagagatacgcactctttgaagagtacgatccagagcttgttaatttccaagagatgtcatccggttcttgagaaagagatacagattggagtaggccaccgagttggaccaattcgtgaagctcttcaacggaggtgaattggcgaaacgaggaaagccatttgttatcatttagttcgaattgtactgatctctactttcgctttgccaatctgaaacagtttggggcaaagtcttttaggcattgattttgcagccaattgtcgttccaaaaactcgtctttgctccattacctaccgagatggtggtggctgcttggaaaagcttcacatccaggccgtcacggggaagttccatgcctacccagggcttttcgtcctccttccatttaaaccacagccattgcaggcgtagggctcgtgaaaatctatccaaatctggtagaccagcccctcctaggtttttcggtctacaaacagtctgccagttaatcagactatcacccgggtttggggtgcagga

SEQ ID NO: 14939 - DNA, 8050 bp, Oryza sativa
tataaaaattgatttgttcacatcttctcttggccatttggctcgaatggcaggcaacactttgtttaccatgaaatctctaatcacatctcttgttattgaagttattggcttgattactagttctccacgaagacgattctgactacttctcacagcatgttcataagtgacaagtggaaaacaaccaattttaccatcaaaaacacattctccattcctaaaccttggccgagcacaaacacacaagaacatgaacctagggatgtaattcttgttcttacaagtgcgatgtggttcatcttcctcgggtagcaagtaatacttctcagatttttgagagaggtagaaccatttttcatcaatgaacacatagtcaaaaaaatccttaaatcttggatcaccaaccaaacttcgatcaatcatgtcaacacaccacttcaacctagtcttcttgttagcatctgtgaggtatggtttgatgctactagagtgccgtctaagcaaaccttttttcaaatacctttgtactctagatttggaaataccaagtttactagacacatcttctatggtcattctttgcttgagaggaatgttgcgcaattgttccaaatcaagagggattgccttatgaccagatctacccttcttgtgactagcaaccacaaccggaatgttatgagtaagttggattttacctcgcttccataagcgctgaactgatcgaatgtgcactccaaattgatcagcaacccttcttgtatctttcttgcctagtttcccattcttgttgtccttcaacaatgcttggtacacttgttttgtgacttcttctgtcatgtccttccttcgatgctgtccttcaacaggagcttggttctgtacatcatgttctagtcaaagaaaaaaaaacaagcacattcaaaaaaactagccacttctttaataaaaaaatgaaaaaggaaagaacaaactgagatcaagattaccagcgtggttttgtaaaaaatctaaatcaactacaccaaattcatctagtggcatgttcaaatcaaatcctgtcggaaaaaggaaagaaaaaacttagaatagaaacttagttgatgttgttgctgtgaatataaaaaaaaggaaagaacaaacacattaccattaacgttgtgatcctccaatattggctcgttgagatggaagggaacattgccgtcctcatcttcttctaggcagacattcaaatcaaagccagcaacagctggaacagccattgcatgcagtagatggaaactctcgcggactaaaagtgagcaggttaagcacaataatggaaagagaagaagccgtttaaataggcatggcgaaactgaaacggcatctacccgtgaaaagaacgaaaaatacgcgcccaaaaaacacccccgagagcgccatgcaaaatcagaaaaaaaaaacaaagtgcccagacgaaaaaacgaaaaatacatgcccaacatacgcaaaaacagagtgcccagacgaaaaaaacgaaaaatacgcgcccaaaaatacgcacgcaagcgccatgcaaaatcagcaaaaaaataatgagcccaccaagtatcgaacccaagcactcaaccttcaaacatcgctgcactagcgtttgcttctcaaatgaatgtacccgcaccctcatttaataggggcaaacatagaagaatagcctcaaattaatcactccttggtaagcacaatcttgtcctaaacgacttgttttgtgggtatggagggagtacgtacaaagtatgtatacacgtacgggatggatcgacatagaatgtgacgcattctaatataaatctatttggtattttttaatatcagatctaacggttaaaaaatatgggttcaaacagattaaatgaaaatcaatggttagatattttagtttttcttagaatttctccaatttattagagcgccacttggcagcctaggagcatttgtagagatgccatgtggtggcttagaagcgtttgtaggaagttatttattagagcgccacttggcggcctagaagcatttgtagagatgccatgtggcttagaagcgtttgtagaaagtttaatggacttttagtatataatagatagatggtttataattatgtgtcaaaataatatgttggagtcttggagagggctaggcactatccatcccctatcacagtcaccgaacaagcaatgtactccagaaaatcctgtcacgctaacgcaccatgcgaattggtctgaaatcgaaaaagattgacctaatttacgagaaaaactgaaataattaactatttgccactcttacgagtggttctaaagaacttgcgacgctgaaccatatatcatagacacatgagggcccacatgtcatagatagcgagtgacaaattcttaattggcatatttcaaaagtggcaaataattaaatgtcccagaaaaactagaccaaaaaccatacatggttaatttaaaagaaactgataactgtcacaacatcctaaccaacccaatcgaggatcagaatcatctaggcgaaggctccaagaggatacaacctcaaagatgttggtaacatctgtcccaaacaacagataacgctttcacctgaaaggaagagagaactatctaagaaggcctctaaggagaaaaccgctgcccacggaagtcgacataatccacaccagacacggagcaaacaagacttttgccataagctctcttaactattgatcacctctgcattgattggctcgaggtattaagggttatcattgcccagctctcgtcaccctatgaacagttatgactccgtcacaaaacaaatgtcaccccccacctccggcgcaagcaccgtctgggacatctttagtttccaaattatacattgttcttctggaacaatctgtgatatttccctgacatccaatttgtaaattgttgccatatatttccaattaaattacatcaagcattcccaacctgcaggtaggctaacgatgcttaaatctgtccgctgctgatcgagcacatatgctgaaatctctaattccgctctttcaatctgttgcaacatgtgtaatatcagtaaaacaccatgccaatattagcatgaatcatgcgaaatctagcatgcaatgcagctcgtttgcatgctaagctagctcatggtcgttggcagattggagccaattaattaaggttcagatagaatacactctctcgatcgcttaatactccgtagctttcaattcagccattgcaatatatatagagtacagtgctttggccttcttgtgtgcatcctctctcaccttacagtgcttttcgttctcgatctcggcaacgacgacgacgacggcgactgccatggcgagcccactgccgacgatggagaccgcgcacgccaccgtgctcgccatcgggacggcgaacccggcgaagtgcgtggcccaggaggagtacgtcgactggtacttccgggtcaccaagagcgaccacctggtcgaccttaaagccaagatgaagaggatgtgtgagatttcttaaacgatgatatgcttcatcagatgtttttaatttaatgttgagacattagattccttcagtttcaagctattaatccactaaaataacagagaaatactaaaactattaaccttttattaatccttttattttatgttgaaaccgtttctccatcttttaattccttcagtttctctgttaatgttgaaacattttcgcttcattggcaggtgacaaatcaggcatcaggaagcgccatttgtgcctcacggaggacatgatcgctgcccatccagagctcctcgaccgcgccgccccgtccctcgacgcgcgcctcggcatcgccagggacgccgtgccggagctggccatggccgcggcggcgagggcgatcgccgagtggggccgccccgccgcggacatcacccacctcgtcgtctccaccaacgccggcgcccacgcccccggcgccgacgcgcggctcgcggagctcctcggcctccgcgccaccgtccagcgcaccgtcctctacatgcacggctgctccgccggctgcagcgcgctccgcctcgccaaggacatcgccgagagcaaccgccgcgcgcgcgtgctcgtggcgtgcgcggaggtcttcctcatagcgctcgccgcccccgacgaggcccgcctcgacgccctcgtcgccgcgtcgctgttcggcgatggcgccggtgctgtcatcgtgggcaccgacggcgacgacgacccgggagcccccgtcgaacacccccccatcttccacatgttgtccgcgtcgcagaccaccatagccgggacccaccagagagtctccctgcagctgagcgagcgcggcctcgactacaagatctccggcgaggtgccggcgctggtgcgcgccggcatcgagcggtgcatggaggacgcgctggcgccgctcggcctcgccggctgcggcggcggatggaaccacctcttatgggcgatgcacccgggcggccgcgctatcttggacagctacgaggcgggtctccggctggagcccgggaagctggcggcgagccggcgggtgctgagcgagtacggcaacatgagcggcgccgcgatcatcttcgtcctcgacgagctgcgacgccggcgccggcggcgggatggtggggaagaagaggaggaggagtcggacgagtactgcgagtggggtgccatggttggggtcgggccggggctcaccattgagacgatggtgctgcgtgccagtgccaccggcggccatgtcggcgacgaagtcaagaagtcgactactgcttgagcctcgaagctatagctaagctagcgagctcgatccattcgctgctgagcttgaagcgtcttgagtgtgggtgcggtcgtgcagagtatgcaagtaaaaaaaaagacggaaataagatactataaaataatgggaaataactaaatactcccacagtcccgaaatgtgtacttttcgcatgacgtttaataattcgtcttatcgtaataagtaaataaatattatttatctcgttgtgacttgttttaccataggagaaattatggtcttaactcatactttacatatttatactaaatttttgaatatatatatttacactaaattttttaataagatcgatggttaaaacgttatgcgaaaattaggattgtcatgtattttggtatgaaggaagtaagttatatggcttacagaactttgggacaatcaggaacaagaagtatcatgatgccatctcagtttatataaaatcagtatttgaaagactagtacgcttataccatgaaatgcaaatttctagcttttctgctcaaacttcgttaagtttgaaaactaatctgcatatagagtccaatacaggatttatttgaaaataatttaaacaacgaaaagacttgaattaaatattgtgtcttaatatttaaaatactaggtaattatccgcactttgctgcaaaaattactaagcaattctcaatatattttttcgataatcaagttaggagttaaaaaaaaacagaaacatcgtggtttatcagtatttatcatgaaacaaacaaatgatacccaagctttaatctgaatcatattaataagtatatgttaaatattataaaaaaatgatagataaatttattaaaatattatgcaaatgacgcgaggggtgatgattagatatgctttcatgttgatttatagaattaaataaattatagatgatgttgtatacttgcatgaggttaaatatgtaattattgctagtgggtaatgatgtagtatggttgcatgttgagttttaaatttaatggactataactatatagaaagtatagattggtgtaaagttatatagtgactattttagatgatgaaatttattccggtatttgtttggaagaagctacatcgaattgttacaaagtttgcagttcaaaacgactacaaatcaaaaaatacagtatgatggaaaacaaagaactaactgaaacatcagcctaaaagcagagatgagaacccataactaaaaactctgtgctcctcagccacaaggtctcggatacgttatcgcccaagttctgaaattgaactgaagtcttgaagtcacagagaaagattcatcgagatccatgctagattccttaaaaaaatcaaaatccattctcgatcgaccagatgatcagatgatatgcacatctccgttagctccagaaaatgatgggctagatgatctatattcgaagcctcacccccttctaattatttgatattaggtacttccctaatattcgtatttttttaaccgaaatatggaagatgggtcaacttgaagggtcataaaataacttaattgtaaaatatgataatacgctacaccaaaaactgatgacaagtcctcgcaaaaaagaaaagaaaagaaagaaaactgatgacaagggaggctacaaacatcgagatcaccgtcgtctacttcagtaaccacatcagtgacatccacgactacgacgtcggagaagcaaaccgtcagctgccatccaaccaaatcagtactcctcgctaaaattctgtagaatggaggaaataaaatgagcaaggctacaaactctgaatatgttcaatgctacctgccatctgttcaacttccatggatatttacatacatacgattcatctgctcaaaatgtgattcatatccctcaaatacatgcaggcatgggatcgaacagttcacatgtacacagctacaaagcaagcgtgcaacgcaaatattatctatatatcatcttaattacatgaatagtacccaaactaacaaattgtataaattatagttagctcaatataagttctaaaaaccctaggctcaattgggcacgcataaaaatccatatagctattgagccattttaggtttgaccaagtttacataaaaacataagcaatattttcgacacaaaataaacatagtttcaaataaatatattaaatagtagttttagacaaactaatttgatgttgtaaatgttgctaaatttatctataaacttggtcagactgaaagaagtttgactagaaaaaagtcaaagttacttatgttatctttatctttacctattataaaaaaagtttaagatgtttttgtcagagatttttgtacgtcgtcgtgtccgattcactggtggagaaatgctctttactcctggtttagaaccctttatagtcccggttttctaaccgagactacgaatccgggactaaagatcgctatctttagtcccggttatttgaaccgggactaaagatcgatctttagtcccagttggtaacaccaaccgggagtaaagaggggaaatctttagttaccaaccgggactaaagagggcaagcgacagttcctcgagatccttttttttttattttgttgttgatttgcttaatggctagggttaatccacgtattttctcccgaatcgaataggatgcacatccccaaatcaacatcccaaatattaagttacttatacacacgaatcaaatacatcacaaatcctacacatagatcaaatacatcacaaatcctaaaaaactaaacacaaattaaatacatcacagattatacaaattatacatatcagatccatacgatgcaatgaatcataaaatctaaaaaattatacatccagtgaaacacaaattatataaaaaacaaacaaacgagccggcgccaggccgccgcacgcagccgcccgcctgcccgccgccgcctcccccttcatggccacgccgccgccggccggctgatagaagacggagtaaaggggaggaggaggaaggagaggggaggagaagaggaaggggaggaggggaggaacacaggggatgggaggaggaagaggattagatctgagaagaggaagagaggggatgctctaatcttatctaaatatctgtctgggacttaaccgat

SEQ ID NO: 14940 - DNA, 7062 bp, Oryza sativa
  unsure (1)..(7062): unsure at all n locations
ataatatattttaacattcttttaataaagaataaataaatttcccgcgcatctgcgcgggcttcctccttagttcataaaaagggaaaaaaagacatgcatgtctatatagatgtatagtctttctctaatgtacgatgtgtctctcgttaagactaaatagagaggcctcaccgtttatattttaccttataaaaaccaataattataaaaaaaaaaacctaaacgacacgtacttttaaaccgaaggaatgtagtatcaaaatataagatctttattaattttatacgcaacttacattatttccctttattttaacttgggacaactcttaagcctgcacacacacacacatacatatatatatatatatatacatatatatatatatatatatatatatatatatatatatatatatacatatatatatatatatatatatatagtaaatttgtttggtgctccatggtgcccgggcaccatgattgaaatttactatatacccaattcaaatgagtatgaaactttttcaaatatttaggtattaacgttaactactttactaactagttcaaagcaagtttgaactgaattcaaacttgcttttgttagattttgattctaggtatatagcatccaaacatataattagttaggtatgtaataatggattgtgaaataaagttaaatttgagttgttttgttgctaggtataggtatgaatcgaatacttataactaggtatatactcacaatttgaaaattttgaaaaatttggacgaatttgtgtatttcataccatggtgcccgggcaccatggtgccccatatgagtgtcctatatatatatatatatataagtctactgcttcaattaagcaggaagcagtactttaagttcaagttcaaactcgattggcaaccaatggcgctaatttaaattaggccgcaattagcgccattggagtacttcaagttgaagttcaaattaagcaggaagcagtacttcaagtactccgtaattaggccgcaatggacttcttgccttcgtcgtcgacatggccgccgccggtggcacgcagcacgatcgtctcaatggtgagccccggcccgagcccaaccatagctccccactcgcagtactcgtccgactcctcctcttcttccccaccatcccgccggcaccggcgtcgcagctcatcgaggacgaagatgatcgccgcgcagctcatgttgccgtactcgctcagcacccgccggctcgccgccagcttcccgggctccagccggagagccgcctcgtaggcgtccaagatcgcgcgcccgcccgggtgcatcgcccagaagaggtggttccacccgccggcgccggcgccgaggccgagcggcgtcagcgcgtcgagcaggcaccgctcgacgccgccgcgcaccagcgccgccacctcgccggagatcctgcagtcgaggccgcgctcgcccagcagcagggagactccctcctcggtccccggaatggtcgcctgcgacgccgacaccacgtggaagatcgggtgttcgacgggggtcgtcgggtccgcgcccacgacggcggcgccggcgccgtcgccgaacagtgccatggcgacgagcgcgtcgaggcgcgcctcgtagggggccgcgaacagcgggagcgtcacctccgcgcacgccacgagcacgcgcgcgccgcggttgttctcggcgatgtccttggcgaggcggagcgcggtgcagccggcgttgcagccgtgcatgtagaggacggcgcgctgcacggtggcgcggaggccgaggagcgccgcgagccgcgcgtcggcgccgggcgcgtgggcgccggcgttggtggagacgacgaggtgggtgacgtccgcggcggggcggccccactcggcgatcgccctcgccgcggcggccatggccagctccggcacggcgtccttggcgatgccgaggcgcgcgtcgagggaaggaagagcgcggttgatgaactcagggtggccggcgatcgtctcctcggagtggtagaaatggcgtttcttgatggctgatttgtcacctggaaatgaagcaaattaaatcacggtttcaacgtcagcagaaacatcctctatttttcaagtttagaataattaaaactcaattaatcacacgttattacaacctcattttacgtaaaacacttaaatcttcatgttcatcttcaggacattcaaacaccaccttaatcatctttgcaaattactcaagataaaaaaaactagagcatctcacgaatattacacacatacatataaattttcaacacaaatttagtcagattagatatgtatctttgctttctgtctcttagagtatgtattagcagatacattcacgaatgatatgagtatggtattacatgtgtagtgttatgtgtgcctatgcgtctaccgtgtaatcgaaaagaaaacaaaaagactgtgtgcactagtttggtaatccctctgttttaggttacaatacattttaacttttgtcaaattcaaactactctaaatttaactaattttgtacaaaaaaatgtactaatatttttaacccaagacaaatatattatgaaaatttattcaattatagatttaatgaaactatactatttatactattttttttatagagttagtcgaagttagagtaatttaattttgactaaaaatcaaaacgttttatagcctaaaacgtaggtagtaataaataagggtaagaaaaatagcaatataagaagagatataagagataatcttacacatcctcttcatcttggctttaaggtcggggaggtggtcgctctgggtgacccggaagtaccagtcgacgaactcctcctgcgccaccacgcacttcgccgggttcgccgtgccgatggcgagcacggcggcgtgctgctgtcgcgccgccatggcgcagccgcggtcgatcgcagagagatcgattatatgcactgtgtggactgtcgagtgatgtgcaattgcttgctcctctgcactgtaagatgcacacagatgatcaggggctatatatagcttacaccaatgcgcgtgcgtgcgtgcgtgcgagattttgctgatgcacatgccaatggtgatcatcgatcgatcatcacacggtcacatggtattacacatgttaacatgtgaaaggagtggaattagagtcatgttaagcaatatatgcgttgtactgtgtaatttttttttataaaaagcaatgtatacgtgttcagacacgaggagcgatattagtgacggagctaggatttagacgtggaaggagactaatccagttttacttagttcaattacgtaattagtttaactaggaagatagctcgcgcgaatgcgcgggcatgtgtcgtagactatgttgaacatctacaatatatgatttctccataaattattttcattagcattgcttttataatgttctaacctagctattagttatctttataacataccatatttaattaatccctacaagcaattatttataatattcttcatcatctaaaaagtaggtactcatattttgtgttagaaaacatgtatagcaaatagcaaattaagtgtaaattcaaaagtaagatttttttaattgagtataggttgtcattgtttattgacggatgaattgggtgggatatgtggctccactaaatgcatgggttaatatagcctaatattattgtttagtttgagaatccatatgtgaacgttccatgtagagtgtgtgtgagactccatgcaacctagcgtgaataatattggatgaagatatatagttgtgcaatatattattttggaagatgatgtattatgaatacacgcttgtcttttaatatgagatagatctaatggttggaaataataggttcatcggtttaaaaaggcctaggaggatttatggggtaacatgtggcgaccttatatgaaaaagaaaccatcatctaaaatcgattagatgatatataaaataaaattataagtgtagcttaaaattatggtctttttaatatttgtttatctctttagtttagtagctgaaaatagggaggagactggagagaaatgaatagcatagaactcgaatcagatatgagaaagggttcgcaatgcaatagtgttatgtgcatgtgattggagagggaggtggagggtacattgttttttttaatctttgtaaataatctaagtgagaacctatgatttgttgttttctcattctaaggatatttaagacatgacatgtggtggcttaagtttttttataaagagaaaggtattctaatagttaaaaataatgtgtcatcaaattaagtggatagatatatatactttattttttctttgaatttcaattttttcaaagttttaaaatatcatacgtggtgactgtggtgacttaagagtactatagagcatgtttaatcgatctttactatgtaaaacgattcaagaatatataagatgcgttgtcatgtttttcaatgtttcgttgttatttggtaatgagattttatttttattgaggtagatttaatgcgttcatctgtttgaattatttatgtctttaaatccaattgttaaaattataactccacttatttaaataaaaattgatcaaattatgagtccgccaatttaattgaaaattgatggttagatttgttttcttcataatttttttttataattaaaattgttatttataaaataggaaggtgagagaaagaattattggagacggagaaagtgtatgtatgtatacttacgtgcgtagggtggtgtgaagggtgggctagtggggagaggatagttgtgccggtgggagagaggcgatggatgtggattgtgatttttttaaggaaaaaaagataaatataatagttgaaaaatagatggtttaccaatttattataataccatgtggcggtttggtagtgtttataggcgtaccacgtggaagtataggagtgtttgtattttttttagtttatattttttttatttttaaatggtaattaggatgacatgccctagaaattattcttttccgtagaagtttaccacggttgaatcattaagttttttaaagacaccatggatctaaatttagatgtgtttgcaaatttgatgattatttagggtgcttgttgtttagccagtaaaaagataaatcgtctagtagagcttagcaggatgaaaacacgtgcacacccttatttgtagcagacctcatgctaattgcattgataatccctagcaagaataggttagcctatttggataaccaaattaaagcaagcagcacacacgttgaaaacctattcaatgttttgatttatctgcatcgttgtggtttattatataacttagaaacaattatgatcacttaagtttttttagatggggttgctaggtactccctcattccctaaatatttgacgccgttgacttttttaaatatattagaccgttcgtcttattcaaaaacttacttttgtgaaatgtgtaaaactatatgtatacatatataaaagtatatttaacaataaatcaaatgataggaaaagaattaataattacttaaattttttgaataagacgaacggtcaaacatttttaaaaaagtcaacggtgtcaaatattttagaatgtagggagtataaaataggagagggaggaggagtatgtatatatagaggggagatttcttttattggaaacagatccttgagatatatctaatggttagaaataatagattcaccagtttataagttataacggatggtgatttttttttctcataattttaagattttctctaatttattagagtgtcacataacggtttagaagagtatgtaggatgtcacatggtgacttgagtgtgtttataggaagtttaatggacttgtgcgtagaatacnnaactcaaaataacattatatttttataactattggctgaaatattaatttggtttttgtctcatgagagtgaaaaaaagaaaaaagaaaagaagggaaggggggacacgtgctccctccatacccacaaaacaagtcgttctgggctcttacccgttttcacaaaacaagtcgtcgttcctcagcggggtttagtttggacgcgtatgcccctgacgcgagagccgagcaacgagcggcgaggcaagaaacgaggcgacgtgattaatgccgccttaagctgaatggacgtgattaatggcgctcgatctttcctcttcgtctcccgcatgcagcacacgctcgtcgcttgccgctcgcacacgcgcgtctctcttcctcgccgcccggctgtagttagggttcagagcttggtcgcgccatggagtacgtcgagtcgctgaagtccgtcgaggtgctggactccgtcgacgccctggacatcgtcaacgcactggactccgtcgaggggctagaatcggagatggcgttggactccgtcgaggtgccggactccgtcgaggtggtgccggagtccgtcaaggtggcgccggacttcgtcaaggtggcgccggactccgtcgaggtggtgcagtgtcctcgctgcggcacattccacgctggcggcgtcttcggagaagcatgcttccaagctcgccgccgtgctcgcaggtgtgcccgttgtggccttttacatgaagactacgacctcatagcaaggtttttgcataacatggaaaagtttgattgtgagttatacattcctgatgtggagaaacttaaaatggatggtgaaaccatacttcttcctaagcatgttatcaaaaagttggacgagatctacagtatgaaggagttggaagatgcaaagatgaagcaagaacagtaagttacatgtctcattcagtcgacctaacatgcaagcaaaaactaatttgctactaatattcttgctttggctagcgtgttgcaaagactaacatgcttgtatcatctaatattctacttctaatttgctgcagggaga

SEQ ID NO: 14941 - DNA, 17191 bp, Oryza sativa
cagtttgttaatttccttggacggaatgctcatttgtccaagctatgaacctcaagtcaatttgagttatgatcctcaagtcaatttgagttgtgcaatgcctccaattcactcatgaattatgataaaagtaattaggtccacctgtaccagtaaagcacctgttctagtgactatacgatcagaagaacaagctaagcaaacaaacccagtgtacttaaacttaatagcgcattcgaatttagcagaaaacaagggtcagatttttgtcatgggtatgcccacatgtcatagtatagttgagtcaaataaaaaacttgttcacaataatataattaatcattcctaattgcagcgcttcatttttactcattcctaattgaaccaggaagtaaagacacaggatctcaattctctacatacaaatcacaaaaatatgccttgaactgaactaagtttactcattctagttttcaacttttcaattaatctcactctctgataagagaaaaaccaaaccagagagagagatcctagaaatactcactgaatataccagccgtcagccgtggacatggacagatgagtgaacgacgcttggagctggacctttggtcggcattctggcgcaaccattgctagtgcagtgctcctggtcgccgactcgctggccgccgtgacggcgtgcagctcctgtgccgaggcgttgacgggtcgctggcccactgccttgcacccctgccccgcgcagacacgcccccgcaagtcgccggccaccgctggtcatcatcgtcgtcgtcgtcgctgctgctgttgtcgtcgtcgtcgttgcagccactatcgccatagccgctgccgccgtagacgctcgctcccgcctgcctaagcccgccgccaccgctccggagggtggaggcgagcggatccgcgtgctgccggtgctcccgctcacaccaggccgctcccgaggacggaggccgctggattcatgcgacgtcgtcgctcccgaggacgggaggcgacggatccacgcgccactgtccttccctggctatgcggcgaggcggggaagggcgaagaggtggctgggggcggagatggaggctccgcggtggatggaggaggagagggatggtggcggtgagggagtggatggtggcagcggtggcatatggatttagtttgggctagggtttggggaacatgttatatggataagaagcaattcaatgcgaatttaccaaactgtccctggtgtgtacacagtagttacgaaattgtatggacaaaatggacatttcaccttaaatttagagaactttaaatttcattttaggctgatttttgtgtttcaaatgcaaaagtcctaaacaacaaaattgcagaactcatcgagatctacaacttttatattggtcttttttaaaaataagttcatttgaacaattcaaattttgaattttcaaaatttgataacttcaaacaaaaattggggttaataaatgattttaattggaaaagtcaccaaaaccaaagttgtagaactcatcgaggtgcaaaatttttattttggtcatttctccatctgactctatttgaataatttgaaatttaaaattcaaagtttgagaacttaaaatagaattttttattagtgaatgacttccactgaaaaagtcatcaacaacaaaattgtataatccatctagatatagaatttttattttggtcatttattcatccaacaaagtgatactaacattgttcaaaaattttacgtatctcccatatggtttcataaattataagagagatgtgtaaattttatgaacaatgttagtatcactttgtcggatgaagaaatgaccaaaataaaagttatagataatgctgagttatacaactttgttgttgatgactttttcagttgaaattatttaatatttgaaaatgttagttgaagttgtcataatttgaaattcaaattcaaattattgaaacaaagtcatatagcaaaatgagcaaaaccaaagttgtagatcttgataagttatacaacttttttgttgatgactttttcagttgaaatcatttagtatttgaaaatgttgtttgaagttgtcataatttgaaattcaaattcaaattattgaaacaaagtcatatagcaaaatgatcaaaacaaaagttgtacatcttgataatttatacaacttttttgttgacaactttttcatttaaaatcatttactactcgaaaaattatttgaattgagaggaaggaggcaaaatggacttctcggcgagtgaggaacaaaagagctgggccggcggcccgaagagggaggaggggaaggggaaaccggcccatggagggagagagaggctacgggctgagggagggagagagtaatacttgggccgaaaatggtccaaggacatagagagggattttaatttgttttctatttatattaataggataaatgtattaaaattagttattgagctccgaaattcatgaaaaatttcagagaataatttagaccacgtagaatattaaaaaaatattcccggacgtgatttttaaaggaaaattttagtttcctcattaattcacttgattaaattgctttaacttttaatatatttttctcgaaatgcattatataaatctgtgacgtttgctttttgcccttcagaacaaattaatattctacacaatgtcccattgaaatactttatgacgatttttagttggtattaacgacgaatacttttttttccgtcactaagccaccccatctcatactaatcgccatatttctgattttttttcattcataaaatgagactagagatgacttcaatccaaaaatcctaatatgagagactagaattgatgtagacaagaagagttaacctaggacaaacgatttgtggtctagtagcaatgtagtataataagattttttttgttttaaaaaaaattataatagttctatattttatgacgatccactattgtcatcgtgctatcgtcacagagcccatgcagagtatactgtgacgatgattatgacagatacactgtttggtcataaacattcgtcatactgtgaacggtcgtcataaactgcctctgtttatgacagatatgtgttctatcatcaggtaatcgtcacagaagcccagatttgttgtagcgacttaagtagcatcttaaagatctgagttcaaatttttataggagcgaatttcagattggattatttcaagtgctaagttttcaatttaaaaggctgctatatccgattggacatagaggtcgggtaaaaaaaacctcttaaaaaaagtaaaattagcttacaaattgatgcacaaatgtagtcggtcagtatatttatgcacattgatgcagaaactgaagccacgaaaacatattgtttctttgaaaatggaaaaatatttctatttctacgttttgctaggtcattcgcggcaacagaacaaattcgtcttacaatttgtttctatctgcatatcatacaatattccagcagtagcacgcagagcttcatcaagtaaataaataaatttagtaactttgatttggactgtcatttccaaaaatgccagtcaccttaattttcatccttttgatggcaatcaaatggttctcatcactctcctattattcatttaaataaagaaccatcttccttagacgaaaggtactaaactacaaagttacatgaaataaaattataattcataaaatttacaaaatttcattcaagatttttatttaatttgcatgtaattttcttcttcatttataaagtatagatatggagaaaaaatataaaaggggatcgttttatcctctctaaaatctttgcaaatttgccatgcctttgccagccgaatctgctgctcgacaaccgcggggacgaagccgcatgcggccgccgtgcagccgcggcgtgcggcgatgctcgtcatcggcaccgcgaacccgcccaactccctgtcgcaggaggagtacaccgactggtacttctgcgtcaccaacagcgaccacctcaccaacctcaaagacaagatgaagaaaatatgtgaatttctaattactaagtactcggtgcgttgcaacgggttcatatagggatgggctgcataggcctagctaactgctctggcatctaatataaccgttttgttttaaccagattttgtttttaaccaaccctttgattttttttcttgattaatttaaatttgagtttttcccaaaaaaaaataatttgagtttatggaattttgctttgaattttttgttatactagtactatacccgtgtattacaccggaataattaactattcgccacttttacgagtgatgataaattatttgtcactgcattcacatgtcataatcacatgagggccacatgtcatagagagcgagtggcaaattcttaattgccacatcttaaaaatgacaaatagttaaatgtccgtattacacccatagacaatgatgtaaggatgtgcgacatatatacaaccatagacaatgatggaatttaaccggttatttttttaaccatttttttcttgttttgtttttaaccaaccctttgattttttttccacggttttctccagaatgggtggttatgcacgtaacatgagggggaggcaggaggacaactatggttttggttttataataactaggaaggaagcccgcgcaaatgcgcgggcaacttatttataaaagattggtaaaagaagtcatacttcaccatattaattataagaaacgcttatttattatttataaaaataatgctaaagaaatcctatctcaccatattaattaattataaggaccatagatcaccttataattatataaaaataaatgtctagacacaacaaaaagatcatctctacttcataccaaattgttcatgtctcacttgtgtttaaatatatgcataaatattttgaaatattactcctaccatttcatgggataaaaccattaaatttgatctaaatgcccctctaatgggtgaagccgactgtagccaccaaggctttcttctcttatgctttgaaacatgtgtccagtatcgatatagttgttctcctcgagatcagtgtggagcacaattttaatacctaattcactatcagctaaagaatcacatcggtaagtaagccatttgaactttattgcgaatagtagcctctcactggggtcacctcaacatagtcatatgcatacccccgccatacgtatagtagcatagcaaactatattatcaatgcttggtgcccttcagggaatgacacatagatgagatgaaagtgatacattttttttaaggttttgagtccatttatggaatagagttgacacttgtttatggtgttaattggtctactaaattttagtggtacagatataattttctcttctgaaaataagcagagttgatcattcgatactacttcaaataatctaatagcttcagtggtgagaaacacgtggaaaaatatttgcttgagtagtaataattcatgaacatatgaggtaatatgagttttgatatttttcttttctttgtattattgatctaattcatcttcgtggggtaatatatgatggaacaatatatgttatcaagtttatttgtgctaattgttaatgctatgtataataatgtgaaaagtgatagaatgtggttccatgtaatattttttattcaaaagatagttaacatatttataaattttctatagaaaaagtgggttgtaaatgaatataatatccactatcagttattaaaaagcatggagtaattgttgagattatttggataagaaagatataaaaattggctagaatattgtttcgtatgataactttttaatcagaatttgctatatatatgtcacaaattttactttgggtcatattttattatgaatgttttattttagactaccctttaaccaatattttcattttggattgggtaagcatatcaacgatctcggatacgtcggctcctaataataaattaactgtcacaaatataagatataagatataagatatagcctagtcaacaatgaccctaggaaataaactggagagatcgaaaggagccacagcagagggtagactgatcatgtataaactttctaatttaagggttagaaggacatggttaatatatttttttatgtacgtacatatgcatgtttttttttttgcaaataatagtctcctgtacatgcatataaacatacgtatgttttctccgggagaatagtatatatttatttttctctcttgcaaatacgtatgagattaggagagagaaattaattactttagtacgatctaatctaatgattgaaaataatagttcacctgtatatgcgtaaatcaatggttcaatgtttaacttttatttttttcagaatattttggatttgtattgatcttaagttatcagttactcccaatctaaattaaattgtgaccatttaactcaccatgtttatgttgaattgcttgctataaaatagaccaatagggtgttgagagaaaaggagatatatgtgggctgcacgtacgtatctgaagattttagatttttttttttgacacggtacgatgacagggtatgtacaaagggggagagagggttatgtgtgggaggagggatgtggatgtggaaagattttttttttaataatctgacggcttgaaataatgggtccaccaatttaagtgaaaacggatggacagatgtttcacttttttcttagaatttctaggaatttctctaatttattagaacgccatattgcgacttaggagcgtttataggagaccacgtggtggcttgagagcgtttataggaagtttaatgaacttttagtatataatagatagatagagaagagaaaaaaaattgctttcagatttcgaaatgtttgcatgaaacttgacagaactgttgcgcaagaattttgtggaagagaaattttacaatcctcgataatgcacctaaattttacacttaaatttatggtaccttaatatatccagtatctaataaagataccatggtaaattatcctttgtaaaacattatcaggtcacaggagtggcatcaagaagcggcacttccaccacaccgatgacacgttccgcgaccacccagagctcgccgtgcgcgaccagccgtcgctcgagacgcgccaggacatactagcgaccgtcgtgccagagctcgccgcggaggccgcggcgagtgcgatcaccgagtggggccgcccggcgagtgacgtcacccacctactccggcatgcgcatgcccggaggtgacctccggcttgcgtccctcctcggcctccgccgttcagtgcagcgcacgtcgatgtacttccacgggtgctccgcagccgccgccgtgctccgcgtcgcaaaggacctcgccgagaacaaccccggcgcgcgcgtgctcgtcgtcagcgccgagctcagcctcaccctgttccgcgcgccccaggaggggcatgtcgacacgatcgtcgggcaggcgctgttcggcgatggcgcgggcgccgtcatcgtcggcgctggcggggatgagcgccaggtgttctagatggtgtccgccgcgcagacggtgctgcccgaaagcgagggcggcgccgaagggcagctcaacgcgtccggcttggtgttccgcccttcgttcgagctcccggcgatggtgcgcgacaacatcgagcagtgcttggccgagggagtcggcaagcatgtcgcccatggcggctggaacgacctcttctgggcggtgcaccccggcgggaggaagatcctggacgtcgtggaggaccggctcgcgctggcgccggggaagctggatgcatcccggcatgtcctgagcgagtacgggaacatgtctggcgcgtcgattatcttcgtcctcgacgagctccgacgacggggcgacatgccgtcgggagggctaggcgtgatgctggggatcgggccggggatctccatcgagacgatgttactgcgtgtggcggcagcttgaagggagctcaaggagggaataattaactatttgccactcttacaagtggtgataaaagatttgccactggacccaataaaaaatttgtcactggattcacatgttgtagacaacgagttgcaaataattaattgacacatcttaagagtggcaaaaagttaaatgaactaaatgtattttttgaatttgagtaaattcgttttttatttttatttttgcgagagagtaaattcgtaaattggttttagagcttgaagaccaaaaaagctcatacaaaatcgtacaaacgagaggatacatttttgaaacatgaggtctaataaaatatttgagaactttgaaatacatgtatatactagatgatacaccgcacgtttgatgcggaacgttgtctataaatatacgtgagacagggaactaagcaactgtgaactgaaaaaaacttaggagggaatataaagatgttcagcaagtgcttatcaggttttatttgctgaaacatgcggatcaccgatatatttctaaaattgttaacttaagtctcgatccgtacagcagctagagataacttggtcagtgtagcaataacgtactgggctgtagcaagctggtgtctagaggatgttacattgctaaatgccctagaaacaggcacaaattaatagctgcaaactgtaaaaaatagggaacataaactttttatatatcgaacaaagagcaaatcatatatgtttgattttttttagcaaaaggaagcgactttcaacgaatgaaaccattagtccattacgaaacattgattttacctcaatatgtactgctgcacacttttttttccaggagaacagatgaaattatccctgcaaagtttctaatcaaacaatcaaacggtggaaaatattttaggtgacgtaaaacaaccacagcaaagcaaaatagtaataactacataaagtggatcaattatataggtttaacagataagtatataggattcacaacctaattaaatagggaagatgtctatgtctattttactgaatacgacttgagaaaaaggagattaatagacgtatattgtgcgaactggaaaagaagagcaaaatgacactacctatgattcttctatgaactgaaccatacatacggagaggaaattataatttgcaagattggaggttatgaaagatgaggtgctgggatctgggaggtgcagaggagcaaagtggagtttcgatgctagcaaaaagtacaccgaaggtccctcaacttgtcaccgaattaaaaaacgaccccaaccgcaacaccagatatccggagtctcttaactaatcaaaaccagtcacaataggtcctttggtggttttgaccctgattttaacctacgtgacagcttagtcagcatgagacccacataaaccctacatgtcagcgtggtcgtgaaagtctccccctctttcccctcctctctattctcctctctctctcactcttctcttctcttctttgggcaagccggccggcggctggggagcaggccaccgggcgaggcggcggcggtggccggccgcgaatggcgtcggcgacgctgcgtcgccgccatcggcgaagcgccccgcgcgggtgggcaccgcggcgttgggcgcggaggcagatgcgaggctgtctcgcgtcgtcaaagtccccgtctcgagtggcgaggaaagcgaggacgaggttgccatcgatcgccgcggggtcatcgccctccgcctcagcggcggcgagggcgcgctcggcggtggtgtgcgcctctcggagtcgctcgccgctcggaaccggcttcattgacaacccgctcagcaccggcttcagcgctgcgccgtccctcgccgccatccccactaaccagtctgtcggccgagcgtcgtagtgcaggcggcggcgagaaggcaggcagcggggagggatgggacagctatcgttgcacaatgtttttcaggtgttggatctgctggaagacgcatgcgagtcattacttgacagcatcgtggcagagaatgcaagcgtttctgcttgatctgaatgaagctatatggaggcaatgtaagcatcattttttccatgtaaccatgttcggtatctatctatgccatttgattgcgattcagataaccagaaaacactcacataagcatgtatgtacccatgttcaattgttcatacaatgtcaggctggagacatacttatatctttcatgtacaccatgatttacactgtaataaaatcaccaactcgaattacagaagctgaactgttttgttagtaacacattgcacatgtaggaagaagccacctctcgccaaggagcagctcgcgagctcggcgtcggcgacgacggcgaggtagtagtcgccggtgggctcaggggacgacgaatccgacgcgtacgtggcctcggcggtgtcctagtggacgcccacggccgtgtcggcggcggtggcgagggacctgctcccgcgcttcttgtgcagcacatggtaggcgcgcctcgacgacggcaagagcgcgtcgtcgaaggcgacggcaaggccggtggctccggcgcagcgctacgcgtccacgtgacccggatgaggagctccttcccggagtgcagcgaggcaccgtacaccgccgtggttgccgcctacagcgagcgatccagcgcgccgccgcggccagaccgccgcggcgatgccgaccgagctgttgccgaagcacgacagctcccgcatcgcctccagctttggtttttttttttccggcgagattagctgccgctttgctgttgctgctgcaataaaatggaatgcgctatgtggcacgatggtggcatcgccgcgctctcacacgccgcctctgctccgctccgccggccgccgctcagccccgctcgccgctgtccgttgctactcccccgcggcaaagagaatgaaacgaagaagagagaaaagaaaggggaaagacgtccgcgtcaccggccgccggacctcctctcccgccacgccccgtcagtctgctctagggctatcaacgagccgagctcgagcgagctcgtctgcctaggcttgagctcgataagctcgagccgagcctataaaatattcgagctttccgacaggctcggctcgtgctcgactatcgagctcgatttttaagtaaaacaatatatatttcaaatataatctttaaaaaataattaatttcaagtaaatcatattaatagaagagaaaaaaaataaaataaatatatgatgtcatataagatatacaaataacatatttgatctcctaatttattaaataacaacaaaagttatatattactgggctcgttggaagctcgagctcggctcgacaaaactcacgaacttacggagaggctcgggcttggctcgtctggagctcgagccgagcccgaatcgagcctaggacgagccaagctcgagcagctcgcgagccttgagcttttttgatagccctagtctgctccctactcgtcggttggcctgcgagagatagaaagaaaggaggaagggagggaagaggggaaagagagttgacgtggcacgctgacgtgtggggtccacgtgggttccacgctgactcagctgccacgtaggctaaaaccggagtcaaaatcactgaagaaactattgtgaccggttttgattagttaatggatcccggatatctagttttgcgtttgctgacgttttttaaactcgatgacaagttcagggaccttcgcccctttggtgtaatttttccttcgatgctacgtgcctatacatggttggcctggcccatggttcaccttaacaccaaagcaattttacggtgttatcttttcgcttacttatgcttattagacaaaatttaaatttttaactttaaatctggagttgattttaggattttttttttatgaaaatttatttttcagcctttgcttttagatcgttaagaacatgtaaataaaaatttgagtaaagtccatcactggtcccttaacttttaccgatgtgtcatcccggtctctaaactcgcaaatcgaccattcagatcctcaaacttgttcgattatatcatcccgatctctaaacttgtagatcactcgtttaggtcctccaacttgttcagttgtgtcaccccggtccctaaacaggacggtctaaaaactttatatcaaaaaataattcataactttttcatgtgaactctaatgaagataaactttatatcaaaattatagccctcgacgtgacctacaactttgtagttgaaaagtttttgaattaaaactgtttagggtcccaaaatattgttgcatgtttatagattttgtaattttaattttaaaattacattttgggacaaaattgacttaaaataaaaaaaattcaactacaaagttatagatcgcgtcgagggctacaagtttaatataaagtttgtcttcattagagttcacatgaaaaaattatgaattacttttaaatataaagtctttagaccgtcctatttgacccagatgatatttaaatccaagtttagggaccggagtgacacaactgaataagttggaggacctaaatgagtgatctgtaagtttagggaccgggatgacacagtcgaacctaaacggtcgatttgcgagtttagcgaccgggatgacacaacgatacaagtttaatgaccggtgatagattttactctaaaattttattcacagattatttttcgtttgtaaatatatcgttgatggaaaccttaatcctgccgtgtcgtggaatccgccgtagtggggatctaccatatagatatataggatttggtcgatcaaaccaaatcccttttttagtggaaaatatttggccgtgggccttctaggctctatcaggccggcgcattttacttgggccagataactgtatcgtggctgggctggatgttcacagaaaatctgggaccacattgaccgaacgatcagtaatatcgacttctttttttccccttttgcagtttttcagccgattaaggaatagcgagtctgtttgagagctatgcacagttagagacttattttagccttcagtttttttttaaacgaatcagtaagctgtcaatttcattaaatatagaagaagtaaactttaaaggtgagaaagaaaaaaatatcaaggctaaggaccttcggtacgagcaattaaaaagaaagccaactaccgagatctctcgtgccttccaagtaccatgatttggtattctgtttgattttagccagaaggctacctatgatcaatagctcttttcttgaaaggttctacggtttcttttattccagatttttcaggctaccaagagagttaatgtgcgcatggctttcttttctggagcaccttttgtatttgcgtcttttgtattttagccttcagttaagtcattcatgcagcgatatactagaggtatttccaattctccatgcatgcaagtttgataatgttgctgttcaaggatctatgttttttatgtttgtttaccgaccttcgtacacacaataaactacaaatagggcgaggtaagagtacctcaactagttagttttttatttaacctacccacaggatttaagttttggatttatcatgggtgctcatatttacaactagagtaaagcatacgggcggttagaggtgtgtcatctagttccctaaactctcaaaatgcatatccaagtctccctaaactctcaaaatgcatatccaagtcccaaaacttgtcatagtgtgtcatttaggtcccaaatcgtcacaatctcttcaggatcctacgtggtgttgatgtggcatgccacgcggacatgacatggcattaatttgactgacaaataggacccatttaattttttttcctttttctttttttccttctcttttccccctttattcttctttctctgtgacccgccacgcggacatgacatggcattaatttgactgacaaatgggacccatttaaattttttcctttttctttttttttccttctcttttcccctttattcttctttctctgtgacccgccacgcggacatgacatggcattaatttgattgacaaatgggacccatttaaattttttctttttctttttttccttctcttttcccctttattcttctttctctgtgacccgaggagaagaaaggaaaaaaagaagaatgagaagaaaacggaaaagaaaaggaaaaataaaagaagaagaaaaaataaaatgacacgtcacatccatgtggcatgtcacatcagcgccacgtaggatcctagaggggatgtgtcgatttaggacctagatgatacactttgacaagttctgggacccggatatgcattttgagagtttaaggacctatatgacacaaccctacaagactaaggaccgccaatgcactttactcttacaactaatatttgtttatgatgactttatcaacctcaagatttgatggcagagaagtttaaaaaataaatttaatatatatatagcaccgtattttgttctgaatggcattacaaattgaattacaatatcaacacaagtatcagtacatcttctggagtacttagcatcagaacaatctggtccatcaggagtatgacagattgttagctgaactcttctgaactaacatactgcctccggagtaacaaactgaattcttctagttctagagataagccatcaagaattttcatggcacatatgtactggaaacttccaagagaattggttagtgattatcaattcaagagaactgagtatagtaaacctcatgactgaatgtacttgtagttttgtctgttgtcattaagaactaaagaatgtactcctgttacatctctaccctatagttaaacaagtggttttactcattcatcatgtgacacatccaacgatcgaaaaaatctgatgagttgcatttgacggcatccgcgcctcctccacccgatcgcgcctctccctcacgcacctgccccattcccatccccacgcatcgccgcacacaccagcatccccattaggccattacgcatcgcgctgacgctgctccaccgctaccgccactagatccccgcacggcgccgacttccacatcatccgcggccgctgctgaccagcaccaccgctacgcatcgcgttgacgccgctccaccctctttcctttgcacgccttcctccccacatcgtcgtggctgcgcccccgtcctgtccgccgccgagttcgcccctcagggcagggcatagcaccctcgcccagatcggtgccgccactgacccaaaatatagatttcccgatcttcaaaaagaatgacggtgttgctcctactaacaatatctgagccatgtgaacaagattaattagaaggattaattagaaggagtattacagattaaataatgcgtttatattaaactatttttgggcttatatgttaatttcttgaatgcaaattaatatgtcgttttgctcttcgaaagaaaatagaacaacaaaaacatccggtgggatttttctatttatcactattgtactataaaatatcaccaaaacattagcacgggcaaattactagtgaatgtactcctgttacatgagaaatgattaaccaaattttgaatggtaaataagatcatgttcgtggaaatgatcagccaaattttgcgtatctaacactagaacggataccatcatctcaatcgggcggcaacccccatctcaatcgggcatggcgtccgtcataggctagaagtcattgatgtgaaaagttatctcaatcgggcaaacggccgtcacagatgaacctatatcaatcgggccataattaaagcccgtcaccgatagctttaacccagacgatcagtcaaactatagcccgtcacggatgactatctcaatcgggcctaaactacagcccgtcacagatgacccttatctgtgacggacattaactatagcctgtcacagatgagtcatctcaatcgggcctaagttaatgcccgtcacagatgagtataatcccaaaaaaaaaattatttttaggaatgccgtccaacctctcacgccagtcttttttgtccttactcgtgtgcacctgggatgagcttcccgattggtcacctatcccgaaattgctacaagccaagcacgcttaacatcaaatcaaagttctttggagatcggcatccgaaagagtagttgtaacttattgatgtgagtattctattaatcctattaagcccttggccaggatgtcacaccccaacatctctcattcatatacattcattcacatacacaatcatcaaaaatcctaaacaacaaaattgtataactcaccgagatctacaactattgtatcggtcctttctataaataagttcatttgaacaatttaaattttgaattttcaaaatttgacaacttcgaacaaaaattagggttaataaatgatttcaaatgaaaaagtcaccaaaaccaaagttgtagagctcattgagatgcaaaatttttattttggtctcttctccatctgactctatttaaacaatttgaaattcaaagtttgagaaattcaaatagaattttttgttagtgaacgactttaactgaaaaagtcatcaataacaaagttgtataactcatcaagatctataacttttatttttggtcatttttctatataacattttttgaaccgtttgaatttgaatttgaaaatatgacaacttcaaacaacattttcaaatactaaatgatttcaactgaaaaggttatcaacaacaaagttgaataactcatcaagatctaaaacttttattttggtcatttcttcatctataaaatgttagtaacattgttcacaaattttacatatatgttttatagtttataaaaccagataagagatatgtcaattttgtgaacaatgttactatcactttatcagatgaagggctgcaggaat

SEQ ID NO: 14942 - DNA, 522 bp, Oryza sativa
aaattacgatgtggtttgacaacaccaaaacgaaagctagcctgcttcgtgattatggtgaggcacataccattcacacactatagcctctgtaccgtttttctgtgattttcttttcctaacaagtttcacgcagcaaataaatctggagcggcctgctgcgagactactatggaccaagggctgccatctacttcaagtacttaatattgagcatggagaaaaaagaaccttttgctctggaggaatggaggagggaatggattagcctcacaaacaactggcagagcgattggaaggtctttccaaccacagctacgggagacgctctgaacatctcccggacactttacaagaagtacctgcacgacgctgacttaattcagccagaaggtattatacgactgcgaaatttgaagaatacaccttggtaaatgaactggggttgttgcagctgtaatgccttctttttcatgaacatgaaacgaaacagtgtcgtcgatactagtctatttctatttg

SEQ ID NO: 14943 - DNA, 2072 bp, Oryza sativa
  unsure (1)..(2072): unsure at all n locations
tatctttaagtcaaatccttaagtgcataatttctgcaacttttctggtgaaaaggagaacaacttgtgaacacgaacatggggtgtttctggctactacatcaataaattattgttcttccctatttcaagcatgcagcttttacttttctagtcatatgtttaacatcaaattccttggtggttaggcactgctgcattctgttccagttggccgaatgattgttcttgatctatatgcagaagtgaaaccaatatggatcaactctgatcagttttatggtgtcccttacatctggaaagttctccttctctctactgtttttttttctttcctttttttgtattagaggaattcatatgctacttttttttaatccaggtgcatgcttcataattttgctgcggactttgaaatgtacggtgttttggatatggttgcttctgggccgattgatgctcgactaagtgcgaactctacaatggtacaccattaacttaatcagctgtttcttctagtaagttagcatatagaattatgacatatgctagtctttttactaagttgtttttttttataaaaaaaattgaactacttgtgtttgaaggttggagttggcatgtctatggaaggtattgagcaaaatcctattgtttatgacctgatgtcggaaatggcctttcatcacagacaagtgnatctacaggtgaaattatacnaaccattttctggaagcatttaatctgcactatatgtgttctctctcttttttttaataatttgcatgtgctttatagcatcatctgatgtccttaagaaacagtatagattgctgtttggtatacattttggagttaactggtgtgtcaggttgtctggttatgctttgcagcaaatgagccatgctacttgttatgtggttttcttgtttttattgctttgaacttttctctctgagcttgataatgagtgtggctagttttggcttgatcagattttcattatttccaggtgtgggttgagacatatccaacaagaagatatgggaagtcaatggtggggctgcaagatgcttggaaaattttataccaaactctttataattgcacagatggtaaaaatgtaagctttgatattctccatgtgtcatatttaccgattgtaacgtgtatctattttcatccaacgatagacagacatatataggaatggcagtcatgtgaagtggaaaaactataaattactccctccatttcatattataaggctttctatgtctagattcattaacatctatataaatgtgggcaatgctagaaagtcttataatgtgaaacggaggaagtatcttttagtacaattaataatctaaaatttatctttattttgtagaagttacagcttattctgtgtaatccaatatattttgaatggaagcacatataaatttactcatagtcctatgattttcagaactttgattgttttcgtttctgatattttagcttttttcttttggctacaggacaaaaatagggatgtgatagtggcattcccagatgttgaaccttttgttattcaaacaccaggattgtatacaagtagtagcaaaacgtattcgacaaagttatctaagaattacattgcagtggatgcatccaatgatgaatatgaacatccacatctatggtatgacaccgatgctgttatacgtgccctagagctttttcttcgatatggagatgaagtatctgacagcaataccttcaggtgagagtgcaggttttctagttagtactaatgccagtgctttctgaatgactggattaaaaatattatatgaattttaagagaaagtcatatttttcagataatggaatgacaagccatatactcctccgaccctaaatatttgacgctgttgactttttaaaacatgtttgaccatttgtcttattcaaaaacatttgtaaaatatgtaaaactatatgtatacataaaagtatatttaacaatgaatcaaatgataggaaaagaattaataattacttaaattttttgaataatacga

SEQ ID NO: 14944 - DNA, 640 bp, Oryza sativa
atgagataggaaggggatgatgcgtttgattcagcttattgcctgagtcgcctcatttgttaatgctgcctctccgccgcctgcctcgcccgcctctccgccgccgaccgcgccatccgccgtcgtcccggcacagccgtacgtgcgcatgccgagagagagagaggaagaacgagagagagaagagagagaggaaaaggggaagaggagtatgataggtgggtcccatattttttaataaataaaatgctgactggattgccacgcgtacgccacgtatgtaaaaccgctctggattgggtcgaggggggtaatttgtccagtattgaaagtttacgggggtaatttagttgaccacgatagttcgagggggagtaattcgtactttttccttataaaaacgattttgatgtttcacttgcgacaaatttttgaacctctatctttcagtttttcggttgtaaaatcttacattaagattcatatttatgtatatccaacctacatctacactaagtaacattagattttacaacaactttttatctctcttttaaaaaaaaattaagacgggctatatctattggttaaaatttctgcaagatttaaaactataaatatgttgaaagatgaataggtg

SEQ ID NO: 14945 - DNA, 3389 bp, Oryza sativa
attcctgcagcccaaatgtggagctagaaggcctcgtcaaagcctaggactgaagttcgaagccaatgcatagatcaatgacaatatccttgcacgaagaggtttctccaaagcggtgcccccaaggaggatgcgacgtggatcaccgccaccgctcgttcggaaccgaagcaaggttttcacccggagaatatggtagggaaaagaaaggggtatgctaaacaacgcctataaggaggggaacgacgccaaacggcgtcgccgttgtcagtcggccaaatggctcggcaaggctttcgcccgcgattccctgtccaaacccacaccaccaatccgcatgacggattaattaggcttaataaattcgtctcgcgattttcaggtgagttatgaaattagttttttcattcgtgttcgaaaacttcttccgacatccggtcaaataaaatgtttgatgtgacatctaaattttttttcgcgaactaaaaaaaaggccctagtcactagtgtgggaggcgttgactggacttcgaagcatatgagatcaggataaaaacctttgctatatatattcctcatcagctgctgtaacggactgaatagaggaggctgctctactagcctagtagtagtactgtagtatagagataacttgcacgccgtctttagcgacgattggagcagtcgtgtttcagcttctggtgacgacgacgacactgtcagcagcagccccgaccccgatagccctgcctggttgcccggaaagctgcggcggcatacaagtgccgtaccctttcggcatcggcgacgggtgctcctaccatggcttcaacctcacatgcgacgacgaggcgcaccaccaccagacgccgcccaagctgttcatggccacagacaacggcaccgtcgtccaagtgctcaacatctccttgccggacggcactgtacgcgtccgcagcaagctttcgcagtcatctattgccggctcctcctcctcctcgtctaatgcctcgtcgtcacggtccgacctaccggccgacgggccgttcacggtgtcctccgcgtataactggctggttgccttcggctgcaacatcgtggccgaccttaccccgtacggcaatatcgccgacggcagcagctgcgccgccacatgtatagatggatggcaaaatttcgcaggcccctcgtgctccggcatcgcgcgctgccgtacgtccgttgggaggggtgtccactcgtacacgatccaggtcacgtctctgatagaccgaaattccatgggtgcctcgacatcgacgacatgggcagctgcgttcgtagctgagcagggctggttcagcgcgaatgagaatgccatgttgtacaacttcaccaattggctgccgttcacggtcgagagtgttccggtggtgctggaatggtggctggatttgatccgtgatggagccatactgccgttgtcagttgggcccaatactaccgactttagatgcctaagcttgcatagttcaagctattacaacgatctaaactacgaccgaagacggtgcaactgttcccaaggatacgaaggcaatccttacatccgtgatggatgccgaggtatttttttctttcctgctttattgtgtttgttgcagcgaaggctccaattttcatgtaaaagaaaagttatacatatggcccgttcttttctcatgaagttagagattttatctcgtttttcattagaggaattttacggtccttgaaaaaaataccttaaggtacctaaattttacactaaaatttttggtaccttgaagtacttagtacctagaggtatcaaattttacactagaaaaatatggtacctctagtaacttcttaaggatggtaaaattaaccttttcattagcacgttttttaaactactaaagacgcatttggtgcgaaaactttctatatagaagttgcttaaaaatcaaatatatctatttgttaaatttgtaataattaaacttaattaattatgcgctaatagctttctcgtttttcgtgcccatatttaatcttaatccacatcagattcaacaccaccatatatagtatcacttgatataattatatagaacatgtaattatatcatactatcagttgatagaagctacttacctcgtcccaaactatagcaacctaagatgaaatgagactcatcctatgataacgaatctggacatgatgcatccaatcatgaattgcattctttaattttcactcccatatatttgttccccttttcagatatcgatgagtgccagcagccagatgtttatccgtgtcatggaacatgcatcaatatgcctgggacgtaccgatgcttagcaaagaaaagtgtcaaaagcctcccaggtacaaatgcaattcctcgcaaaaaaagaaaagaaaaaagaagaagcaatcgatcacttgctcgattctattagcggagttttcgattttagaactgtatttgtagccttccaggtacaaatacagttcatttggatccattctatacattataaaccctatgttcctgacgtttattctctgcaggtttaataaccattatagcagttagtgctggttttgggctactgttttcacttcttggtgttgccaaaatcacaaataaaatcaaacaacgcagagccaagaagttgagacggaagtttttcaagaagaatcatggactgcttcttcaacaattaatatcttcaaacaaggatatagctgaaaggatgaagattttcagtttagaagaattagaccaggcaaccaacaaatttgatcaaaatcgcattcttgggggcggtggccatggcacagtctacaaaggtatattatctgaccaacgtgtggtggccatcaaaaagtcaaaaattgtggttcaaagggagattgatgatttcataaatgaggttgtcatactttcacaaactaaccataggaatgtggtgaagctatatggttgttgccttgagacagaagttcctttattagtttatgagtttatatcgaatggaactctttcatttcatcttcatggccaaatgagaatcctttgaagtggaaagatagattgagaatcgcactagaaactgcaagggctattgcatatcttcactcggcagcttctatatcagtgttacatagagatatcaaatctacaaatatactactcactgatactatgacggctaaagtatcggactttggagcttcaaggtcaatttcaattgacgagacaggaatactcaccatcatccagggcacttatggttatctagatcctgaatattattactctagtcgactgactgagaaaagcgatatttatagtttcggtgtcatcctagctgaa

SEQ ID NO: 14946 - DNA, 1282 bp, Oryza sativa
acaaatgaccatgaaagccatggtgctaatgtctcaggagagaatagttagtgtgtatgttttctaattttgtaataaatgttgaagagagcaggaaagataaatgagggtgtgcgcgcacaagagagagcctaattctccatgcatgccttatattttgaaatatgtttgcaaaaactatgggccttatatttctaaatagatagagtaatatttattttattgatgaatgatacaaagatgcgcctgtagtgaaatgagatgacctagaatatatgccgttatgaatctgaagtacaactgtttctgggaagaaaacaataatttgttgaatgattcaagattgatttaatcaacaattaaaagcactcagatgtgcaagacatgcagaatattgaatggaaatttattatggcatattgaaaatatcaccaaaagacaatgttggtgaatagcgatatactgtaaaacttatatgagcagatgtgctaggaattgagcagtaatacataaatccaaaactgcaagtataactttatatgattaacaatcatttcaatacaacaaaattcaaatcaagaacttttagttaggaaaccattctcaccagttcccaaggtgagtaactttagctgaaggaaattttgatcttagtgcggccgggatgttaccagaaaaggctggaagaactgcaatcatgtaagatattagacaacttaaaatgtaaaatgaacaggggtcagcgtttaacaactagaaagggcaaactgcatacttgtttatttaaattatctgattttagcagagaagttctgaaagaaatggcaggagagaaatccaaaccactatattttcatgagatcacataatattaactatgctaaataatctactgtaaaacatatgcatgcttatgtaatcacaataccacataaagaccatgcactaaaaaaatgcaactgttttgcatcacctgggaacatgccaaaagcatacatcctagaaaggattttcttctgaagagctagctgatcatcaagccagctttgaggaagaggtccgccccatctgataaatcaatttgtcactacatgttctttgagctacagttccttgcaacaaaaattgaactcatagcaaaacactaatatgaaacatcaatataagtcatattatcaacatggtggcttgtataaatctctcataaaaaagggacttataagttcatcttacaaccgataagctaactgtttccagcaactacccccttattcgggggggg

SEQ ID NO: 14947 - DNA, 580 bp, Oryza sativa
aaggatgttggacgagcatttggagtgcttcaagctcggtttggtatagtacgtgggccagcttcgtttttggaaagcacttatctgaatcagataatgagagcttgtataatcatcaataacatgattgtggaggacgagcgcgatggtgattttgatctagtttatgatgagatgcgagaacaggtgggtggttcccatgaacgtacgaccaactttgatgattttattagtcagtccggaatcattccagacaaggtagttcgcgaccgattaagggaagtcctcatcgaacatttgtggaatcgtcatgcagaccgatattaattttacattatatattcttatagataatgtcatagattgtaataattgcatattcacagcttgtttttaaattagtacatattgagtctatagtaattatttattgacaatgtgatttattgttgaattcgatacagtacaatagactgaaaaggacagcagtgcatatcctttttcaggactggatatatatacaggatatacaccacaagggtgtacatcagaatatgcactgctacatatgcaagccgat

SEQ ID NO: 14948 - DNA, 19536 bp, Oryza sativa
ctgggaaatgtaaaagataattgtattaggggagagcaagtgagcgaaacattcaacaaatgaaaaccatcaacagacctacggctatcgcattcctcatcaggagactccaaagcaagagtagaatcccaaaacctctgcattactgtacttgccacatcatttacagtgtcatttcctccttcaacctacaaattgagaatgcattcagaagcttagcatgggaatctaccgcagagtggaagaactatcagaaattaaggagtttgggataagggaccaccaattgaatggctgcgtgggtaagttgcaggacatccaagcaagcagcaatttgtccttctgttgaggaaaatgtaagacaagcatcaaataataaagtcccagaagatgctttgttattgtccttttgggacgcagagacatgaataaggctctacctcgatcaagaacaggaatatgcaagaactttccatcatgcattatatgtagagcatcaagaattgtcgtgtctaatgtagcaaaatctgggtttacagtcatcaccttcaaaaataattgaaagtaacacagtgagttcatatgcaattaaacaaagctcagatggcatcggaagaggcaagaaaatgtaaatctggtggagaaaccttttctactagggtcaattcaggagaaagattctgtgcaacaacacgcataagcaaatcctttgagctgcatttggatgcatcagtaaagtagaagaaaaataaggaagttgtaaataatagtagaagtactaaaatagattgctcacgtgaagatcccctgtagtgtgtttcctgtagcaacaaccaccgaattaactcgaaattcacgcattttctgtgttgctacatacactgggtctgaaggagaaacaattgctaccctgaaaattaacagaaaatagtcagagaaaactctcactattcattcttttttgctaaaagttaacagaaaatagtaagagaaagcagttactgtactttgtgccctccgtgacaatggttgacaaagaaggtttgaacatcctctctcttagagtttctatgaaagcataaggagctgtatccacaaacagagaataccttaaattgatcattaccaaatataattatgataaacaaacacatataatagtctagtagaatatgatatacctgataagttgttcgacatattttatttaaaagatgtatatagcaacatgaaaagtgataatccataaaatgtaccataaatagtacatgttatgcacggtgtactttcagtttcaagagtgagaaagagtgaagtaattgataataatatccagtgcagtacctgaaaagtgcctcctaattgacgctctacccttctacagcagctgctattgcactcccttgttctgctgccttttccagtcttgatattgcatcgtaaaggcatttagcaatgtccagcatagcaataacctcaccattttccacaactgggaggtgtctaaatttacctaaaatatgtatgaacattttaaagaaactacagtcagtatgtttgtgaaaaagggactagtttctagccaaccaaggtctatgtgtaacaaagtgaaacaaccagcctacatatatgccactgaagttcagggcataccaaagaaatcttagacgtctgacgatacaaatcaaggaatcttcaatttcttttgctggagatattgagattccaagacagctaagatgcctaacattaccaaaaaatgtgcttttgcctttcattgcacacacagaaaaaggggcagattgagctgatctgatggtgacatacaaaaacagtatgcgtaacaaaatacaacaagaaaacatcatatttttcatctaagatagtacttgaaagttgaaagcatgatcatgcaaagagaatactaagttggcctccaacatcagggcttttttagttttcctctctctgtcagcctttcgagggcttacccatcatgtaatttctggatattgcttttttgttctctccctgctataaattaatgggacaaaactcctgcaccctttttcgaaaaacaaaaaaaaaaggagaacaagcaatacacagcaaacaagtactccattcttttaatgctctactaggtgcagtataccttcatttagtactgtgaattatccccgtttcacaaagctctaacaaaattgacatgtgccgattctcaattaggtgctcccaatttgtttaaccgagtactttatgttaagtactacaatttagtgaatcattggcgaaagaattatgcatcatgatagcgaaaatgacttgaagtggcactagtcactacagctaaaataataatagaaatgactggctaatctgctacaatctcaatcatatgaaagaacattttataagatgacaggggaattgaatttagccagctcaatttcactgttacattgtccctatagatgttttagccaagaaagtgtaaaaaaaatggagtgcgtctgacataccttgaaccatcttctgcaatgcttcaatggcaagcgtatcagacatggcatatgtggggttccttgtcatgatcttggacatgatggtttgctccacccgcagcccctcagcaaccacccttgtagctacatcctgcgattggaatcccgaaaaagaatgaaaacaagaaccatcttcatctcgaatcgtagtactaaaattagaccaagtgcaaagcatgttggctttttggttcacagcagagtaaaaagcataaattgaactccatggcttagtggaaatcgacttcactttaccttaactaattctaccttttttgccaaaaccgaatgaaaaagaaaaggcagaggaaaagtatgcatcaataagtataaatgtataattgcagagactagtgaacacatggtcaacaaaaatgactcctaattttttggatgaaaacatccaaaatctaaaggagaacaaaatatcttaaactttgacacccacaaaaagccacttgctatgctccaaactgagaatccaatccaggcatcgatgtttttcaaaagagcaacgagaaggtgtcgcatccgcatagcatcaaattgaaagaatcaaaccatcttctatcttccaaaatcagcatctataaaagcacactagaaattccaaatttccaacagattgggagggggcaagcaaagaaaatcctgtaccttatcagtgacgatgccggagaggaggccctgcgcgtcggtgagcagcacggcgtcgaccctcctcgccgccatcctcctgcacgcctccgacaccgtcgtcccctccggtatcgtcagcgccttggacagcctcagcttcctcaccgtcctctccccgcttcaaccaacagaagaaacccccaaaatcattcagcggctacgaaccaaaggagagaaggaacggaaggaagggttcgcaggctcggtgtgcttacgtcagctggccgggggaggtgggcttggaggaggccttcccgttcccgttggcggcggcggcggaggggtcgtcggacttgcgggaggacgccgacggcgggcggctccgcgtccggcggctcggcggcgccgtcgccgaggccgtgctcatggtggcgctcgtcgcggggaggaggttagcgcggcggcggcggcggcggcggcggcggccggagagttgggagagcaggtggaatggaaatgggagcttcggcttcgtttctcctgcgacagcgcgtgggttttttgcgcttcgaccctccaagtatcaaattattaatgccctatataggagtagtccttaataatgcctggtttaaattttatttctaatagttctgttttttcattggttttagcctaaatttttaacgcacgtgaaacgataaagatggttaacacatgattaattaagtattaattattataaactttaaaaataaagttatttgaatttgttaaacaacttttaaattaaaaactttttacaacaaatacgtttgaaaaatgtgctaacagaaaaaatataaagttgaagaaaagaactaggacttaaaaattttaagtgaaatagatggctcctattttaagtataatttttattgtattttttgttgaaattatttcaatttccacgatattcctttgctctaagaaaggtcttattgtttttgaccaagagcaaactaaggttgaccgcttaatttctaaccaagcaatattaaagggagcagctttaagcctttaactatataataaatatattagtgaaatactcttgattatgaatatagtgatacgacttttatgctacaaatattagtttgtttgaattatattatttatcaaagcttacaatttcaaaatcaaaataatgaatatggtgtgtgttcttctccaccaaaaaatttcaaatttatgacacctgaccacattcagggaagagaaaaaaaagaaatagtgggactgatttaaaacgtttccaccaaaatttagcacgaggagcaggagcagaatattgtacacccacccattaaactcaacgcgtgaagccctgaaccgtatcccactgtccccggggtcccacactcacgtgggccccacaccaacgtgttcgtgtccacacccgttcaccgtgaaccgggtccacgcagatctccccacaaatcaaaatcatctgggcgttgtgcgccgccgcttcctgcggcggatttgaatactcccaaattttttgaatccactccccgcgggatgagcgaaaagccccctcaggtttcttcaaatttcaaataggtccctccaagtagcggggcccagccgtggtggcccacctggcagtgagtgcgagcgtgtcaattggagtggaaggctgtggtgctgccacgtcacggagggaacgaacagatggacggttgggagcagcgagggccagccacagccacagacggttgtggtggttttggtgccacgctgtcatctcagctgatcgctgacaaaaatcttgggcgctaagcgacagggctgacacgatcacaagacaaaatccaaaaacatctcttttttagagggagaaaaaaaataatttgttggagttttctttgagtggaaagaagtttatccactagttaagatttttttttcttcttctcacatgcttatttgtcatcttcattcatttgagtaaattgtttacacctttaattttgagtgaattttagctaatcattttttagaaaaaaatagctaattatagttcagaagaaaaacatcaatgcaccatgaaattgtactaattccgtcctaaatgagtggataattgtagacatatgcatgcaatattaatgctttgcatttttttgcccacccaatagatccaaataaagagaatgagttcgagtttttttatttcttacacgccttatctaaatacccttttgtagggaaaaaagaagtaaattttacaaaactacagatactttaatcatgctattacaaaactacagatttaaatgtgtatcacaaaacaatagatttagtaccgaatttatcacaaaactatagatttagtgatgaaattatcaaaaaatagagtttatatccataacatattaaggttacaaaagttatagttttatgataaaactattgttaaatatatggttttgtgatacacgttcttagatatagactaatcaaaatacaagcagttttgtgaaactagaatgagttactcttacttgatgatacaatatagagactatactgagttctttttttttccaattaaactcttgttaactaattggaaaaagtacgaattagcaatccagtcagcatcttatttattaaaaaatatgggacccacctgtcatactcctcttctcctcttcctctctgtcgctcttcctctctctctctcggcatgcgcacggcggtgcggggatggtggcagacagcgcggtcggcgtgcacggcagtgcggccgacagtgggtcggtgcggtcggcgcggacggcggcagagagggacgcggaggcggaggctacgcgggacacaaaggcagcggcggtggagccgccagagtggctgcagaccctgcccgtggcgccggagtaccacccgacgctggtggagttcgccgaccccatcgcctacatcctcaggatcaagcccgaggcgtcccgcaacggcatttgcaagatcgtgcccttgctcctccagccccccgaggatgacaccatccgccgcctcctccaatgccgccaacccctccccgaccttccccacgtgcctccagcaggtcggcctctccaccaagaaccgccgtgccgccagccgccgagtgtgggagagcggggagcgctacaccctggaggcgttctgcgccaaggtgcccgagttcgagccctcgaggcacgccgcactgcccaagaaccccacccacctccagctcaaggccctcttctaggccgcctgcacctccaggcccttcagcgtcgagtacggcaatgacatacctggctccggcttcgcctccccccaccgcctctgggtcccgcaccgccgccgcctccgtgtccctctcccctaccgttcgcagctccgcgccgaccgcccccacccaccgtcgcccacaccgccgtgcgcgtcgaccacgccgtccgccgccatcattgcaccgccgtgagcatgccaagagagagagaagaagagcgagagagagaatcagagaagagagagaggaagagggaacaggagtatggcaggtgggtcccacatttttttaataaataaaatgctgacttgattgccacgcatacgccacgtaggacaaaacagctctcgatagggtcgaggggggtaatttgtccgatattgaaagttgagggtgaatgatgtctggttttcgagtttagggggtaattcggtcgaccacgatagttgggggtggggtaattcatacttgttcctaactaatattacaataagtactataattacacaaagcaaaattacaagaagtactatacatattgatgatataactattaactactacctctgtttcaggttataagactttttagcattacccacattcatatagatgttaatgaatctaggtacacatatatgtctagattcattaacatatatatgaatatgagcaatgctagaaagtcttataatatgaaacggaggaagtaacatactatttgttggaggcataccacgaagggccttcggcctaacctgccgaaaccaagaacttaggcgagaagatcggaccagaggcaatcggcgaaggattgagaaaggaaccagacgggtgaatgccgcccatcggggttcgctggacaaggacctcgtcggagggccgcaggggcgatgacgacaaggcgaaggccatggcacgaaggcgtaggcttcgccaaataccaaaccccatcataaagaggccccgcgggccattatgctttctggaggtttcgtcaagtaaatgggccgatccatttggtccaataggggcccatacatgcaaaggacactatttacacccaataatgtctctatcataagggtaaccatgtaaattcccctgtaaagcctaaacccctaagggggaacctgtaacagagctataaatagccccttagagtcatgtaatagggggatccaaaaatttttactaagcaatacaattgtttttttacttccaaccactgttgagagaaccacgcctttcggcatgacgcagttgtccattcgacaacactatttaatatgacataaatcaggtagagatgaacagtctacctaggatcttgtgcacacaaggagataaatggactgtaaggtgtaatactccagatactctgtttttaagagcaggtacaaagaacactataagttagctgtaaacatattttaaagagataaaatacgagaaagaagagcagcggactacagatttgcagccagctgcagcacagactcgaagatgcaatgtgtgtatgacaggtgagatcaagtattaatattgtagtaagtaactattgtatgaattggctattaagttgactataaatgatttggagctagtagttggctatactattaaacttgctctaaatactccgactccgactgacaatataattatttatcttcaaacttcaaccactcgtctttgtcaaaaatatgcacatagatacttaaaagattccatgctatcaaagtatattgtgacttaaacattttataaaatttttacctgatttggtttagttccttcataatccctccaaatttcttccaatccgaagaatccatcactgtaccctaaccatttagggcccctttgaattagaggaaaaacataggaattttggaggatttcaatactataggaaaatttcctatgaagccctttgaaacaaaggattgaatcatatccaatcctttgaaattcctatggaatggacaatcctatagagattttggagaaaatttagcaagaacttcaacctcttggtaactttcctttgagtctatctctctcatccaattcctacgtttttcctgcggttcaatcaaacggtcattctagtgtttttcttgcgttttgcaatcctctgttttacacttacatttctatcaaaatcctgcgtttttcctattcctacgttttctcaatcctgctattcaaagaggcccttaatagttttagcggttaaagcgaaataatgatgctggcggttatttgaaaacagatgaagtaactgtaaatcgacgtatagttaaatttaggagtttaaatcttgccaaacagcccaacttagtaccaaattagtaacacttagcttctcttgtatttgttgtcgttgagacagtagtttggttcgtaacagttctctgatagaaatgaaacaaacgcataaacagaaatacagacagcacatccactttctcttatcttctcctaagccacaacaatgatgtaccatttcgttttccgtcatttatgaacatcacttgttgccgatgtgttgtcaaatgcgttcatacgtactaagtagaatcccgttttcagattgatacgcaacgaattggttgctacgaaaatgtcagagtttcccatatcatgactcatcagctcatgacagatgatcgtctgcaagacagtgacatgactggactaacttggatcatattgctgctagctaatgttcatgctgcagctagccaagaaattaacacatcgaaatccagatgcagcagcagctaccagtcactgaaacttcagtggcagctgcgagtgttcagagtcacacaacactgcatgcatcgcaacaaacgactcccagctgcagccgtttccatcactgaaagcctgaaacgaaatcagcgacagcattcgacgccataggagcagatagagaagcatattgtcccttttcagctaggagtgacgatccattttgaggccagaaacgttcagagaattccagtggatataatataatcaggcacagctaaaagataaaattcattcgtgaattaagctgtatttttacaaggtgcacacaaaattgaaattggaattctgatcagccaccaaaacagttgaggaaataagaggagtgtgacaaagcatcagttgcatggagacaaagaagatgacagcaacaggattggaagtgatcagagacaggcaatgaaatcctgagaacaacctgaacctcacaactcgtactatccctttgcacagccagcaggttaaccaggttcagtcacttcactccagtgcagtgaagtgcaggcaggactaaatacaggcctaagcttagtttcaggtttatcttcagttcagagttcagaacttcagacacaggttgagaaagaaaagaagcagcaatgtcatctgcaactctgctcaaatcctctgtccttcccaagaaggccgccgagtggggcggcacgcgtcagctccccgccccccgccccccgccccccgcccgccgttcgtctccatggtcgtccgcgccggcgcctacgacgacgagctcatcaaaaccgccgtaaaaacccaataatcttcaatccagtcttgaattgttctggtgcttgggagaaacgcccaatggttttccggctagctccatgaagcggtgggctagacaatcttggttcgaagcttcaccacttctaattactacatttgatattaggttctttcctaatattcgtgttttttttgttcttgtgcttgggattacattaaaaaccgagtcattgtggattaatttaaaacggtggcgtcgccggggagggggatcttggcgatggacgagtcgaacgcgacgtgcgggaagaggctggcgtcgatcggaacaggcaggcgtacaggacgctgctggtgacggcgccggggctggggcagtacatctcgggggccatcctgttcgaggagacgctgtaccagtccaccgtcgacggccggaggatcgtcgacgtcctcgccgagcaagggatcgtgcccgggatcaacgtcgacaagggcctcgtcccgctggcagggtccgatcccgagtctttggtgccaggggctcgacggcctcgcgacacgcgaggccgcctactaccagcagggtgcccgcttcgtcgagtggcgcaccgtcgtctccatccccaatgccggcccctccgccctcgccgtcaaggaggctgcctagggcctcgcccgctacgccaccatctcccaggtcggtcatttcatgtaccgaccagttcaatccaaaaaacttaaatatcaatcgaccaaccaagtagtatagtgtcatcgaccattcagcacaaaagtttaaactgatcaaccgccactaacatggtgtcacagtatcagccagttcgatctaaaagcttaaagctcaagctgatcgattgttgctcgcattgcatcagaataccaaccagtttaaaccaaaagcttaaactggacaacaatccacccacacagtgttacaacatcggacagttaaacacaaaagcttaaattgatcgaccagtcgaccaccgatatggtatcatataacccgtcagttcatcccgaagcattgattaatagtatcattaaccaattaattcaacctaaaattataagttgatcgatcgatactgacattggctttagaacaccaaccagtttaactcaaaagcttaaaccgatcgactgatgctaacattgcatcaaatgcatggatggatggatgcaggaggacgggttggtgccgatcgtggagccggagatcctgctcgacggcgagcacagggtcgagaggacgttcgaggtggcgcagaaggtgtgggcggacaccttcttccacatgtcggagaacaacgtgatgctcgaggggatcctcctcaagccgagcatggtgaccccgggcgccgagagcaaggacggcgcggcgacgccggagcaggtcgccgccgcgtcccgccggcggtgcccggcgtcatgttcctctccggcggccagtcggaggtggaggcgacgcggaaacctcaacgccatgaaccaggcggctccgtcggccaacccgtggcggtggcgcgtctccttctcctacgccagggcgctgcagaacacctgcctcaagacgtggggcagccggcgggagaacgtcgcggcggcgcagggcgaactcgctggcgcagctcggcaagtacaccagcgacggcgaggccgccgaggccagcgagggcatgttcgtcaagaactacacctactgaaaataattttcgactgaaaaactctgaacatacatatatattagtaagtacattgcgagaattaggatcacaagaagcttctctgaaaactctgaacatgtatatattagcacatcgagagaatgcatcatggttactgtattttacaaggttttctagatcacaagaagcttatctgaaaactccgaagatagatgctgccaatctgcttagacatatggacatcgagaggatgcatcatggttgctgtattttacaaggtttttctagatctttgtttttttggtttcattagatgcttggctcctcccatctgtacaaggatgctttggtagatttgtcgtaaggttttgtaatgatctacggatttgcatggttgctgcaaaattttgcatgtatatatacacgacgcttgaacgtcgatatgtaataataatggctaatttttaatgatatatcgactatggagtactttgtttgggtcttatatgcaccatagttcttcaattaatccacacgtaggctccgatcggatggcctaatcagccaaagaaaaagctaaactttaaattttcaaacttaattttaagatatttttaacattgtttctttttcagcattagcttttaaatcactaaaaacacatatataaaaattttacctacaaattctttttttcctaataaaccgttttgacttattatggaaaaagccaaacgatggggcctctaatttggatgagtttacttaggagatagaaatttaatttaatgccccaaaataattttgataatatggagtatagtggcatttatcactctactaatcagccaagtttaaacatgatatacacattgggaaaaaaagacaaatcattgcatgaatagtgtaggtattaattgttagtacgatggatttagactcggttgagagtttattgaacggagtacatatactcaatacacatgctatcaaatgttttaatagtttttcataatcattaacttggcattttaatgaataaaggggcgttcctcgagaaataaaaagagttccccacaaggcttgcccatgtagaagccaaagataagcttacctgcaataaacttgtgctacttattactcatcaaattattgatatggattgtctacttgactaaggataaattaaatattttaggaaaataaactcaataaataataagtggcgttaatttgatgaactagatgaaaatgacttggggaatttggctctaaagaaatgctagaattttcaatgcagcttacggctcagtacaaggagtggtggactcgatcatcagaatgtacaaggcgtgggaagaagcccaagaaaatcggatccagatcctctgcattgaagaagctaatgcagagggtggcattagctccaatccaatccttccatcatcatccaacggctgcatcttctttttcccttcgatactggtaccagaaacaaacaagtccccctcgccggtgaccacagcagcgcaacaacgactcctcctccgctttggcgatctaaaccgctgtgccttctgttattcccttgacctatattatcaccaccgtgagctgagagtagcacagagctcatgattatcgaaagaaaatgaagcaacagtgcatgcaacgttcggttctctccgtgcttaataagtactccctccatttctaaatactccatccgtcccaaaataagtacagttttagcagtattcatgttcaacgtttgaccgttcgtcttatttaaaaaaaagattatgattagtatttttattgttattagatgataaaacatgaataatactttatgtgtgactaatttttgtaatattttttataaattttttaaataagacggatggtcaaagcgctaaacacggatatttatggctgcacttatttttgggacggtgatagtatttaacaccgttgacttttttaagcacatatttgaccgttcgtcttattcaaaatcttttgtgaaatatataaaactatatgtatacatataagtatatttaacaatgaatcaaatgataggaaaacaattaataattacttaaattttttgaataagacgaacgatcaaacatatttaaaaaagtcaatggtgtcaaatatttataaacggagggagtattatctccgttccaaaatacttatcgtaccatattatttagcatgtactaaggtttgaagacgaatactataataccccttaatttataatgcatactccctccgtactcgtaagaagtcgttttggacagcgatatggtctccaaaacataattttgaatttttgtttctataaaaatatttattgaaaagtgatatatgtatacttttatgaaagtatttttcaagacaaatctattcatataatttttatattttcaaactcaacaacttgatagtatatatgatttatatttctaagatttgacttaaacattgttctaaacgactttctttacgagcacggagagagtagttggacgcgggatggtggttgggggtataatgaggagaaatttgaaatgtaagtggttgatatgacaagtagtatttcaaagtaacagctattttgaaataatttttgaatgctagaaagacaagtattgtgaaacgaaggaagtagtgcggtttcgtgccgcgggccaaccctttaaaatccagtgcgacgccatgattttcgttcatccatagcttccgcagcgccggcgatgcaacatacttcacgagttaagcgattcggggaaatcgatacaatggaatcaacaagaaaaggcaatcaaagccattccctctcagatggatggccaggattcagcctaatgccaaaaagtggttgtctgccgtagcagttgatacggcagaggatccgcgtccaagaaaatccaacttagatgattttacgccgtttgctgatgctagtcgctttccatttcctaaaactctatgtaattcttcccctatggactgatggtctcttttgaggtggtctacagtttttatctcataatattaatgaaatggcagagatcctatgcgtcccctcgaagaagaagggccctaaaactaaggataatttaagtttacatactcaatcttattatcatttgtcgacatggagagcaaacaagtttagaacaaggcaacaacttaattaaaagtatcaaatctttgcacgtcaatataagaatcttacacaaaatttatgttacactagcaaataattgtgtcatctcaacttcatgcgacattaaacttatgggtaaacttcaataaactatgtttttttaaagcaattactatattgtaattgtatctgcacatatcatataaactctaaaaacacacaatttcctttgctctttactctatatatgtgtttattaattaggcgtttcaggtgttgtgtgtgcatcactagtgaacctaagactattttgatgaaggtacgtaccttttgttggtcctgaactgttaagttggctatggctgcaacaagctctataactacaatttcaatagtagagctctattactgttattcagtgctttaattgtagccagctgagccaaaaagacatgttgtttttcgaaccattcatataaggggtatttgcaaatttgccaccgttttttttccaattttgcaaggatgccactcgaatgacaattctagtggtatttttataattttttagtgtcagtcttgtaataacaattcaaagtagtgataaatttgtaattgccccttcatataatcatttaaaactacatttttactttattctaaattactttttttagcattgttcttacttaaacgttcatccaaagtgtttagagtaaattatagtttggatcaccatttaaccaattttcaccttggacaaagtaatttttatttttattacacattggaccaccccaactcctcttattaagtactctcttcgtttcgtttcaggttataaaacattttgattttggtcaaagtcaaactactctaagtttgactaattctgtataaaaaagtagtaatatttacaacaccaacatagtcttattaaatctataagtgaataaatttttataatatatttatcttgagttaaaaatattactattcttatctataaaattagttaaacttagagtagtttgactttgatcaaagtcaaaacgccttataaaccaaaacggagggagtacatcaatgacctcgattactaaattatagtctcttgcacaccgatgaactatcgattcttgaagctatatattgcctatacgtaaaccatactctcttttttttactgaatgaaccggatgcagatggttaaataagtttaggtggtctaaaatgatacaaaagtaaaaatacctatttcaaagtgaaaggtaaaggtagtccaaattaaaaatttagtaataaaaagctaatcaaaatgtaattaactcatttatatattacggaaaaaaatcgtgaatttataaatacaaaaatcttatgacgttaaactatataaattgagaaattaatggtcagaattacgaatgttttgacttttaaaacgaccgagagagcacaaaatttacttgaaatcaaagagagaataaatttatttattggagcaaaaccatttccttctctcctgcctccttgggctcatctctctctctctcactcttctccctcttctcaccaccagacgccatcaaacccctacctcccgcggcggcggcggcggcggcggccggcggcgagctccggacagacagaggagggcgcgagcggagagggcgaggagggaaggagggagggaggcgacaggcatggggaccctcgggcgcgcgatctacacggtggggaagtggatccgcggcacggggcaggccatggaccgcctcggatccaccatccagggcggcctccgcgtcgaggagcagcgtaagcaccagcatcttcccccccgctctcccttcccccctcgttaactaccgcgcaccacctgctcgtcttcgttttcctcctcctccggagaggagaggaggaggatcgggcctgcgaggtcgaaatcgtttcgatttcgttgtcaaagtctttggcccaatattgggagagttcgtcgctctagttgttgattaattggtactagcagccgtacacattcttcacaacccctttgtggtttggttgttattgggaaggggaaacgggttccttccttcgtgtgtattcaagtatcgtcgtcggtgattcgtcaagtgctgcatttgaagttttcgattagtgattctcgtctgtgtatcgaaacagcagcaagtaaatcaaagatttcacttgcacataattgttattattgtggttatactgaccaattggaatgtcgcattggcatgccgatttcgagtgtttattttctgttccctagcatcatgaagaatgccattttcccctctagctctagttggggtgtgttgctgtagttggttctgattaatcatcaccattctgcaacaggcaaatggccagaaattagcgtagatatgaatataggcacattatgacgagggggggcatcttttgttattttttcgggtgttgtgcatttagcttgatagatcagtttacaacttcgctaagtgtatgacttcttcacttagatacatgaattttatgcctgatcctgagtaacatgttagcgttttttgtatgccattgtcagtttcaaggcatcgcacgatcatgaacatatttgagaaagagcccagagtccacaaggatgtttttgttgctcccagtgcagctgtgattggcgatgttgagatcggacatggatcctcaatctggtacggctccattttaagaggtaagctctttgtcaataaacactagtattgatacatgtgctactaataagcatgggctttgtcttgataattatatatctcacctttcttcttggcaacaagtatgtttactgtgcattttgttttcagagtaaacttgcttctaactgcacttcatctattgctatggtatatagaaaactgacataactgccagttgtcaggagatgcacagttttatcaaagcacaccatgttttcattgttagactctcaatcgacacttcgcatgaaacttcagttttttacctttattcgacgaagtgtcaatcagggtttatcctaccgctagtagactatttactgacctccggcagtagcacgattaccgcaacaaattcgtattccaaattttgaactccctgcagtaatacacggttacgtgcggtaaccactgtgtgtcgaagctggaagaaaaagaatgcaggaaaaattgtaaaacgtagtaagaagtaatagacttgtatcgtagtgttaagtatttgtgctgtcatacttacttggttaacccaagcatattgatatttttaagtttcagtaattataatgttgaagttgtactgtagatatttccagtgttcagtgataaccattttagctccttttcgttgtttgtcctcaggtgatgtcaacagcattcatattggatctggatcaaatatacaagacaattcccttgtacatgttgcaaaagctaacatcagcgggaaggttctcccaaccataattggaaacaatgttacaataggtcagtagagcacttcctatcttatttcgtaataattttggtacacagtttacactgtgatatgctattgatattgcgatttggtttttctggaagacattaatcacgtggcatcgtttatacatgatagaatcggatataaattgttttcattgcagcgttgtgattgattcattaactaaaattctgaacttcatttttccttggactactcactgtgttatgctcccaactaaactaataagcctccaccaggtcatagtgctgttctgcacgcatgcaccgtcgaggatgaagcttttgttggtatgggtgccactctgcttgatggagtggtcgttgaaaagcacagcatggttggtgcaggatcgcttgttaagcagaacacaaggattccttctggagaggttaccttcttattctcttgctaagcaagttttcttttttttttctttttcacttgctatatgggaaatatgcactcaactgccagcattttgtaatgagggaattctcagacactgatatacgatgcttacaatcgttctttgttccacaacatatctaatcgtttggataatggaattgagtgattccaaggtagaggtttagtctacatatttatttttccaaagaacaattactttaaagttacaatgcattgatgacatatttacatgaatctgtgtagtttttctttccttatttcaaaacctgtaattggggactggaggataaccaaagtaccaaacaacgctgcatgtttatactgatgtccatattttacgttccatgctattgctatgaacagctgcgagacttgaatatcttttggtatttatattgtatataacttaatatattacatgactttattgaaccatatggtttcttgacactgctaggtctgggtcggtaatcctgccaagttcctaagaaagcttactgaagaggagatagcgttcattgctcagtcagcaacgaactacatcaatctggcccaagtccatgctgccgagaattc

SEQ ID NO: 14949 - DNA, 4907 bp, Oryza sativa
agcccctcaacggagactagaatcccctcaaggatttgaactccgggaaatacatcggcgcataaacctcggtgatatcctcactctctttaccttcttgttccattgctctgtactatgctaatattgttgttggtcgagctcacctctttgcttgtggattgaatctagatctcttaggttgttctcttgtttgtattgttgttgtgcaggtcagatagtctgatctcagttcagactatctgatcacataggactatccgacctgatatcatacaatccgaccatgttttgttttagcttccgcatttatttttaaaaccgcctattcaccccccctctaggcgacatcaaggtcctttcactagacaattctaagatcctcgctatatctcttatccaagaaccacattgtggctatctatttctcgccccatttcaccactgtgcttaagctcgacatcaacaaccccaaaccgaagctacctgttgatgcaaaaaacacacactggcctgggagatctgtttagctccactgcaggaccaaaggttgatgagatgcgggcgtgccagtcagtttgaccctgcaactgacaagatatacaaatagcaaatcaatgagccgatcggctgacaagccgatagattacttccaaccgatgttgataccagccgatagcgatagggttttgagctatcggctataattctgatgtagattctgatgcttgatgtaaataacaatataaaggcaaccggctgatgataatgcaagaaagcaacaatataattcaatagaaaccaatcggctaacaatgatatgatagaacaagtattgatccgaaggttaaaacatacatcggctggaggtccgatatcataaaatccacagattaaattaaacggtgaaatatttgttatcattggctaaatccaacttatatgcaatccttgtaagtcgatgcaacatccaaatacctcatcggctgaaaccccgatgaaacccttattggcagtcaaaaagcaggctagggattatggttctaaacacggcttagtagatcaaacttaactgatgcagcactaagtatgaaaagaaacacaatatcgagacaattaagccgttgactgatgtttagggtggtagatgccttagctaatctaatctagtaaaacaatttagccgataccggcagaaaccctaaagcgagaagacaacagattgagctaaattgagatactaagactagattaattaagacatgttaaatagccaggcaaatatatcaaccaaaccagagcaatccaagaggtcgaatgtactgatgcagccttgaacgacaccgacatagacgatacaattgcctgggccggcggaacattggacttaccccttcgccggagatcgaaaaccaatgcagccccgcgtcaggtgccaagtctcgccagacgataaaataaagtagaaaaggtaaaaggcagcgatgcgtcgaattgtattgatcatggagagatgttacaatgaccccgggtgtacatatttatacccatgggtagatactagtccttgtaggacaagaaagaaactttcctaaaagataaaaggaaaacataaagtccttatgggacactaacaaatattgcctaattaatagataaactaccatgtcgcattctcctggaactcggtcacttctagataatcttcctttaatatattaattttttaaccgaatatagcaggaatccgactattggcgacgtgataattctctttgaggcttaccaaattttactgttaacactaccgtactcgatatcccacttcagtgtacaacccttaatatacccccgcctaccactgactccatcatggtgaaagcttcgatctttaactctagcgagaaaacacgtgtactgacttaggtatgaaaccaaatcaaatcaatcctaacggaataagctaatttcacctcccaaatcagctcaaaacaaagcaaattggacgacattgcaacggattacaattgctcaccttgcttccactagatccatcggccccatgacctccatcggtggaatcagatgccctacccctccatcaccaccgagtgcctccttcctgtccctgcacttgcagtacgccttcgtcgtcacaccccttgctgctaccgacgtcgtcgtcgttgtcaccaccgcttcttttagggtttgagggctcgagggagaggtgatcgggttgcagctgcacaagccgattcggttggtatactaattcaaccaggggcaacttaatccaaacaaccaagccatagtcaaatacggtcagattaataatggcatggatctaattaacccaagaatctattggtggtttgagaggtggtcttttggggacaaaacccatccaagccatagcgaaagtggaaaacataataaaactagcagggtgggtgcgtgcctagatttagagtttactaaaaaaaactcagctagtcgatctgttaatgcgctcgcgattttatggccagtgcatgcatatggtgtttaatgagtttttaagttcggggtcaatggtacggtttttttttttagaattacacagtacaacgcagacactcacaatgcatgcacactcacccctatgaacacacgcacgtaaaccctacccctataaggactggtgtctgattgtttagttttaagaggaaaatgcccgccaaaaaaaaaaagtttcaagaggaaaatccaaatacataccaacaagtcaatgttcttttcaatttctcccaaagaacttaatttcgtgcatgtgctcctcacaagttaatttctcttttaatctcctacctctatcagttttcaacaatttttcacaccctatgagccccactcaaggtttactaagctgtttggggtggggttaccaccaccccatggtttgacggttaccgagataaccatgcggttaccacgaggtataccgtggtttcaaaaactaaaaatgttaccatacatgataaccattataaccgcacggtttttataaatcatggccccactattgcaataagcaaagtggggtgtatacctcggcttccttccaccttccacttttacacactttaattccactagcgctatggtgttgaaatatgacatcaatcacatattatagaaaaagtgtattaaatttcatgcccagcaagagaagatactatcgagatccacataatgcaagaaatcactaaaaatcaaaatctaggcaaagatgggagtggggaatgttttaatggcacggaattaagttgtattggtagattagaaagattcatgacttataagaggttgtttgaattttttatcttagttttttttattagtgagtaggcgaagataataatagagttggaaaggaaatgataaatattgatagttagacataaatttagtatttgtcagtgcagtaagtaaaaggaaaatatgtggggcaaaccacctataatgcaaagttgataactaccccaggttaaaaaaaataaacgttaaggatttatccacgtccccccgagtaaattttttacttcaagtaaacttttaccccgagagtaaaaattttactcggggtggcgtgaacatatcttttatgttcatttttcaatcctaaggtaatttctagatttgtactgtaaatgtggtttgcacggtatgggatattcttccgtaaatgaagaactccaatagctgcttgacacttgtactcagcggcctcgatctgtagaagagtaagcttccttggatcgattcagaagttttcgatggtttgatcgatgtgaagttgcatgtgacggcaatgtcgttacgaacaaagcttaaggccctgtttagttcaaagacaaaaactttttatcctgccacgttaaatatttgtacacatacgtagagtattaaatatagataaaaagaactaattacacagattgcgtgtaaattgtgagatgaatcttttaagcctaactgcgccattatttgataatgtggtgctacagtaaaaatttatgaataacggattaattagggttaataaattcgtctcgcagtttatatgtagaatctgtagtttattttgttattagactacgtttaatacttcaaatatgtgtcaatatatccgatgtgatacgcaaaaactttttaccttgaactaagggcccctttgatttggaggaaaaatataggaattttagaggatttcaatcctataagaaaatttcctatgaagccctttgaaacaaaggattgaatcatatccagtcctttgaaattcctatggaatggacaatcctatagagattttggaggaaatttagcaagagcttcaacctcttgctaactttcctttgagtatatctctctcatccaatttttgtgtttttcctatggttcaatcaaacggtcattcctgtgtttttcctgtgttttgcaatcctctgttttacacttacatttctatcaaaatcctatgtttttcctattattatgttttcttaatcctacgattcaaaggggccctaaatagggcctaatatgggccgcacgtgagcaggaaccttttaactccacgtgacgcgcaaatgctgtttcataacgaactgctatgataaagttacagtagcatattgtttatggcatgccacacagtcctgggctcgtttgttacacagtcctgggctcgtttgttacacatgaattttataagaattctgtatgtactaattaaacttctgtaaaaatcaataaaaaaatatttctttcgatgaagtcctacaactatagccttgtttagttgcaaactttttcttcaaacttataactttttcatcacatcaaaactttcctacacacat

SEQ ID NO: 14950 - DNA, 9209 bp, Oryza sativa
tctccactaacaattctgcattcaactgagttatcacttactccccctatctcacacgtgatatattataatacaacaaatctggacaaagataagtccagattcgtagtagtataatgtgtcacatcccatcctaatttttttttacggggaagtagacctctagaaggctttcctttcagcaaaagaagagagagagaagaaaaagaacaaaaaagaattaaggaggtcaatattcacagtaatattcagaacactgagctagacaggtagtgagcccgtactatgacggccgaactggtacggcagaaaacggcaaaatttatagcaaaaaaaaaaaccaacttgaaagtgagtgacagccacctgaccgtggaacgaaacagcactgggaaagtcagacctctcgtcatcccacaggattctggcaccggcagatgattcatcgccttgcgaatagcacccctgaccggtcaaaaacgaagaaccaaacaaaatgttactaacccagggatgacattgacctcatgtcaacatacgagaaaatgtttcgatgaagacggttgaaaaatataatgcatttctagctatattttgaaagccatcaccactgaaattcatggttttggtcactgtctgcctcgttcaccttctgaatcttactgtactgtactgataggccaattcattaacatgtactgtaccattcatcaggctcaccatgaattttaggcagccactaaagcaaatgagtaacattcggtgctgcatggttttgagatgatgggtagcttcaagatcaacatctgaatatccaattatcctctaacaacaatcgagcgactcaacgcagaacatattttctttaatcaagtttcacacatcttcccccatttgttggcatggaacaggaaccacacttggatccagttggtacctcagtttttgtacatttccctgcatgccaagctaccagccatccacacgatcgagttaatttaagaatgattctgctgcctctgtataatccgcacgatgaactacagaagttagtaaaatgccatgttgtatgtgagcttccgcttgtgctgcttctcaaatgtaataatcaggtcatcaataatttcctcccaatcttcatctgccccttcaagctgaaaaaggaagcaatatatgaattaacttctcgtggttcaccaagtacattatctcatttcaaatatttcaatagtcccactttacagaagtgaatccttttaccagtctagcccgcacaaactaaggtaaaaaaaatattgtagtaggaactactgaagagaagcataatgagaaaacaatagtaatatatagatcaaattctactttcacacaatggattgctagtgtgcagattgatgtcaaaattcatttacaacataatcataccatcagatatgagatagctattgagacaatggttaattagtaatatgcagatgttatgtaacgcattcaagaaacagatgtggatagcatacaggtccaagaaagcaaagaagaatcatataactaaacttgttttaggaaagtataccacacacaaagaaacatcaaaatacacttcatcatcttttatgaaatggaaagttctttatggtgagtgttagatttgctccatagtccatacatggttttcaccacaatgagaatattcatggggactttttctatgttaatttagagcaacttggaggttcaaagttcattatactatataagtgattgaccatctaaatatatgagtaaacaaggttaccctgtctttattcctagaacacacttaccagcgactttgtcaactttcgaacagagtaggaaaaaaaacagaagtagcagttctctttttatgggaggaagcaacgcgaaacacattagggtcaaggatcgaacccgagtgggcaaaaaaataggtcgcagctagccacccgagcagcactcggctatagaaaataaaaggaacagcttggaggaactagctatcttttttaatagggagaagcaaccatcaacagggaacacctagtcgggagtcaaacatgggtgggtagcatttgagaaacatcgctatccaactgagcggcggtcatttgtcacttcccaacagaaagtcaaaagatcagaatgtagatatttgactgaaaaagtaatatgcaagcatttaatattctacaaacacaaatttgagcatgtcaatccacaaaaatagcaatcacagaagtatagaacccagcaaacacaatcactgagaataataagggaattcaattgggcttgtccacatggcctatgatttgaagggagcacaaggatgttattgaaggccaaatttgtcgccgatgtggaaacaaggaatacaatctattggcagaatattcttgacgtggcagtgaaccacttacattaagccctttgagtatacaaagacaccctttagtgccaacaatttcaatcctagttactagattcggcacaaaccaagtaaatagacttgttggactcaactaactgaacctttgtaggttatgaactttgtgtttgcaatgtaaattggctgaaaagtagtaaatttcaaagcaatccttgtaagccacaactcagaacgaacaacatttctggtaaaaacttgatcctagcatctaaacgttttgatttgggcttcatcttcatcttcacatcaagtagaatttgagcctccccgatatatatctttctcaactgaagccatgcatgtgtagtagctcatcgttgtgaaaattagtaagacacaggtacatagtacatgtgagaaatttgtgccatattgtcttgcatgatatgagatgtgaggcagtagtaggcctgcagtgagcttcttaagccttaagataataaccaactagagacattcacaaccctgaatgtggtattaatttgcatgtgttccctattctagagataattcaccaaccctcgatattggggtaatgatttgcatgtgctcccagtctagagactgcggatgagactgcggatgaggtacactacataaggctatgctatagcatagtgcatccagaaaattagtgatcttggcaggttcccaaattaattaatgatgcaccattgtgttataaatgtagggcagtacaagatgctattttttctctggaaatttgacaaaggagacatactgattgacattagtttgtttttatctaacactgctctctaattttgtatttgacacatacaaagacccagcccaacccatctagcatgtgttgatccaagaggctgggctgccgaacacaaatcacttcattaatatcagtagcaaacaacaagattaactagatcaataggtaaacaacataatcgaaggagtagctttatgagctatatatatgttatggtacttataccttctgacacaaatctaaagcaagctttgcaccaacaccagcttcttcatggttatctttcacatccatattgattatcagcgcgttctttagcatcctttgctcacggttatgcatatctgcagcaaaaagagaaaaaaaacatactagcccatcttagtgaatgattacatatccacgtaaatactagtatatggatactacaactgttactgtgatgcatttgatagaccgaaaaaacttgcccctattgttaattgttatcagttgattaccatcgacgattaagtcgaagaccctctcctcaaagctgaatatcacatcaaacagcccatcgccggcattgtcctgccacctctgcggcgccagcttgactgaggtgttcctcttcagcattggcagcaggccgttcctcttgtacctgaatggcacaccacataataatgcattaataagaaacttttctgccatttccgcaaatcaacaaggatcgcatatcgcaaaatcaaatattgtgaagagttatctaagccctaaggagcaatacatttagaacaaaacccccaaattgcaagacaacagctatctgttcccatcatgaccatcccagatttccgccaacaccaaccaaatcaccacaaataactcataaattcgaaatcgactctaaaaaggagatcctgccttctccagtgccaccaccaagagcccccggaaagaacacagaatcaagaagggaaaagagcagtaggacggacaggtcggggtccttgcggcggaggtcgtcgtagatgacgttgtagggggtgccgaagtcgtagacgttgggctcgtggagggaagggccggggagcttgacgtgggtgccggtgccgtaggaggcgacgtcgagccccgcgcggccgagcagcgagtgcgcctccatgctccggttcatgttcgacgagcacaccatcgcgaacctcatcttcctcctcgcctccatgcccatccgccgccgccgctcgccgccggcaaggtagggtcggttcgccgccgccgccgccgccgctccgaccgagctcgcctgtgaggggtgtgtggctgtccgctttgagattcgtgtgcgaagggagtgaacggactggatggcttggagttaggacgtgtagagctttgggctagcctgggccggcccagttcactaaaatactgtttcgggcctagtataatcatgttaacttgagagaataaactattttgcgtccttcaactcttgtttcttgttgaatcgcatcccttgaccgtaaaaccgggtataatgtatccctcgtctttaaaaaccggtgtatatcgcctcttttggcggttcgggaggttgttttctgatgtggcagctttgacctcgttgaatgcctgagttatcttgtagaccccatctgtcagtgacctactccatcatatcttcttcctcacctttcccctctctcacctcacagctgcatgcagggaggagctcgccggtcagccacaatgtgcgcacaggaaggagattgccgatagtgccgctagcgggccgcgggggaggtgttgccggctgcccgtgcgcggggaggagctcgctgtgtcctccaccaccttctcgcgagaacagatccgcggtgccgccgccgtgtccgcaaactccctatcttcctccctcaccttttacgtcgaggcctagtcaccaccgagcgttgcctcctcacgcaagtcagctcgcgggacgaccatcgacacatctacgtgaatggcacgcacgtagggcagagaggcacatgaactcagctgcgaacgttggattgctgttgtcgagcagctactcgtgaaaggtaactggctgtacatttttttcccatgtgtcactgacatgctgggcccattgtatacggtttcccatatcgcactgatatgtgggtcctatctgcaaaaaccacttttcaaaccaccgaaggattctatttatatcggttttgaaagataggggatgcgttataccggtttttatggctgagggatgcaatttcaacctagaacaagagatgagggaggtaaaatagacttattccaaatgactaatattgtatgaaagcactttcaactataacttttttttagcataacaagaactaagggcatcaccaatatatatggcaaagtgatccatatagatgaaacccacataaatagtttttatctatgacaatctccacaatgtatatggaaacgaggtatcattaggagaagagagaggagtagagatagataatataatttattccatatgggtagtccatatgcatatagataccttttgttattttttctatatggactagttgcacaatggtaataggtggctgaatggaatattctattgcttatgaactacttttacaccatattgtggatgccctaaatacattcataattttacttccaccgatcaaaatccataaagtttacatatatatacaccatataaaaacagcagaaagaaagaaatgtgtgttaatataattaagtaatcaatactattattataagttgataaaaatcggtgcaattttccgacacgtgcgaaagacctaaaaccctcgtcctcccactttgccgtgggacccaaccaaccgccctcccttctccccctccccaccaagtagggtttcaccgccgcctcctctgccgccatggcgcgcgccgccgcctccaggctcgccgccgcggcaacctccacctcgacggtgagttcgcccctcccctcctcctcctcctcctcttccatccggatccccggctcgctcaaggctaaccatcccctttgcctccttgctgacagctcgagatgttctcccgccacctcgcggccgcctcgtcggcgtggggcatcgcttcgtcgcgggctccctatccaggtgagtcgaactctctcacgagccccacgcatttcgggcgtggtgaattgaatacgtgttgattgtttttggtgtgttgctgatccggttggattgggattgattggacagggagggagaggaggagcgcgagctggtggtgccctaccaggtcgttccatggtatgttctctggtggttttgatgctctgttgcagatactgtcgtggtttccgtactaggattcataacagtaagccatttgaggttggcgagattcatttttgttacagccaatttttattagagtggaaagttataactccagaccaaaatttaatgctatattttttatttgtgttagtgtgcgtggttgctatctttctaggtcttgttaatatttagctttagtcggtaaaaaaaaaaggaactttgaagcttttatcgggtcactatgtctatgctaacttactaagtcattcgtatctgcacgatatgttatgtacttcctctgtttcacaatgtaagactttttagcattgcccacattcatttagatgttaatgaatctagacatatgtatgtgtttagattcattaacatctatatgtatatgagcaatgctagaaagtcttacattgtgaaacggagggagtagtcaatatgtactacatgatctatacaaaaaagttcagtagatgtattaacagtactacacatatgttgtattgtcaagttcccactgacttgttgataatgtttcaatcaatgaatggcaggtttgttcactcttatttcactttactatgattatataaaagagcgattgttgtcactttttttatttttgtttttactatgaatggggccattgctgatgctaatatttgtgatagttggctaatgccatttgtctgaataaacgaacaaaactcatccatgatggatatacaaatttataagatggatgccatatttatttgttctttttgccatttccctgtcaatgtatttgtgctttttccggttaaaaaaatgtagctgtgcctattcaaggctctcagacgcgatgcttgtgtaataaaatctctgatttgtaaaaactgcactgtatttgatttttgaaatgctagcatgattcctttattctttttgtctgattttgttattttggcaaagttctatgttcattctgtttttctttatgataattgattttgtttgtatgattttagccacaaggggaatgaatgcaagggattactatgatgttcttggagtgaacaaagatgcatctgcatcagacataaagaaggcatattatctggtatatatatactttactttttcttggttaaggtaatgcgatattgattactctagatttgatttgattgaatttttggagggtcctgctcctgtataattcctgaatgtttgtatgagagtattgaatgtgaactatggtctaaattctaagccaaatatatagagaagtataatgtgttgtttggcattccaccgtatgcttacacttaatttttctgatctacaatcttgactacagtgctcgagaattgtgtagtgctggaactcttaaacttcatattagcaggggaaagctgttatcttccctatggctttctgaactgtttctagtgtttactggctgtccagcaccatttgaatatgacagcatgggatggtcatacccagttttaaattttaagggcttctgcatagtagattaggcaggcagtcatgggcatttgcatgccagtttccagctgtacagaccatagaggtttgctctatctcctagattatgtgtgttctaacttctaagcctctatggagcaagagctgtgtatgtagttgcatggtgttttcaagaaactaaatattgtatccaactttttgtttcttgaattgtgtatttgctcatttatcggcatgctatgcccatgccacctgtggatttagcgagcatggcaagaatgaagaggaaacacttgatccttctcttgacttcatactaagatccagaacttttaggatgttgtctattgattagaaaatctagatattaccctctcaatgttttattagattgttgtcctgagaggtatgtaattcataatcatattatttgaatagaccattaggttagttgttacattcacacaaatactcaatttacagtcagtgttttatttatttctacatccaaaggtttttataaataaagaaaaggttacttcctgaagaggctcagatgatggggcttatgggagaagatatccctcactcacaggagaatgtgtcctgaaatcatattgcagtaatatttcttaattcttattgagtggtcaggcatttattgaatgctttgcttgctatacgttattctcaataacctgtgtttgctaggtatatttttgtctgtttctctacatttccctttattttttactcaaagttttaactaaactgattatgcttccccagctcgcaaagaaattccatcctgatactaataaagaagatgctgatgcagaaaagaaatttcaagaagttcagcatgcctacgaggtatagagtcctggttatgaatatttatttttcatttgattaacaataggacattcttattttaaaggtgctattcgttgtgcttatctcaggttttgaaggatgatgataagcgtgaaacatacgaccaggttataaactatttcctatgactatgataatatcataataacatgctttactctgcatgtgcttatctttttaagttgctctaggaacataaatctagcttcatggtaatttattttataaatcaatgaaggaa

SEQ ID NO: 14951 - DNA, 8382 bp, Oryza sativa
agatgaatctgtgatgtatttgacttcggtgtattttctagcatttgtgatgtatttgataagcttgtatttttttagaatttgtgatgtatttgatttgtgtgtataaggaacttaagatttgggatgttcctttgaattgaggatttgaggatatacatggcactagattcgggagaaaatatagggattaactctaagaaacaataaaaaaaaggatcatctgcactgcactgccgctaccctctctttagtcccggttggtgttatcaaccgggactaaagatctatttttagtctcgggtatttgaaatctttagtcccggattcgtactcccggttggaaaaccgggattatagaggggttaccaaccgagagtaaaaagtctttctccaccagtgatttctatctttttacctactgttgatcagcaaatagatgagtttggttccttcaatatcttttatcgacctaccagcgatactactttcgtactattgaaggtatttcgatcttttttttctctatattaatttgaaacgcagttgctagaagtgaaattattttggaacagaaaatagtacttttttaaaaaagctaccactgcccttagcctcacagtaatttagcaataatgtcttccatgctatatctacattcaattcaagaacacattcgaagtgctaaaattttattcaacaactttagttgccagttggtacgaaattcgtcctacaatgcgtccaaattaaggaggaaggtttctgactgacaaacgtgcaaaagtttcaataaattaaaacagccaagtcttattttaaaccagtattttttttatcttatttatttagaaaagaagcattcttctattacaagaaagacgtacggacgcacattgttctcacatcacccattatttttaaaaaggggtacacagtacttagatcgattaaaccagcaatctttctgataattaagcagtaattaacaacgcacatatgttcattgcctaattattcatcgttcatgctcatccaaacaagaaggcaaagcctacccaaattcatccgtcaatcactaccggccagccgactactgaaactgaaaggcaacgggattttttgtaaaaaaaaaaaagaaagaaagaaactgaaaggcaatagacaaactgagattccaacgtggtcaaaatggaatgcgaaacctaacctagctaatactctacaatatctggtcaaacccaattgcgctccaaattcctaattcgctttctttgctagaaactgcaagcctgcctgccagaaaacgagattgattaatttgaaaaatacatgactaactgaaccgtaaattataatagtactgtagtgaattaaagatatctatgggtgtcatcatatttttcttgggaccaacatagctctattatttgattagattagatcagattataactccatattgtacagggtagctaggaacagaatttgcagaggtaggttgtatagatgatagtaccacattgcagcccatatgcattgtatctgtatgcatgaatccaagatagatagataaacttagcaggttaaattactgtgtctatggcggcacaagtggttaattatcacttggtacttatccttactcttcttgattctactaccaatcagggttggaaatttcggtatatcactgacttccgatcaaatcggttaaaccgaaaaagtaaacctgctgccaattactctacacatgcatagaaacaaatcttctgacacaccttttattctgactttcaatctatgataatcttgacatgtggacttgtttgataaatgatttacatatatcagtgacccgtgtttgaggaaagtaagtcgtaggatcttaatcctacatacatgcacttaacctgtatttaattatcctagatagcttaattagttacatgcatatgctttaggttattagcgatttccttcgtttcaggtcacgagactttttaactttagttaaagtcaaactgctttaagtttgtagataaaatggtaacatttttaatccaagataaatttattatgaaaatatattcaattattgtcttgataaaactaatttagtattataaatattattatatttgtctataaacttaatcaaacttaaaatagtttgacttatatgcggctagcttgcatgtcttaccatcttgttaggttgtacatgccacctagctcacatccatgcatggaagctatatatatcactcgccattgctgcccctgcaatcaacggaagcttagctgagttgggtttggtctcgccgctggccggagtagagcggtccatgtgctgtaccggcgacgaggtggcgggacccggagagcagcggcggcggccgctcgacgccgacgccggcggcgacaagggcgcggtggcgacgacgtcgtcgtcgttgttggcggcgccgatgctgtcgcggcggaggcaggcggaggagatggcggcgatggtgtcggcgctggcgagtgtcgtggccggcggcggcggcacgtcgttgccggcgaagaggccagccgagagagagcccgaggagggcgccgccgtggagggggtgtggtggtcgtactgcagtgagctcgccgccgccgccgccgcgccgtcgccggcggctccatttccggccggtacgtacgtgtacgtaagcagagcagtatagtaaaagttgaatgcaacatgattaattaaagtctacctcggactttgttaattaaccaaactaatataatcatgattacattgatcacaaagtgacttgcttgttctctctatcaccttttctaattaaccattaggttgatgattaacattaactaaaatgcatgcatctctcttttcctttggtgaaaaaaaaggaggattgattttgaaccttattgatatgaaaaattacaattgagaaaatgatgaacaaaacagtaaaactacgtatactttgcaattttatatgactaataataagagaaattttaatgactgattaagcacaattaaaatgaatgataaagctttttttttattattttctctttgttttattcaaaagtaatcacaaagatgttagcctggtaggagtatattgttatagtttagtggtgtttacactaacacacacgacgtgcacgcatcttgcagcatatgcataagcaaagcatatgggttggtcaatgtgcacgtgtggatccacgcgtcacacgagcagaggctgctccaaccaccgccacatcgcaactaatataatcattgttatggacaaaattaagagatcccatgggcttaatttattcattagggaaaaagattaagagaaacaatgggatgggtagctcactaacaaccaaacacgtgttccttaatcgccacgtttcgtcattcttagcatcaaacacacgaaatgaactttgttttaaaaacaaacacacgaaatgaacttgtgactagttaaaaccagtagtccgcattgacattaaaatataggaacattctgatcatccaagagaagtttgcatgtcaccttttgtattagtttaacacaaaaacagagcaagtgagaagaaaatcagagtatctcaaagagagagaagcaaaacagagtaaccaaattaaccagatcaaattacttttaaaaatcacagctcaaatcactgtgttacaaactttttttactacatagtttctggatattattagtatggatacatgaaaataattgaattttattactatagataattaagcgctaatcaaaacaggttcttgtcctaatctcccctgttttttttttcttttttttacgcgttcgcaggctacgtgccatcgccggggcaacactcgcctgcgtcggcggcggccggcgacgaggaggagctcccgtcgccgtcctcggccgactccagcggcggcacggcgaggaagcggtacagaggggtgcggcagcggccgtgggggaagtgggcggcggagatccgggacccgcacaaggcggcgcgcgtgtggctcggcaccttcgacaccgccgaggacgccgcccgcgcctacgacggggccgccctccgtttccgcggcagccgcgccaagctcaacttccccgagcacgccaccctcccaccgccgccgacgacgacgacggccgccgctcaccggtgcccgccaccgccgcggacggacgcgctgctggagtcgcaggagctctctcccggcgccggcggcggtgacccgtactctcagtacgcgaggttcttgcagggctccggcggcgacggtggcgaggcggcggcgcggcccggcggtggcgcctcgcaaagaacgccacccgccactacactgctctacagcttcgagggagacgctgcttccgccgcctgcctctggcagccggagagcggcggcggcgggatggggtggccggcgacttcgccggcggcgtggttggagtacggtttctacccgccgccggagcggcgcgacacggacacgtagggttaatcacgatgtgatcctgagcggaataggcggtgacgctgacaggtggggcctacttttgccaggtgcggtcaacggtcaacctgaagttgacgtggcatgccacgtaatgcggcggtcaacgggttcagacggaagtgggtcatggacggcacgagacgccgtcagaaataaatgctcgaaactgacacgatggattacattgttcgtcaaattctcagagggccacatagttgcaggagggggaattattattcagcattgtttttttcgtaaaattcatcgctccaaaaacatcacacatctcaagcttgtacgaatgaaactagtgcagtctgaagattttctttttctggttttatagaacaaaagatttttgaagaaacccaatcctatgaaaaaaaatttcttatatgaaaggaatgggcatccaaaattcctgtaaaatttctctgaattggctcaaaacatggctatgacatggcttgtgtctcatgatgaatgtactccgtcctaatttgcctttgattaataattctctttcaaaaataaatcctcttgggaaaaaaattctcttattattcatgtagttttccgtaagatttggagttctaggaaacttgagtcctataccttctttgactcgtattatttgagaatcatgtattcatataagctctaaaattggctattacccaagactgtacgactcgtttgttgttatcagtgttgtgtaacaaggagtcttcaaaaaagaaaaggaaaaagaaaagaaacagcaccgaggaaattagtatcgacatcaaagaaataatgaaaaattacaaaaatctgtcgaccgctccagttgacaaaaattcgtaatattttgttttttatgatagagccactagtagctaggtactcttactcgcatgtcattttgttctcttcccttttcttccgtacgaaaaccgagtgtacttcggcaaattcgttacgcctcccgccacgacacaagagccaatcgcgatatcgcaccgtgtgcattcgtccacgtcagcaccagggcatgcgtacacacctgcaccacgttaacgaaagaaaaaaaaaagatcagtcacaatgccattggttgataatatcttattataaactgtattctcttcgtttcacaatgtaatactttctaccattttccacatacatatagatgttaattaatctataaatatatatatatatatatatatatatatatatatatatatatatatatatatatatatatattaaatcattaacatctatatgaatgtagacaattcttgaaagccttacattataaaacggatagagtaagatttaatagtgattaaaaaataatttaaaagtataaattttatatatgtgttcttaccgacttaaaagacaataaaagtactctttaattaacttcaaaactaaatttaaattttaaattttaacaacgatttattctttataggggaacaatgaggccctatgctaataaggaccatgactccataagctgaagaccggtgaagacagacatgacacatttttacaggtcaatgcaaatgcagttgacgctatcactggctgatggatttggttcctacgcagtttctagtatgacattttagcctattagccgcttacacttattagggaagacattcaaatagcgcacgattagttaaaagcagttgcatcaacaagaacacaaatggctattccttgccaatttcaacatggaatatgcatgcgacactgccccttttgcataagtacagaatttttcgagcactcccaaaggtgttgtgactggagcacatgaaattccaaagattagctgtccttatgctgaagatttccaaaattcagctcagtgtctttcgaacttaactgaagcggtatggaattttgattcctcaagtgactcaaggcactgaccagcatcttctcgatggcaaaagtcagtgatttgtgcatactaaatagaatcatcctagcaagtatcgacatttctttttctcataaggatttgttctcaataaacatactttatatgtcccctgaagggaactcttttttcaggggggacccgaagaaatgacacctgacattatgattgtggtacattgcacagaaatttagaacctttcttcagtaaacataaaatatgtttgcattttattttccatatagaagcttggaggtttttccactaacatggcaaaatttgaagagcatactcaacatagcaccacgcgtatccacacaataaatacttttcaagaacatgtacatatgtactgatatttgaagagctatgggaagtgatattttgtttcctccaggttcaaactaagtggtttgacattttaatgatatctgcgtctgcatgttcttagaaatttctcaatttgcaaaaatagatgtgcacgactttttgttcaaataagattagttaagatagatacacatactcaatcatcaccgtcttcgttttcttcttcttcgctgcgctgttggtggtagcttctcagaagggccacaaggaagtgtagttcctgtttcactctctatgcgtctcttcagctcctgtagaattcggatttggcccaatttctctggagataacttttcccagtaaatccctgcatgcagaagttccccaaaaatctggtcacataaggtttttttgccggtttaccaaaatattaaataatacaatcattcataccttgtggtttcgcgatcgtggtatttgtgaatatgacctgagttggagtgcagataatgtcaactggtacatcatgaactaacagcttctcaactggaatgtcattcactaattgtttgtcatgcactgcagtcatagacacagttggcaatttacattagttattaatcaaggaacaaatgagctaaaaggcaattaatttaaatttgataaaaaatatataaaggttatccaagaagggataaccagctgaatcaatataaaaaaactcaccagttgttactatcatggttgaatcgcttatagatcccatataacgcagcatcccatattccagctctgcaaatccctatagaccattttgatgaaataaaggagtgggaataagtagtttcagtagatagagcatgattcaacatttcaacatagtgccaacattggacagaagtgaaaagcctatcgctcaatttttctctcaaaggaagaaggaaagcaggtcaaacctcattatttcctctattaatttcttccatacaaatgtacaggagagaaacaaattaaactctgcgtcaagtcttcaactgcagaaatgcaattacaagcagagaatagttacctcgccctttcctagtcgtgctcctgtgcttggatcaactgcaaccgatccaatcacaatcaaatccactttaattttttcatctagacctataggtctcccgtatttggctgcaccaacagaagtacatgcttctggaatacatccaatgggtatcatgtgagattccagaactgagaaaaatcctgtccttagccgaggtgcggagtcagcaactttttatctcctgtgaggatccaagtttaacctgattagtgcatatggctatcatagatttataattagttgattaagatgcgcaacagattcaaaagcaacaaatggcatttaaaagcatcaagcactaataagaacagtatggtttgtcttgcaacacaaaagtcaacaaatgatctgtcttcaccggttttcatcaaatgaaacaagaacctacagagccttgagaaaactgctaaaaaaaccactaaaaaaaat

SEQ ID NO: 14952 - DNA, 1193 bp, Oryza sativa
aaaaggaaaaaaaaatccatgcatgcatacttgtgagttgtgatgattaatacgggagctaattagatccatttctaatgtaccaaatcctgaatcaaatgtacaagtacgaacacctacaaaaaatacagtcacattattaccgtggaaatactcagtagtataaggtactccgtacaaaatactactctacatcaatagtacacgtacagagtatagaagcaaagagtacatccccacatttacacatcgccaccacttcgcttgcagccacacgtacgtacgtacacacaacacacacgtcatcacatcccgtgccgctacccgtgggccccaccacccctgagtcactgacagcgccggggcccaccgcgacgctccacgtcgtcgtcgcgcgcgggcgacacgagggccccccacaccgcgtctctgagtcactgacaggtgtgggccccacgggcgaaacccagagtgaccgacaaactcgaaccgtcgtcgggtgcaccaccggaatctcgccgccaattaatcactgtacttagagcatgcccaacagcttcctttttcaattccctatcctgtgatttagggaattttgatcaagaaacagatccaacagattctctaactaatatcccaatatctctggttcctcagtccgcatatatcgttcctcacaaacagggaagcgattttgttcccaatatttcctcgtcggtctctctcgcgcgcaaagcagtctctcgcgcgcgcaaagggaaaatgttcccgcgcacttctccgcgccctcgctcctcagcggcgaagccttctccgcgccctcgctcctcggcggctacaccttcttcctcggtgggggcaccctcttcctcggcggcggcgtcctcttcatcggcggcagctcccttttcccttttgcaaggcacggggcgtggtgtcccgatgacggccggaggtatgccgtttccgcggtacggcgagttctggcccggcggccatccgtgccctccaccaccgcctggcggccatccgcgccccacaccgccgcccggcggccatgcgcggcccccaccgccgcccggcggccatgcgcgccctccacaacgctactccggttttcaggcatccgaggccatggagaagctgacatctagcgagccattggatcccctttcacacgaagcttctatcgg

SEQ ID NO: 14953 - DNA, 4876 bp, Oryza sativa
gaatccgcgtgcaaaccgcgagacgaatttattaagtctaattaatctgtcattagcaaatatttactgtagcaccacattgtcaaattatagcataattagggttaaaagattcgtctcgcaatttacacacaattttggtaattagttatcttttcgtctatatttaatactctatacatgtttctaaacattcgatgtgagtcacgtgacagggcgtaaaattttgccagggatctgtcaggcctaaaatatcttgaatgattgaaccagttctaaccagaacaagtccgcacgatcacgtggatctagcaattttcgaggcatgtgcgtgtttattaaaaaagaaaagaaaaaactatgcttatataatacgtagtactatgtgagaaggacaatgtcaaaaggtacaatgaattgaacttgattaattaaaccataaacttggaacgatggcatgatggccggagagcttaatttgtcatatgggttatgcgaccccactaatcaccaattaattattcatttcctagtgatcatcattatactttcgtacaaaaaattctccacttcaagtaaggtattccctcagaacaaaatccataaagtaaaaaaggtatgcataataatttatgaaatttatcgatatctctaagaacatttaagccaaaaaggaggaggacaaaaataattaaaaaacaataaattacaaaccgtttgtgcgaacacactaatcaccaattgaaaatcattattcatttcgtaatgatcatcattagactttactatccactccaagtaaggcatttccccggaacaaaataaaatgcataaagttaaaaagaaatttaagtatgcataataattaataaaatctatcaatatctgagaacatttaataagccaagaaggagaagaacataaaataaatgaacaatagaaataaatgacaaaccgtttaggaaaaaaaaccgtgagaaaaaagaatactaaaaaaataattaaaaataccgtgagagtaatttggaggggaagtttccgaccacggttgtcttcttcctcccctctcctctgcccaagaaaaagatagataatcatcactcatcagcatgctccccccacatgccctaacaatccaaaattccattccaatttgcaaaagagagccaaaattaatcatcaaaagccggttcttttgatccccaatccatcctcacatggagcaaaaatctaatatttgcttgtgacctcacctggaaaatcccctcgcaaagaatccacccaagaaaggggagagaaaaaaaagagagcaatcaatcaatcaatcaatccctcccattgcttcacatttcttccttcccttttgcctccataaacctcccctaaagctcctatttttaccccccaaatcgcccaagaatcgccctacccgagagcccttgatccaagatccaatcttttctttcccttttttatttttaatttttttgcgttggtgtgtgttgttcaatccaaatccctataggaggcgagagagagagagagagagagatagagagagagagagagagagagagagagaaaaggttcgaaatttttgatcggaaaatgcagcctgacccgcagccgcatgggcgggggagggagaaggcggcgggggcgggcccgcggctcccgccgccggtgaccgcgccgtcggtggggcggccggcgtcggtgctcccccacaagacggcgaacgtgcgggaccactaccgcatcgggaagaagctggggcaggggcagttcgggaccacgtacctgtgcgtggggaagcccgacggcggcgagtacgcgtgcaagtccatccccaagcggaagctgctgtgccgggaggactacgaggacgtgtggcgcgagatccagatcatgcaccacctctccgagcacccaaacgtcgtccgcatccggggcgcctacgaggacgcgctgttcgtccacatcgtcatggagctctgcgccggcggcgagctcttcgaccgcatcgtcgccaagggccactacaccgagcgcgccgccgcgctgctcatcaggaccatcgtcggggtcgtcgaagggtgccactcgctcggcgtcatgcaccgcgacctcaagccggagaacttcctcttcgccagcaccgccgaggacgccccgctcaaggccaccgatttcgggctctccgtgttctacaagcccggtgagcatcctcggattctgcgcactttgcttgattcggtaatcggcattataatcgtagctcaatgttgttatttggtccaactgatccgacaatggtatgtgggcaaactgctgtcattgcatttagcagagagtgaactcgttagcattttacatatattagatgatggttcattatgctactataaaagcgttcgctgcaatatccataatgtagaatgttggaatttatatggtaggagcaattgcactggattgaaacttcgccaaaactataagcaggagattatagtagttgatggttgaataaattagtaatactatataaatgattagagaggattattcctttggtctgactagtttgattttctaaggtatttctggttgttggcatatttcttttggtaattttcataagctaatttttttagggaaattcattttgatcaccagtagcagttctcactaggatgtgagggtagatgtgggggttatgcagcattgtcttgttgaaattctggtgtgataccatgggggatttgaaaatgatttccagttttaacagtaatggtgcgatgggtgattattcttgtggagtaatctgagttcatagcatataaaatgaaactttaggtgtgtcagttcatatgtgcatgcttcagacataaaatcattctttttgtgctaatctccatgcacttgtctaagcactgtatcagatagtagaggcatttagacaaattctggtataccagaaacatcacattctttgtttttaactttggcaggcttatcattcctgaaaaagtttcctatactatcttttctgaaatgatacacttccagcatagcaatatcaatttcagtagacaatcttgccagtgattacctttttcacaatttggacatgagctatcttgcatacgatggtttttttggcagtaatatatttccttcaagcagattcccaaaaatggttacgctatgctgtacaatatgctgcataaaaggaacaggagcccttacgtgttaccttctaattacttgtttgcatagttgggccagttattctttccgggaatacgcaaaagaattgtgcatctttgtattaagactttaaaagtgccaaagttttacaagactatagccatggaagggtatactcaggaaaataagaaaaacacaccatgccacgtgccaacaccaccaccacactctgaggtagaggcctagcaccttgacggccgccactagcctaaatgatcgtcgccgggcctaaatgcagccacaaccaaaagaacctccaaaacaacgcctccaaggaggttgcgacgttgaataaactgctgattttttagaactttgccttcaattgagtgtggccctatggacaggaatttcctgttatccactccatcagggagtgaattatttagtttatgtagcatttgcttgtgtttattataaataaccaattaaaagttgaaattcacactcaaagtttgttggcaatgaataatgttcctttacatttcttcaggtgacaaattttctgatgttgttgggagcccttattatgtcgcacctgaggtgcttcaaaaaatctatggcccagaagctgacgtctggagtgctggggtaatcctgtacattttgctgtgtggtgtgcccccattttgggcaggtaaaattatctgttgtttctggatattgaattgtgagtatggaatttccggattaccatgtttacataggtaaaattttccttttgcagaaactgaatctggaatcttcaggcaaattcttagaggcaaacttgatttggaatctgatccgtggcctagtatatctgatagtgctaaagatctagtccgtaatatgcttatccgtgatcctacaaagagatttactgctcacgaggttctctgtaagtctttattgccccctccctctccctttctgagggttgatgtgtgcttaagaacctatgtcatgaaagtgtattttactaaaaattgtttgcctacgccaggtcatccatggattgttgatgatgctgtggcacctgataagcctattgattctgctgttttgtcaaggctgaaacacttttctgcaatgaacaagctcaagaagatggctttgagggtatggggatctttcatgtagctgatttgcgtgcaattttatttttcccattgacctattgttcgcactaagtttagtacttcagtagcgctacattagattaatgagcctcacttctattagcatcgccttattattttgatgcattcaagttgactctatattttgtgaccttacattcaagttaactatgcacaaatatatttcctgccttctctggttactcttgtagtttgttaacagtcctcatgttgtagtatgtaatgagaacgaaatatttattaagattagaaagaatttcactcaaaatggaagtgtctaattgaacttatgtcagtcatttgcacatttttaatggagaagattaggacttgcatatccgaactatcgtgtaactgttatgttattaggcttgtctcttcctcatttattagaggtgcagcctgttccattagatattgttcaactggcatcaggggcggagctagcaccaaaactaaggctg

SEQ ID NO: 14954 - DNA, 9309 bp, Oryza sativa
attgataatacatgtagcgactgttatgctcgttagcttggcatgtgttaagaatgttactttctgaaacatatttgcaatgtcaatggtgaatgagcttttggttttgcacataaatgaagagttatagccttgtaaaatgtagcatgcactagatgaggtaggggcactttagaatgatatgtctatatgcttcttcttcgagtcctagagtattaaaaaagaggaagtgatgaagtactcttagtcaactatgggaatgatgctagacagctagagggtgaagataagaagcacacacaatttccttgactattgaaaaatacaatgttgttgagatatcaccagttcaccccctgtacttctatgttacatcctaaacttaatttagtatgagaatgttattgtgactttgtagatcatgtgaatggtgtgcaaactgcatcttcttttctatagtatcagactctgaaatttgttagagtgcttgtgttggttttgtttgtcaaagggcgttgtctttttctgttcattccatgcacgttttgagtattactccatttctttgattccctctttatgctgcagcttttattgaccaccattttattttactgttaagcattccaagcatgtttaccccttaacatacatattgtgccatctgtgcttttaaacctttcgttgtaatactcatgtttggttatacatgatgtttgaaatagcgtagccatacttgtttctttttatgtgcaatctaatttgtgacatgatgaaatgaatgctacctttctttgtaaattactagctaaattgtgtgttcaactgtctatactcttatgtacaaaacaaattcttgtttgtaacttagtggaccattgtagctatctaatagatcttagtcatgcagctataactgtcttagataataacaaagccaccttgcttccgaatgcatttgtaccgctgcatggtaaattttcaaaatctcactattctttggttatttgtagctatacacggtgtttactttgatggaacttgttacgtaaacttttttcatgtgaacaacctcatatctaaacacttaagcttttttcactgtaattatttacctcggtctttgtgttttctaactcagaagatatttacttcattttctgcagcttctggagtatgttgaagaatccaaactaattgatcttggagaacgtgattatgcttcacgcgtggatttggtagctaaaacccacagtatttacaaagctgaaaagtacattgagaatgttcctgcatctcataggggtgagattgtatacaggactcttttggctaactgtgtggctatagccaatgtgaaaaaagcagaacaagtcttcaataagatgaaggaccttggatttccagttagcgtattttcttgcaatcagcttctgctactctacaagagagtggacaagaagaagcttggtgatgttctcacaatgatggaaaaggagaatgtgaagccttccctcttcacttataagctccttgtagataccaagggtgctgctagagatattgaagatatggaaaaggtcattcaggcaatgcaagcggatggaattgaaccagatcttctgtttcaagccacaattgcaaggcactacatatttggtggttatcgtgagaaatctgaggcaattttggagcaaatggtgggggatgatatcaatgaaaaccgttctgcttgcaaatttgttttacccctgtatgcttttcttggcaaaaatgatgatgttgaaaggatctggaaggtttgtgaggccaatgctcgtctagatgagtgcatgtctgcaatagaggcttttggtaagcttggggatgttgaaaaggctgaggagatatttgacaatatgttcaagacatggaagacactttcgtccaaatactacaatgctatgctgaaggtgtatgccaacaaaaagctttttgacaaggggaaggagctagcaaagcggatgggtgatgatggttgcagactagggccctatacattggattcacttgtgaagctctattcggatgcaggagaggtggagaaagctgattccatattgcataagctatcatataagaacaagattaagcctatgtacaccacatacttgatgctgcttgatagttattccaagaaaggagacgtccataatgcagagaaattgttcagcaaggtgcggcagatgggttatactgggaggattagacagtatcagctgcttcttgaggcatatctgaatgcaaagaccccaccttatggattcaaggagaggatgaaggctgatgacattttccccaatagggctgtggcgtctttgcttgctgctaccgatccattcaacaggaagaacgcaatgtctgaattgctcgattaggttcttctgttagcttcattttgtgcccatctaatacatgtgctggttgtccttctgccaaaatatatatgacatgacgatgagataataaattagccttagcgatgtaatgaactagtagtgtttgcttaccttttgcggctattgccttaccgagcaggcgagtaggattggaatcttatgaatgttaatcttagttctattttgtctacttcattgacgtgtcactatctcttgacttgttaattagcaaacaaatgtcagttttgctagtccttaagctaatgatatattaaggtttctttaggcattcttaaccattttgccctatgaacttattatgtttgtttgcgttgcactgtgctgtactctatcaacatttctttactgatagagaaaatgatactcttgctgcactgtgatctgacatatgttgcaaccttcagtttgtttaatatactggtttatcaagacaacattctttcctgagctggagcgatacgaaattctattttgatttgacttaaaaaaaaaggcatttccatcgttccagatttgcaaagatacaaaattcatctttgacacaggatcaaaactgcttcgatccatgcgaacacttatactgtcactactcaggatacaagcaaggggagattagatatggcgataatgtgtctttggcttaagcattctgaattctgacacaaatcccccaagcaaaaaaccgggctttgatctctctattctctacaggtagctgctgacgacgagcgacctgctcatgtctcggaacacgctctccaccacgccaccacggacagctccgtcgccgtcgtgtcggcgccgcagaacgccgcccagtcgttcaccgccatgccggcggccaccacctcgctgccccggttgatggcgtctgcgggtgaacctgcatcatcatatcattcacaggtttcagagagctgcaaactccagtgccagcctagctaattgggggtagtagtagtgattagtgacgctgatttagttaattactccctccgtttcacaatgtaagtcattgtgaaacggaggaagtagttgtgataagaacttacagaagctccccaccaggatgtttcctgcaatagtttgcctgaaacacttccacaccaagaacatctgagatgacctcttcggttccctgtttgcacgcaatatatatagtttggtcagatggacttatatgctggcattgtttgctaattgctcctatatgctcaactctgtgattttggagtagatttatagatgcatcagctgcctccatggttggtgttttcatcgctattgatggatgaactttttcccacattggccatctctgtcgtcatcaagggaaatactgaaaagctaagtcatcattagtttttttctttatatgataatttccttatcctctgcctcactacatcaatcggttctccattgagcagtgagtcgggggctacagatgttatatcatattttttcaataattttcataatatctatcttgattgcttgtgaaataatccgagtaaaaataaagtgtcgatcgagttatggagttctatcttcctatgctttccgtttggtttgtcgatggatagttgcctttgggccgattcctagcacccggaggctcgttggatggaccgagtaacgcaaggtgctaagaattacttggaagaaatcaacagcatagagataagatgatttgttttatgctcttaacaattgcaaaattacccgagtagtaaattctgatccgtgaaactctgttccattaatgatgaactcaagtcactcatatgcatgtctgggaagtgctttggccaactcccggtgtgtgggggctatgactagtcgggcagagtgtttaaacgtaaggagtcatttgctcggggaaattaaaattgacaagaggagaaatacatatttataaacatcttaaaatacttgaattttcctcaagtactgtatttacatcatatactactcatcctatatgtttgttctgcaggatctagatccagatatgtataatggggattcatgactttaagcttatctcctaagattcaagaatggatcagtcagaacatcaccatcggcttgcctccgccgttgccgactggtgtctttgcctatacggttgtgtaacatcctgaaaattcctaacaataaaaatcactaaaattttgaacttttgaaatataagaacacatgaaatgatcacgactataatgatcgtgtttataaataagtaattcaccggaatatatagattgatacttagaacatttcaccgagttcctcatgacatgaaaatcactcatataaaataatggtcatataaataaattaagctttatatataaataagaatatgttaatgtttaattaaacaattagattaatgttgtaccgagtctcaatttatatttatagaataaataaatccacgtaaaatacattgttatacaaataagtttgttcaatgtgctattgtaataataatggccacattaggatattttaattaattttagaaccctcaaagcctccaaaattatctaggttaattttggaattagacctcatttaaataatgcaatagaaatatatatatatatatatatatatatatatatatatatatatatatatatatatgggtaatattaaaaaatcgagtaaactttcatctaaattaacacatatattgggtaaacatcatttgtgtgaaatctagaatttatgggatgagaattagatgggaaatagactaaaataaggtttaattagaaataacactgttcattgcacattagatgtttgattgtgtccctagccaccctagccctcttcctccccactgccactgcacctagctggcttggagccccgagccgccgtcgccgtcgcgctgagtcccgcgctgcctcgcgccccgctccgtcccatcgccgcgccgcgccaacttcacatcgtcgcgcctcgcgcgtgcgccgtgcgaacgtcgcgtcgccacgccaacgtcgcatcgtcgccgcactgtcgccatcgccacgccgcgccgctgccgcccactgcgtgcgtgtcccgtcgccgctgccgcgccgtgtcgccatcgccgtcgccgcgttttcgccatcgcgccgcgccgtgccgctgccacaccgcctgcctcgagacccgcccgcgccgcgcgcgtcccatccgtcaccgccgcgtcggctacctcttccctccgccctatataaacccctcttggccaccctttcaccccgcaccacttccatcccctttcccctctttttctcccctttccggccgccgtagccaccgccgccaatccgccatgccccggcgcctcgccaccgccgcgccgccgttcccgccgtcggtccgggtaagccctctttcccccttcgccgctcttcgccgcgccacgccgcctcgctcggccgagagagagaagaaaggagcggagtagcgagaggaagaaaagagaaggatgagagagagaagataaggataggaggggtagattagagtgggccccaccgagattagggaatagtaatcaccctgttaatctgcattagactagcctatgacctgtgggcccgggtgattaaaaatctaattatgggtagtttttcatctatagcctatgacatgggggccccaccgggatttaaaggccggattgaccttgagtgccgatcacagaacttgtcgcaatcctagccaatgcagagttcaaagtctgataaagatatcctagcagatatttgcctaagggaaattgttttttgtctacaagggcttcggctatgtgttgccagttggtggtaggaccaccaacttgaccacagaacaaaaatttttccagccacatcaccagaaaagctatgtgttctctgggggacataggacctgtacccatattcatggtgatatagccagtccagccacctatagtcctggttttgaaagagaacttgctcttggtattcatactgactgggttagccgatggtgtgatgtccaaaccagtgatcataactatgtccaaaagggttggtgtcatcggtccttggttgaataagaaagcattgtgttggaccagaaatagcttgcagccgataacataggttcatccttattcattttggctaggatcagagccacgcactatgctattccaagttcttcccaatgagtttgtttgctagccgataccctcttataccaatccggccaggttttgacagcagatggccaagatttgaaagcaatagtccagtggcctaaactagggtttgtcagtctgaagggaactctattgttttcggcattaataagctcagtgggatctgtgttgccgattgggcccaagaaaaactaattctgaagagctaaactaggaactgcgacctgatgggaaagatgctacaacagagaagagaagaaaaaagcggatcatgaaaggaagacaatctgtagcaaggaagaagaaagatctaactgatgggacttacctcagggaactcggtcgttggagcgcttgagggattggtggaagtcgacatcgttagatctagggttgtcgccagacttgggggtcgcctgcgggctcgccgatggtttcaaagggatcgccggagaggttggtgactaaagcagtgaaaacggaaatgacggcgtgaaaagcggtggtaactatttaaagaggcgcggtaacggtcgaaatggaaaagaagccctagattctctcggggataagattgaataaatccgcaacattacaaatgtaacggacttgggggccatgtgttaacgaccaaatttggtaaatcatacattggacttggagttaaagccaaagcggatttggaggaaatcgatattctcagaatcaaagtgcgcatcggttgcaaaccgaatcggctacggtgtacatcggttgataccgagttggacagggaagccgatacagccgatttcggtaaagggatcttagaatcattgtcggatttgttttcagtgcttcatgagaattgccatgtgcggattgagtccgaagaaggcaattttatctattaattaggttattttatgtaatttccttatatatattttcggtaaaagtccgcctaagggacttgatcgtatcttgagttgtaatagatataggagtcgtgtccgacaaggacatgttatgtattttgggtataaatataacccaagacagtgtaatcaaacaagaatcagttcaataacacttacgacgcatcgccaccttttttactttcattgttttcgacgagttcttgctttcgagttgggctgcatcggtttcgatctccgacaagaggtaaagcttgttatgacaggttgcgttctcggaattagtgcttacatcttcatgacactctaattttgtttatgtaaatcgtcaaattatcatatatgctatataatttagatcaattaattacacgttattacaacctcgttttacgtgaaacacttaatcttcatcttcatccttatcttcagcacattcaaacaccaccttagtagagctctaacttctaagtttaactattagagttggatttagggtgtacttgtagagtagtctaaactttactccatctctctaaatttttttttgtaagagtactcaagcccgctccgcttcctttttttaacgctgaggacctcatgttttcgcttatgcttagatttatcagccaaaatttgaattttcaaccttaaatttggagctgattttgggggtttttttttatcgaaatttatttttcagccttgcttttagatcgctaagaacacgtatataaaagttttatttacaaatttcttttcgtccgtaaatatgtgtttggtttatttcacaaataagcgaaacaatggggctctgaaactatttggttgagttttaactcaaaaagagatgaagctcgaagtctaccatcagacccttatcaaggaatacatgtgggcttgcttggtagaacgctcagatctcagtgacccatgctagaggaaattaacataccactgtcaacgggatagaaaaaaaaataaacatgcgggtacaaatgaatagctgattagctcaagattttgcaatcactcttgatggatacaacacaaatgaattaactactataaacttaaaaaattatctaaaacattttttgaaaaaaattaaagtgtttataaaaaacacatcgttggaagctgaaagaagcatatcgccttaatccattcttctattcattcgagaagaacacgcatcatatttgtaatcaatgagatgggtgtagatgcgtagtataacatattcattatcaatacttactttaatactgtattgtgttactagcagaaaataacgctgaatcattcatcaaggtgccttcagatacgtcatgttgtcgtcatgcaagtacaacgatgagctcagctgccatggttgagtttcacctaccatttcccccacatccatcatgcaaataacactactcataactcaatggaggacatcatcattcatctcctcttccattcaaacaagctatatatatatatatatatatatatatatatatatatatatatatatatatatatatatatataatattcatttccatgatggaaatagggaaaaaaggaacaaatagccaagagcattgggagataacaaagataaaataataataataaaaagttagaaaaccattgtcacttatgtaaacctattttatatacgagctaggcttatactacctccgttttttaaaagatgacgccgttgactttttctcacatg

SEQ ID NO: 14955 - DNA, 2919 bp, Oryza sativa
atcagttttaaatccatgtatggttgtcaatgcactaagaagcagggtgcaatggcactggtcaaggacatgtaccagcattcatgctacttatgatagattatcaccaaacattgcatcaccccacatggagatgttgttggttggtgaggttcaaggaacccttggagcacatctctatcttgtttttatgtttccacacacaactttagatatgtttagtctgtatatgttgagctgagataactctactggaacagctgcagaaattttatttacattttaatatcagaatgattttcctttttttaatccatgttagtggctagcaactttgcatgataattgatatggtcagatttgaaaggaagctccagggcacatgttgtccagaagaagctaatcatgtgttgaatgagtcataaggtttttacaggtcagattctatcgaacatttctaggtgaaactcaaaatatgaaaaagtatgcaaaggaatatcaataccacctccgtcccaaaacgttactacctagtaatagatgctcatgtccagattcgtagtataggatgtgtcacatatagtagtactagataacaacatttcattttgagacaagtatagtagctgggatgggatgacctgatgacagtcttttacttgccttttcactctgtgtcactgatgggatcatgtgcagaaaggagtttagcattcattggtttggtccaacttgtgaaaaatgaacggatgcatgacaaatctttgtatagtgtatcccaataaatccatcactctactgttcccattaaaaatgaataatttaaaataaaatcgatgatctgacctgctgcattgcgtgcttgagcacccatatcttggttcattggttgctatcagcatccccggggcggctccagcatacagtcgaattttttcatttttaaatttttattttttaatatttacagaaatattgtaccggtgaaagtatttacaaaagtaggtgacgtgagggacggacaagatgaaaaagacactagaaaaatgcatttttggcaggataaaaattacatttgcccccttgcagtccttgtagagggcggcaaggcacctcagtgcaaaatgcacacaccttgccgccccaggggctatttctgtaaatattttagatggtataatatttttgtaaatattaaaaaatgaaaatttaaaaatgaaaaaaattcgcatacagtccgggtggtccaacctttgaccaccctggatcgcgaaggcccaaacgaaaaaaagcccacaagcatcagagccaggttagggttagccggcagaggagagggctcaaagccccgtgcacgcgccgcctctccctccgctgcgctcctcgcctcctctcggctctcgctctgcgccacaggcccacagcgccggccgtcgcccatcggcggcgtcgggtccctctccctcctgcagtcctgctcgagctcgacgacgacgacgagtctatgcctcaagccctaaacagctcctcataggtgagttactcattttagtctttactctttagtatttacttttaatagatcggtcatcgatgaattgaaaaatgtggatgaaaaaaatgtgattgaaaactgaaacttagattttttttttatcaacaacttagttagtagtcaatataacttagtgtatgaaggatgggaagaaactattgtttcattttgcaataaacatagtatccaagttccaactttcgatggaaaaatatgtgcctcatggaagatctccacggttttatccggaccaaacaaatgatgatcattttagaaaacaagtgtacattggtgtacaaagaagtagtgtattgtaatcttctacctatctattgtaatgtaagatatttgaattatttatgttgtaactttcgtaacttcgaacttaaatgttggttttaatcaatttgtgatgttctgagctatattgcaatatttgaattatatttccaccgtatttgtcaattttgatttgattttgtaacatcgtgacaatttgggatgccaagtaggaccacccaacgaatcgatcctagagccgccactgcatcgtctcctcgtccgccgccgccgccatgtgggcgctccgccgcgcgggcaaccccctcaggtacctacctacccccgcctcctctctctcccccgccctctgccactgttcttgtgggatttcgttaacagatgattgattggtaataaatctgtggcttatgttagttcgtgtcatccgtgcctttctcccactcgcgtttttctgtccctgttgcgtggtggcgacaagtagatccatccaaatgccttgtttagttcttgggggtttatttgtgtgattttccggtgccaagttgtgtggtgtccccgttaataggccgtagtttcttgttaagattgatcattgggtcttggatgagttgatcattgccagtgatttatttttacaggtggggagtagggagttgctggtattattcatctgatgttgggactctgttttgttgtaatctcttgaatttctatgcaaattgcagtcttaccatcttgggtttgactgaaatatatcagtcggatgtatgtgagagacatgatagtgtatctactgtgtgtatatgtgcttgaagaagtacccatcttagatgtttgtctatgtagacatgattattactttgcgtagcattatgtacggaacgatattagatgtgtttgaagatggaacaacacctcttcttgtttcaatcatctggtcatgttattgtgaaatgaagcagatattttgtatttcgttttgcatgtgaatccatgttcacgatcataatttgtacctatcatcccatgtttcatgcgttgttaatactgatatttggctt

SEQ ID NO: 14956 - DNA, 1956 bp, Oryza sativa
caatcccgcttccaaaccgcgaaggcgtaaatcctcaatttcccgtcttcgaagcgatatttccactccactccacgcaatcaccgtccacctgcctcgccgcgcgccacgcgcgggaaccggacgaacacccacctcccaccgcccaccgcccaccgccgcgccggccatggctcccctcctcctcctcctccccccactccgcctcctccccgccaccctcctccgcgccacaagccgcccggcgtcgccaaggcgcggcctctcctactcctaccccaggcgcgtcgccgccgtcctgcgacaatgccgcgccgcggcgccgcctccgcctgctcctccggatgccgtgccccggtggcacgcggcgctcgcggctgcggcggggctgtacccggcgtacgtgacggccggcgccgcggtggccgtggcgcggcccgatgcgttccggtggttcgtcgcgctggcgccggggtcgtacacgttcgccctgggactcatcatgctcgccatgggcctcaccctcgagctccgggagttcttggctctcctccgcgagaggcccctctccgtaagcaccccaccccaccctgcaaattttggcactaaatatttctccatttctaggtgtacaattccatggcaatctttcaaatttcaattgtgtccttgaatccaagatcccaaaattgtgactgatccaaaggaaataaattgtgtgttttggccgctgtagatattgtttggttgtgctgcacagtacaccataatgcctgcctttggagcaattgttagccgggtgctggggctctctccaccaatatcagtgggactaattctgctaggatgctgtcctggaggaactgcttccaatgtggtaagattctcaaacttgctcagagaatatgccccatttgagatggatcctcgactggattattgccgcgaactgtctactttattgtggagataaattaaacattttgagaaataaacttaacaaaataatttagaacaagtggtctaagcaatgtagtagaatttgtttttaaagaaaatgtatttttagaggcgtgaagccaggggcggacccagcccagaggcaaggcccggaccggcctatagtatttgttttcataatattagcccatgggatattgggctttcaaccccaggccccgtgccatggcctagggtgcccggggtcggggtccgcccctgcatatagcaaataatacatggctcgactatgagtctatgacccgttttgtactgaaggggaattaaggatcaacacttcaacagacacatagtagtgtaaatcaagaattcaaatgtgcatattatttgaatgttcgagtgttctagcaatttcacagtgccacagtccaatgttgaattttaaatttccaactaggattaagatcaagtgtgctttatgaaggtatatcgactatttaaacgattgattccaacagttaacatatgttttctgagtgccaagaaacacacaattatctagagcaccaagttatttttggtggttcctttaggttatttctacataagacgttctgttattttactttatcttcttggctttatgaaccctgagctctccaagtatatgctgtgtgagtcaaatatgcatgattaaacaaagggtctctcattcaagataaaatcatgatggttggaggcagagtatcccacataggttgtccatgtatgtggatgatgtagttatgttcttcctagcaatattcggggaagcgtcgggtctaaataccaagttcgcaaaattctcggtgtttctgagctgcctagtgtggaattgcccctgtgctgttcatgattcccatgtaccttgggttgcctctgtatgaaaaggcacacaaatattttgcatgctgaaaaaatcatttgtacctggattttctttgttatgtattgacc

SEQ ID NO: 14957 - DNA, 1231 bp, Oryza sativa
cttgtactcgtcgccgtgcccgcgcatgtgcatccgcaggttcgcgtcgcgcttgaaccccttgccgcagatgccgcagaagtgcgtgtgcggcgccaggatctcgtcctcctccagctgcagcacctcgtacttctcctcctccgccgccgccgccggattctccctcgcatcctgctcgtcgccggcagcgccgacgcattcgtccatggcgccgccgttagtccataccttgaagagctcgtcgtagtcggggctacccatctgctcctcctcatcttccctgttcgtctcgttattacgagccgagctggagctctcgccggcggcgaggctgaccgcttgtgcggctccggccgcggcggcgggcggcggggtggtgcggctgaggaacgaggagttcttgagcgacgggaggaggctgccggcggtggagatgagctggacgatgaggcatgtcaggtcggcgttgacaagctgctgctccggcgtcgccgccgacgacgacgaggcgcggcggccggccatggatcggatgacgtccttgacctgccggatcttctcctcgatgaaggtgaggttgtccagcatcgtgtccgggctccagtccatgtgctggatgctaaccgacggcagcagctgctgcggcggcggcggcgccatgccgaggagagcgtcatccgccatgaacgggtagaagagaggattcatggaggtcaggttcgcagcctgatcgcgcatcgtgttcgtcatctggtcgcgatccattgcaagcttctgaataatctcgcgtgatctttattaggaaaagagatggcgcctctgaaatctgcagaggaagaggaatcaagatcgttagccagttcaaagattgttcttgttttttttcccccaagaaactatttgatgttatttttgagttggttgaaaagtcaagaaactgggaactaattagtagtagtaatctactagattatcaagtgatgcaagatttgcaatctgctccatccttttcactgacacagtcagcaatgctaaaatgaagtttaaatcgattttttttcccataaattacttgatcaaggttcttctctgaacgaatatgctacgaattaaaagatactaccagctttgatcattttcagaatcactaatttattactaacacaagacaggagaaaccaacatcctttttttttcctaagaacaaagaaaaaattttgcaactact

SEQ ID NO: 14958 - DNA, 7395 bp, Oryza sativa
aatgaaagatttcatgtgtaaggtaaactaaaacaggataggcactaaacagtacctgatccatcgtgaagcactttccaattaaaggaccaactggaaagtcttcacggaattgatcttttagatctttcaactctctctccctttctgacagtccctcagaatcctaaacatatgttaaaatatatatgacatagcagaataagatggcctggttgaaacaaccagaatatccaagagattcataaaaaaggggaacaactcagcaggagcattcataagatcaaaaggcaccatcagcatgagtagacaagacgagttatatggaaaaaaaaagagagagagagaaattaagcacacatacctcattgttcgtaactggttgtataaatttcatgtgagaggatataggcaaaatgttgagttcgtcatccatgacgacacatgatttgcaagacgctatggatagcaagaacctctcgttgaacctagcagcagcctgggtatgcgactctgtccggaatctttcatggacatcctgttggagcaggaacaactcaacttagtcaagttatctcagcaccgaagctaagatgtagcatgtaaaccaaaattgtcccaagtttattgatagaaatgggatcatgtatgtatgcatgagagaacaagagaagcagaaggtccaacagagaattgagctcaccatgaccattgtataaagactggtgagagaggaaagggagcggagcagcaggatgatcaaaccaccaccctcaaccgtctcgatggtcctcgcgagtaggttgggcgtgagcgcctcaaaatcctgcggcgccaacaaacaccatatcagtacaggggaattacactacaccacaccacagcagcaccaaaaaggagaaaaaccaagctaagcttgatgttagacagacagacctgcaggatgcacatgccgaatgtgttgccaagaaccctctcggagtccttgtagaggcagtaggtgatgtcagacgtctccaagaagagcgagaaggggtcggccttctcggggtccatgagccccctctgcatgagcttcttgatctgcttggcccgcttcttcttgtggctacacaaagcattccatacaggtaactggaacggcattgctcacacatctccaattcaattcaacaatcaatcaatcggtgcagcaaccaatcgagtactcgaatcgaatcttaagctaagcgaatatggtagagtagggatgggtaaggaacctgctgatctcgagcttgtcgcggtagcaccagaggacggaggggcgggacttgacgcgggacttggcgagcatgtagttgaggttgacgatctggtcgcgcgacttgtcgccgacgatgacgaacatggaccgctgccgctcccgcacgccgttctcgatcagcgtccggatgcgctcgtccaccttcttcctcatcctcgccctcctctcctcttccccgccgccgggccggtctcgtgtggtcacaggagatgagagcgcgcgacggatagcgcggggcggacggcggcggaggcgggctagaggaaggaaggcgccggcggagggtggtgcggcgaggcgcggaggcgcgtacgaggtacgagtgatggagaggaggaggtccggaagcgtggggatttagggtttaagacatagatgggcctttcatgggctcaaacttgaatctacggagataggagatgctgataactttttctataaatttagggtaaatttaattaaatctttattaggactttgactagtaaatttaattaaatctaaatttggctgtgctcttctccctcctttcccaactaacctccctctttttaccgtctgcacgctgctaaacgttgtattttttgcaaaagaatttctgtagaaaaattgttttacaaaatcatattaatccattttttaaaaaaaaattaatacttaattaattatgtttcatgagtcgtacgtgcgcgtggatgagttcctaacttatggtgccgaactcatgatgaaacggagggagtaataatctaatgcataccgacactgaaaaggagccctaatcgaactcatacaattcttaaccagaacaaacaaactccaataccacaacacagtccatcttgccttgcatgaacgaatttagctgtgcagactaaagttctctgcactctggaactctactgtagtagcatctacacaaaataagcgcagagcttactctattgtagcctctccatagaattggttaggcattaagcagcatacacattttctagttaatgctgattctgtattatcacatttcttcaagacatcagtatgacagatggtcataaagaccgtataatattagcgatataatgtgcattcataccttttttttttcctacaaacatgaatccctaactactgtatacatctctcaactctggagacaaaaagaaattcaaaaaacgcaaaagaaacaaagtgtgttatgacaacaatatcaaactattttcttctgatatccgagcacttcatcttcattgacataccaactaggtacatgtcctgcatttgagttcaagtcatttgattatcgtcaaaagtatagccacaaaaatatcacctcgtagtacgaaagttttatcagactatgttaacaacaaagtgaacattagtatgcaagtcaggatactaaccagtctatcacaattcacaatgcatctgcatttctaccacctctcttactaactagttcacaaagtcggcaaggcagtgtgtcaaggctcatttcacgcgaccttccaaagttacccagggtaccacacctcctccatgcatggtattctgcataggctacgggatcatttgcaacagctttcacatatgatgccaactcacggagtgagctgaattttgaggcatctataatagaattgggaggaatgaagtcccagacattgggtgccccgaagtatattggcactgacccagcctccaaggcatagaacaatttctcggtcacatagctttctgtcttagtattctcaattgcaagaacaaacttgtaatgtgacattgcgcagtgaagatgatcccaccagtgtggttttccattatcattggttgaacaaactggatacatggataatgccatgtcaggaccatcaacattattcaagcatttcccgaaagagtggtgcggaaccaatgacaggaaatcttttgcaaccttgtctctatgaggaagacaccttgaagatgaccagtaaataagtgcatcctgacaccatacaggagatcagacattgagatgattaaataaactttttttaaaaaaaaaaaagtactactacagcagaactgattgtgtctcagagtgtgcaaaaataacaaagcaatagacatccacaatttcatatttacaaaaagcattcaggtataccggtaagtaacaggagcaccttagcccccgctgagttatgttgttaacttgttttgaacactacacacaatcggatcttgttggcagttgaaaattgtatgaagtttaaaataaaaatatgagaaaaaatgaaatacagaaaaaaaaaagtatcgaagggaacagctcgacctaaatgtgtgaggttgtgcagctgtggtgcactggtgcctgctaaagtcttaatattatacttctacagtcaactacgcacacttaatcctatcatgctatgatgagcagtgagctagcagagtcaggaacaatgatgtcatgcgccatgtttacataatatattattggcaatacgcaatgaatggaaagttaagcatcatgttgggcttacatttctcttttcagttgatacatggtaacttcggctagtgtggaatgattttccagcatatgttacttgcacatcatctttagcatggtaacctataaaaatgtcctcgaaaccagttggtttcctagcagcctccagatccagatatacacgaagaggcaggcctttcattctctgcaaaacatgttcaagaatatgttaaacttggaaatcagaaagatgttaacatttactttgtttaaaacagcatccttacataagtaatgaaatacagtatcctcaggaaaaagagaactaaactactaacggaaatggtatgtaatggttagtaaaaaaaccaattgtatttgattccatgattaagttttgtcagaattgtaagcctgtaactcatgccactcaatactggcactatatatgtgaatccacaaatattttcgtggagactcttcatgctgttttcgacaagatgaaactaacaatcattgggtttttttattgtatggtggctatatgtgcctaggcagttgttggcacttccatttgggccaggcaggtcaacggctagagtcttttaggaaatatatgtggtgcattagacatcatttgccatatggctacaaggttcattagcacgacatacaaccatttgctgggtaataaggaagcatcaaaactgagcatgtcttcggaataagatgatctgatctcctgctgaggacattgtgctttttcattcctggaattttggacaggccttcagggagcgaatgtcaaagaagtgatgaaggcaggggctgcaacacagccaacactacaggatgaaccacttcggtggcatgaggctcctaaacaccaagcccaaaacgaaaacagagaggaataccatgctgttgcttctgactttatgagagaagggaacatcaaccaaatgttgctgatttcacgtaacctggataccatacaagattactccgttcatcatgtgtttgagggataactctgggagaatgaacagcaatatgtccatatttcaatagttagcaacgcaatccaagagtacgcaatatttacaaactaagggtgcttgtggatcagtgagacgcattgcctagccagcaaaaaataactgcctgcggctatagcccacgcaacaagcgacctgtttcaagtctagctgaggatgtatgaccctctgaaaactaccaagttattacttggcaatgccactaagatacaaaagcagaaaagggggcaagcaatctataggaattaaaaaaaactggcacaattaagtaaggttgtttctctaactgatagtacttccagatatgcattaacactcgaagaattttattaaggccttgttcggtttggaggggattgaagaggattggaggggattgagggggaataatttcacaccacagtaggtgtggaataaatcctctccaatccctctctcatggggattaaccgaacatgacctaaggaacttgttagtccagctgaactatcatcacactcgagcattgcccttttacacctataacactgaaagtgaaaaattgcattcgcgaattcttcaattccgccacacaacccttaccagataaagaagtgtatgaatttgtccataattaacaggaaagtatggaattcacaggaattgaccagcgaagtgagaatcccagtggctacctgcggcggcggcgtggcgccctcgaagagcagcgcgtcgggccggtcgacggcggcggcggacttgctccacacgcagctcaccccgcaccggcacgtgtacaccccgtcgagcgcgtcggggatccacgtccaccccttgacgagcaccccgacgtggcgcgtcctcacgccctcgcacctcccgccgccgccgccgccccacccggccccgccggtgatcgacgcggccgccgccgcggtcgagttggcgccgtacccgggcgcccccacggcgtcgagcttggcgcggatgcgcgggcacccgacggcggcgtcccagtcggcgaaggccgagagaagcgacgtgaacggcgaccgctcgcgggtgccgacggcgtccagcgccgtggcgaagagcggcggcgccggcgcggcggagtaggaggagatggacgggagctcgaagtagccggagacgaggaggaggaggatgacggcggaggccagcatcggggccatgtagttgatccgcttcgggaagagcatcgaggtggcgcgcccctcctcctcctccggaagcttctggaagcttcgcctcctcgccggagcgcgagatctcggtctcggaggagggggaggcgataggtaggaggattcaggattaggtggagtggaattaaaagtttttcgaggggctcttttggaaaagatgtcagttcgcgtatcggaggtttatttcagctacggtgttttttgcgattaggtccttggaagtttgagattttacagtggaaagggtgggaggttgtcgccggcggctgccggtcgtttaccaggtgagaattacgatggtgttgactttgaccatagatgggctgggccctgcattgaaaggccaggcggcccaggcccaacgccaaaatgtaggagtattattttttagatttttcataaacctccatccatttcaaggttgacctcacttgacaacttctaacttgtagccaatgtttggaaatgggtttgggatatgatttcccactcccaaagagtaagtttcaattttagccatccattcatctcaccccatttcatcctatccctctattcatttttatttctcaatcccacctctcataagtcataacccattttccaaacacacatgtagagagagttgtacgaatttatgcctctcccttcccaattcctctaccaaaatccttttatactatttttccccgtagtttgcagaaaatcatcaaatgcagaaatgtttgcaacatcatctgcataactatcttaataaagaagtgcatataagatggtacaagatgggaagaacaacttcttccactttagataacacaatgctattacaccatgaaatacatacgtcatatatatatatatatatatatatatatgatcatatgcaactcgctacgcatcatgtgcaccttcacttgtcaccattctcctcctgatgatcacccgcgaattgctcggatggcagcagcatcgcgagcgaagcatccaactgcccgaatccgaaatccatggcgccgaagcttcccgcggagaagaactcatccccaccaccggagccggacccgacgccggcgatccctttgacgtcaagaaactcattgccgccgccgccgccccacgtgaactccggctcctcctgcttgtggcggcggcgacccgacgtcggcggcggcgggggaggggggagagcgggggcgtggccctggaagagggcgacgtgggcgaagagcttgtccttgcgggagaagctggtgccgcaggagcagagccagcggtcgcggccgcagtgcttctcgtgggtcttgaggtcggccatga

SEQ ID NO: 14959 - DNA, 2035 bp, Oryza sativa
tcacttgccgattgcttcagggtttcgtgcaccgttcagcaccccaccttcctcggctaggccttctgttgtgccccccacaggtacttaaaaaaacaacattacttcgacaatcaatttacatacattttatgtcttagcttacaagggtcccgttgtcgatgtgtaggtttcgcccagttcgctatgacgcaggccgcccacttctcccaggctgcagggtcagcgtctcaggcagctgtgtcgacctcgcactcagcgcagttctggcagtacaccgggacttcgtcacaggcagccggcatgtcgagtcagggtccaccactggaccatgctgggacctcgtcggactgcttgttgccttccaccttcctcttcgacatcactgacttcgacttcgcttcaggctcgacagaggacatcatcggcccctcacagctgggaggcgcaccgccggtgcagacgcaggaccaggcgcaggccactcctccgcgggacactcgtgctacccgtgctgtgccaccggatcgtttcacctactcccaggaccacgtgcgagcacaggcccggaggaccaagcgtggtcgcggcgcggggcagggccagtagagcagtcttctctttgtttacttgcttcactttccagtactgtatgcttgtgtaatgactacgttgttgttatatgtgcacgatacctttcggcgcatgcacgatacctttcggcgcatgcacgactactttctgccgcaccgatgcaacctcctttattcgcgtgtgatacgagtatttgcccgccatttggcgcatacgaccaatgtaactttcggcgccgatcatgcatgtatctttcagcgccaatcaggcgtacccaccataccccaccacgttcacatgtcaggggtatcactcgattttttgcgcctatataagtcgccttaacgagtgaggcctcacaatctttcagaactcagtcacattcagtactctcttccccacttgcttcattacaaatccgaccggctttcgtcaatggctagacgccgaggtgttgaggatccaaactggcgtagcgatccttgtgtatacctactaccaccttggtgccagcgtcctctctgcctatgcggtgatcgatgccaactaatggcttcgaggaatcctgatattcgaggaaggcgcttttttaggtgccctaactatgaccgtgaggtatcttattatctgcatatgcttattcattccgtatgggcaatcgctttattcttcgtaacactactctattcggcagacccgcactatggcttgcgcatacatcgagtgggtcgatacagaaaatcccgttctcaacctaaccacttgtttacaagaaggtcgctggtatttcgcatccgaaagtactgagcaatacttacagagaaaagcggcttatgaacgacaatgtcgtgaacaacagagcgactggcgggtgctaactacggcactccctccatgggaagcccgtccaagatgcaggtgtggtgatcgttgtcaggttcttcgttccataaatcctacaacattgggtcgaaggttctttatttgtccaaatattcttgacgacgatttcatggtaagaatattttgattacatgaatccttattttctcacaacatttactaactttgcttgctttacatctattctttcctcccaggaaccaccaaggagatgtcaatacagagaatggatagacaccagaagggttctaactccacctagccgtgttgtgcagcttgaactaccaaagcaatacagggttactaaagcgcggtttgagagaggagagggatcctcacgtaggggttagctattatcggacaacttggcatattgaaatttctactgtcatgcttccttgtcccattactacatcgtcgttgtgttcaactattgcactacctccctcctagttcgaatctaatatcatctatgtaaccgcaatgcaaatagttgtatcatgttcaaattgtactactatttcttcatgttacataa

SEQ ID NO: 14960 - DNA, 17720 bp, Oryza sativa
caagctctttatgggcggccaaaattgcaattagccccttgccgccagggcctaatcgcaattttggccgacggcggcagacggcgcggtcgacccaccgtctgccacgttagcttgccgcccaccattagggcggcaggggctatttctgcaatttttttttggtcgatagattatttctgtaaatattaaaaaaaaatctaaaaacgaaaaaaattcggtcgcccacattctccggctcgagacgacgcaatcggcggccagcgtcggcggcgcgcaccgccggccggtgcgccggcaggccgtcttctcctcctcctcctcctcctgcactaacgcctgcagcttacttgcaagccgccccagaagcagtcaggtacgggccgccgcctagtcgtagctgcggtttggtcaccaagctctctggctcctttgctgtcttggtgttcttgattaatttcgtaagtggtagtagctcgttggttggtgtcgttgtgaaatgttgttagcgagggacgtcaggtgcggattgatgtacaatggtctcactgctaaaaatcaatggcaagagagaacaatgatctccttgacctagggattgttgatttcgatccgtggataaactatatattattaaattaagtctgtattccgtgatgcgatttgtggagtctatgaattcttccaggtctatctatttggcggtgtatatatttttttgttcttggaagttggccatgatgtattttcagaatatgttatccgaactgtcgtttcctttccttttctgcccatcttttcagatctatgtgaccatcaagttcattgtagtataatgcactgattgtgccgacattgttaaaggaatggtcatgctatataaggacatgaatcatcttcagatctgcttatggataaattctaaactatttagttgggcgataaattctaaactactgttctgtattgcagggcaatgctgttctcagaagaactgcagttacagtaaatttgtctgtgtactcaggcacgtacataaaactggagctaaccttctccacttcgtatgtactaactcgcttctagttcttaaaatgcctacctatttttccttgctcatattctgcataataatataccaaggataaaggatgcatgttctgcatacatggtctgtgctgctgtgccaaggctaaaactagaccttataagatcgcatagtgggatttcctacaggaactcagggagaactcctgtaattgttgactgagtttcctgcagtcacaaaaagaactaaaaactagaatattgttgaaaatgtcttattacataggccatggattgtttccttaggaatgtccaagttgttgccaccagttcttttcaatcttttgctttgcttgctgtgcaaaatttagtgctgttgtatgtaaacattctctccaactatgagcaaatagtaacgtctttcttctacctaatattagatccaaagaaatattcagttcatctctttctttgcttctggttatgtacttccctttttgacttttatttttcgagggtagtcatttatgtcgcacttattttagggggaaatgtgattctttgactagcataaatgcagaaattctattggctagcatcattttttcttttagttttacaacttgatgatgaactagcttccatttattttcagttattcacatatctcgtgctaagctgctcctattatgtggctagggatggagttttttttacttataaactaatattttataagttatcatgaatcaaccttgctgctctggtgacaacaacgagagtttgttaaaagaatcctatactgtttctttatgccccattctctcctttgctcatttgtctgtcgtatgacttttgagtaagtaatatattccaatgggctacctacgccttctgttgagttctaaagaaaaatactaaatttgttaaatcataatcccttatatatcatgcagattgcagaaggaacaactctgtattacctctatatatgtataaaaatccacaagctgatcatccaacctgcatactgcataacaacacaccatgtcaatggattcatccatgcttctagctctgctgcttgccttgttcatacccatcctcctccaccttgtcactaggcgcaagtatgcatcctataatctcccttcaggttcccttggctttccattgattggacagactatctccctactccgtgccctccgcaaaaacactgattaccagtggtaccaagacaggatcaagaagtatggtcctgtgtccaagatgtcagtgtttggttcaccgacagtgctgttgactggcccggcagccaatcgctttgcattttgcaacccagacctcattttcacccagacaaaggcgctgaacgccctcgttggcggtccattctgatgctctcaggtgaggagctaaagcaagtccgcagtgcagtccagggctatctgaggccagagatggtgacaaagtacatttggaagatggataaggaagtcaggaggcacattgacctgcactgggttggtcaaaagactctcacggtatgaactttgtgttttttttttcatttttccgcttaatgttttcagcattgctagatccttatgtataactcaaaacaacttttcatgatatggaaatgtatatgtgtgattctttcatgattataggttgcaccattggcgaagaggctcacctttaacatcacctgctcagtcttctttggagaagaggcaggtcctatcagagaagccctggcaaccgacttcgaggcattggtgaaggctacactatcaattccagtaaatattcccttcaccaagttcaacaagggtttgagtgcgagttggaggatcaggaagttgctcagtcggattgctcgtgagagggaagcagcgttgcagcaaggccgttgcagttcaactgatgatttcttcacatacatgattgcattacgctccgaaggcacacacttacagtggaggacattgtggacaatgcaatcttactccttactgcaggttatgagacaacttctgttcttatcatcttcttgctccggtacctagccaatgagccagacatcctgggcaatataactgagggtgagcagctagtacttttgatttttcaatcttcttagtatcactgctatcattggtacttatggagttatggtgaatccgcagaacaagaggagatcgctaggaacaaaggacctaatgagcctttgacctgggatgatgtgtcaaggatgaagtacacatggaaggtggcaatggagacactccggactgttcctgcaatctttggaagcttccgaacagctatcaaagacatcgaataccagggctatcacattccaaaaggctggcaagtaagtgtttttctgtcaagtaattccgttgtgtcattgaatatctttttggtcgcccatgtgcatttgtgtatcagtaatatgcccatctgaacaatatacccaactgttaaattcctccaacacattttctgttctatgccagatcttcactgatcaaattgtcacacatttggacacaaattttttcgatgggccgaggaagtttgaccctgctagatttcataaccagtcttcaatcccaccctattgctttgtgccatttgggggaggcccaagaatgtgccctggaaacgaatttgcaaagactgggacattggtggccatgcactacctagtgaggcagttcaggtggaaattatgctgcaaagaagaaggttacaggaaagatcctactccaatgcctcttcttggactcccaattgatcttgagaccagaagcccccctggatatgctcattcttagagtaatccacatgtttctgtttactttttgcgttttaatttatgctttcgctagttggtttaagagttgcgagtgttgcagatatgaaggtttggtaaagttgttcagaaatgtagtgacttatgatcaaaggtggtacagttttgctgataaatgtgtattggtgtataaactatgatgcaataaataaacacagatgccttatgagttatttttcttttgtttttttcttaaaaagaatgtctaggttatgctattgggtaaatcagccagctggttactctgatatgcaatgaaccaaaatataaaaatggtactgcaatttacccatagaaaaggtaatgcactaaaacacaatcgcactgtactagcaaacaatagtacttgtcctttgtctcagacttgctatctgatgattgtatcggcagcaaaggtcagtccttttacattgcttatgactttttcattcacggtggaggacatcgtggataatgcaatcttccttctgattgcaggttatgagacaacatctgttcttatcaccttcattccctggcacctagacaaggagccggaaatccttggcaagtcgcccagttgcagctgcctgtggtttggtcactacacctcttgtgtcttggattcatgatttctagcttgcagttggttggtgagatattgtttgatttgttcatgggggatgagcgagctgtcatggctcagacgcaaatctgcattcctgatgcgatatcaagatctatattgtggagtctatgccttcaaagtttatctagatttgtctacataatttttttgttcttggaagttgaccatagtggattttcagattatgttattctaaacttgtcgttttcccttttttgccaggttttcaggatctatgtggccctcaaggtcgttgttgtgtatcctgataatgcactgattgtgccaacattgttaaaaaatatgtcatgctatattaagggatgaatcttctgcttatggataattctaaaagttctgtattgcagggccataccattttcagaagaattgcaggtacagtgaacttgtccttgtgtgcacaggcacatacatagaactggagctaaccttctcaaatctcaactatgtacgtaattcgcttcttgtttttaaaatatctacctattttttacatgggtcatattctacttaataatataccaaaaacaaaaggataggtgtcctgcatacatgcctgtgccaaggctaccttaagatcgcatagtggcttacctgcagggagaacttttgatcgagagccctgcaattagaagaattaaaatcttgaatattgatcaaaatttctcattacgtaggacattgatcgtttccttaggaacgacatcagatcttctcaatgttttgcttttgcttgctttgcaaaatttagtgctgttgtatgtaatcattctctccaacaatgagaaaacagtagcatctttcttctacctaatattagatccaaagaaatattcagttcatccaaagaaatttttttagggaatttgtttctatgtcttcatttgacagggaaatgtggattctttgactagcataaatacagaaattctattggctagcagcacctttttttaaaaaaatttcaagctgatgttgaagtggcttccatttattttctgtaattcaccatgtcgtgctgagctgctcctatcatgtggctagggatggaattgtttacttatgaactaatattttaagttatcatgaatcaaactcattgctctggtatgacaactaacaacagcgagggtttctttaagtaacctgtattctgtcttctcgcctcctctgaatttgatgtctttgccttggcctatgctttggtcatctgtatgttgtatgaattttgagaaagtagtataatcaggtgggccacctagccttctgttgagttctgaagataataatcaaatttgttaaatcattctttcttgtctatcattgagaaaggaacaactctggtttacctatatatatacatgtatacatatccacaagttgatcacccaaccttcatagtgcataacaacataccatatcaatggattcatccatgccttttgctctgctgcttgccttgctcatacccatcctcctccactttgtcatcaggcgcaagtactcatcctataatctccctccaggttcccttggcttcccagtgattggccagagcatctccctacttcgcgccctccgcagtaatactgattaccagtggtaccaggacaggatcaagaagtatggtccagtgtccaagatgtcagtgtttggctcaccgacggtgctgttgactggcccagcagccaatcgctttgtattcagcaaccaagacctcattatcaccgagacgaaggcagcgaacgccctcattgggcggtccatattgacactatcaggtgaggagctaaagcaagtccgcagtgcactgcagggctatctgaggacagagatggtgacaaagtgtattcggaagatggatgaggaggtcaggaggcacatcgacctgaattgggttggtcaaaagacagtcacggtatgagtgttgtgttttcttcttcttttcccacttaatgttctttgaattgctagacccttatgtgtacttaaaacaacttttcgtagtattgatatgtatatgtgtgatactttcgcgattacaggttgcaccattggcgaagaggctcacctttgacatcatctgctcagtcatcttcggacagggggcaggtcccatcagggaagcccttgctgctgacttcaagaaaatggtgcaggcaatgctatcgattccagtgaatatacccttcaccaagttcaacaagggcttgagtgcgagccggagggtgaggaaggtgctcaggcaaattgctcgtgacagggaagcagcattgcagcaaggccattctagttcagctgatgatttcttcacatacatgcttgttttgcgctccgaaggcacccactcactcacagtggaggacattgtggacaatgcaatcttactcctacttgctggttatgagacatcgtctgttcttatcaccttcttgctccggtacctagccaatgagccagatatcctgggcaagataactgaaggtgagcaactagtactctgtattgtcctcatattttgatatttgaatcttctgagtagcatcaatatcatttgtacttattgtgaccaacagaacaagaggagatcgctaggtacaaaggacctgatgaacctttgacctgggatgatgtttcaaggatgaagtacacgtggaaggtggcaatggagacactacagactgttcccccaatatttggaagcctccgaacagctattaaagacatcgaataccagggctatcacattccaaaaggctggcaagtaagttttctttttttctgtgaactgattccattttgtgacattgagtaacttttccattcccttatgacattaatgtatcagtgatatgtccatctgaacaatatacccaactgttataggcttacagctctcttaacacattttctgtgctatgccaggtcttcactgctataattatcacacatttggacgcaaatttttccgatgacccgaacaagttcaaccctgctagatttcataaccagtcttcagtcccaccctattgctttgttccgtttgggggaggtccaagaatgtgccctggaaatgaatttgcgaggaccgagacattggtagccatgcactatctggtgaggcagttcaggtggaaattgtgctgcaaagatgaaggttacaggaaagatcctgttccgatgcctcttgaactcccaattgaacttgagaccagaagctccccctggatatgcttaaaatgatccacctgtttttagtttatgctttcactagttggttgaagagttggaaatgttgcagttgtgaagatcttggtaaagttgttcagaaatgcagtgacttatgatcaaagctttggttcagttgcgcagataaatgtgtaatattccctctgttatttaatagataacggcgttgacttttgaacacatgtttgaccattcgtcttattctaaaaatttatgtaaatgtatagaatataaatcatgcttaaagtattttgagtgataaaacatctcacaacaaaataaataataattatgtttttttaataagacgaatggtcaaatgttcaacggcatcatctattaagaaacagagttagtaagacatctgcttagggggttccttttcttttgtttttctgaaaacaatgtctacgttgtgctattgttgggtaaatcagccagctgtttactttatttggatgcaatgaacaaaaaaaggataatttaaaattaccattagaaaatgcaatactctaaacacaatcgccatgtactagcaaacaaaatacttgtcatttgtctcagaatttgctatcgatgattgtatcgctagcagaggtaagtccttttcctttgcttttttttttttcattcacagtggaggacaatgtttagttgtcacagtgtattactctattccctaaatgattataaatatttgatgtttaggataagatttagtcaaagttttgaaaattcgagaaaaaagtctatagtgctagggaacaaagtctatcaaccaaagaaaaaaaagggtctatgggttattagtctcataattctctttcttataaagaatttgcacaaattttataatattgtagtgacaaagtccctgtgtgaggtatgtgggttctttctggtggtaaaatatgttttaaaaattttaaaaaactttttcagaggtattgccaagtgaaatgtcaaggatggtaaaacatgcttattttttgcatctcaggacattgatttaacttatataagatgcaagagagactttcatgcatattttctttgaatgtcactttagccaagaatgtttggtcaaggctgcttatcatgtggaacacaagcctaagctttgagcagatgttgcagtcggctatggataattgcaatgccagggtttaaactttgtggaaaaagttctatatgcttcccgaaatatttggaaaacagaggaatgacttcattttgaagataaagcaccttgccaccttttgtacatccctggagttgccttttaaaggatgatctacttttacttttctttcttttaagtcatgtataaagagatattctatcatcatggattgacttgttgtaatttcagtttggtacttttttatttcttggccctacttaatgtatcacatggctattcttagtcaacatttctattagaaaatgtcccttttgcccttacttttcgtaccatgtaaaaagagaaaaacaaagatgaataaatagaattataaatgtacttcctattatttcattatgtgcacacaaggttgagctttaattacataattattttctttttacataaattactatgcatctatagcaaaattcattatatgtgatttcaaaaaaaatcatataattattggatgtatgtttgatagaaagttgggtatttaaagctcaactttaggggatcttgtcataaagtttcactgcctcattagtaaggtatgttcttcatttttgttatatatgtgaatgaggggtataagggtaatttatcaagagatattgattatgtttagccatgtggctccttaaatgggttcaaggatgagtttgagctagaattaaaacttgaaagagtaagatgggcagattaaaatgtcaaagaccaaactaaaccttagatgaaacttagaggaccaatttagctattcacccttaaaatttttttaaaaaaatttaaccaccaataacttcttaaatgtttaattaaaaaagataatatttttacttgaaaaacactttcataatattgttagctattaggttttaaaaaacttgttctgctaaaatagtgagagtaaatttcataaaatcccacgtattatgattcaaattgcacaaaactacaggaatttcggcacgtatcacataacctctaatatgattctaaagtttcacaaaaccgtacaggtaactttgatctaccacattttaaaattctacgataacatcttaaatttataaggatttaatccatcatgtaaacgttaaatccactttttaaaattttgatataggaatatgtcaaaatggttcatggtgtgatttttgtgaaattttatgaccatacaacgcgaggatgtgtcatgttccaaaatccctatgtttttgtgtggcctagatggcagtcttataaacaatctactttaaaaaccatgatcgaagcttaaaatcctgatcaaagttaattaccatgaggggcggacataaaaccggccttccatggaggtagggctggtcatccgggcatgggcctaggcaaggcaggtcgcccacattctccggctcgagcggcggctcgtcagctgcgcggggctccccgtcggcggcgcgcaccgctcggcctgtggcggtgcgccagcgtgcaagcttcccctcctgcatattacctgcatgacgccccccaacaagcagacagcgcagtaagaggtttgagtcactagctattaggtgtcctaggattattgatttctagctttgcaattgattggtgagatgtagtattgatttgtcccacccgggcggctgaacgagtctgtgaatctgtgttggcgcagatgcagttggggtgggtttcggtcaggtctggtggtgtggattaaaaacagtgacactgcctaaaatcgatgtaggagaataatgatctcctggcctgatgattgctgatttcgatccgtggacaaattatattattaaatcaaatctgcattcgtgatgtgatctccaaatctatattggggagagtctatcccttcgaagtcttacctatctatatatctatctatctgtctttatacatattttgttcttggaagttgactatagtggattttcagaatatgttatccgacctgtcgttttccttcccttttttttgaaagtttttcaggatctacgtgatcctcaaagtcaatttcgtgcatcctgataatgcattgattatgccaacgttgttaaaagaaatggtcatgctatattaggggaggaatcatctgcttatggataaagtctaaagtattgttctgtaatctgtattgcagggccatgccattttcagaagaattgaggcaacggtaaatgtgtctttttgtgcacaggcacatatatagaactggagctaaccttttccactaagtacgtagtaatttgcttcgtttttaaaatgtctagctatttttcgtggcagatattctgcatactaatataccaaaaaaagaatagctatcctgcatacatggcttgtgccaaggctagaactatacttgttgatcgagtgctaaggctagaagtgttgatcgagagccctgcaattatgcagaagaattataatctagaatattgttcacaatttctcattacatagaacatggattgtttccttagggatgaccaaattgttgtcaccagatcttttcaatggtttgctttgcttgttttataaaatttagtacttctgtgtaaactcatctaccagcaaaacagtagtatctttcctcaagctaatattagatccaaaggaatattcagttcatctctttatttgcttctgtctatgtacttctttttatagttcttttttttttaattttagggaattcgtttttatgtctttcatttgagggcgaaatgcgattctttgactagcataaatgcagaaattctattggctagcataaatgtgattcgttgaactggcttctatttatttccagtaattcacaagatggaattgtttacttataaactaatattttaatttatcatgaatcagactcattactctggtgacaaacgatggtttgttaatgttatattgtcttcccgtccttctctcaatttgtaatctttgcttgtttgttgtatgacttttgagaaagtgatatattcagctttgccaactagtccttttgttgagatcaaaagaaaatatcaaatttgttaaaccatactcccttatatatcatggagaaaggaacaactctggtttacctatatatatacatgtatacaaatccacaagctgatcatccaacgcataacaacataccatgtcaatggattcatccattccttttgctctgctgcttgccttgctcatacccatcctcctccacgttgtcatcaggcgcaagtactcatcctataatctccctccaggttcccttggcttcccagtgattggccagaccatctccctacttcgtgctctccatagtaatactgattaccagtggtgccaggacaggatcgagaagtatggtgctgtgtccaagatgtcactttttggctcgccgacagtgctgttggctggcccaggggccaatcactttgtattcagcaaccaggacctcattttcaccgagacaaaggcgatcaacgccctcgttgggcggtccattctgacactctcaggtgaggagctaaagcaagtccgcggtgctctacatggctatctgaggccagagatggttacaaagtatatgcggaagatggatgaggaagtcaggaggcacattgacctgaattgggttggtcataagactgtcacggtatgaaagttgtaataatgttctttgaatttctagacccttttatgtatagttcaaaaaaactttttgtagtatggatatgtatgtgagctacttttgtgattataggttgcgccattggcaaggaggcttgcctttgacatcatctgctcagtcatctttggacaaggggtaggtcccatcagagaagcccttgctgccgactttgagacgatggtgaaggccatgctatcaattccagtgaatatacccttcaccaagttcaacaaaggcttgaacgctagccggaggatcaggaaggtgctgaggcaaattgctcgtgacatggaaggagcattgcagcaaggctattctagttcagctgatgatttcttcacatacatgcttgttttgcgctccaaaggcacacactcgctcacagtagaggacattgtggacaatgcaatcgttctcctggctgccggttatgaaacatcgtctgttcttatcaccttcttgatccggtgcctagccaatgagccagacatctttggcaagataactgatggtaaacaactagtactctgtatcgtgtcgtgtgcctgtaccttgatgttttaatcttctgactagaactgctaccatttgcaactatcgtgaaccacagaacaagaggagattgctaggagcaaaggacctaatgagcctttaacctgggatgatgtctcaaggatgaagtacacatggaaggtggcattggagatactacggacaatttctccaatttttggaagcttccgaacagctatcaaagacattgaatacccggggctatcacattccaaaaggctggcaagtaagtatttttctattgaccaattcccctttttgttactggatatcttttccatcccagttatgacatacgtgtcactatattttccattcccaagtgctatatttatttttttaccctcccaatcttgcgatgcaggtcttccatgctcaaagtatcacacatttggacgggaagtttttcaacgatccgatcaagtttgatcctactaggtttgacaaccagtctttgatcccaccttattgctttgtgccatttgggggaggtccaagtatgtgccctggaaacgagtttccgaggactgagacattggtagccatgcactacctagtgagacagttcaggtggaaattgtgctgcaaagaagaaggttacaggaaagatcctcttccgacgcctgttcttggactcccaattgaacttgagaccagaaccccccctgaatatgctcatgcttaaaatgatccatatgtttctgtctactaccatgaatttcagtttttggtttctccagatggtttacagagttgggagtgttgtagatgtgaaggttgtggtaaattattcagaaatgcagtgacacgttatcattgtgtagaaaaatgtggactggcgtatagtattataatctaattataaaaacagatgcctaaggggttcattttctttctgtttttatttaaaaaaagaaaggtctacggtgtgccattaggtaattaaatcagccagctagctagtttatctgcacatttagctcttctgatgtgaagttctagttaggttagtttcaagcgtttttgcagcctctcctccctgccaggccttatagtactcatagatgtgctcctgcatgtatactctatgattctgttaggttttctttgaattctggtttaaagaaaccagttcatatccagccttttttttcttaatctgtatctatctttttaacttgtgtctaataatatgggattgtgatctgatccagcttaccctatattttactctattatttgtgttcccacaatggttcatgttcattctgacttggacaaggcttcctaggtgaataacattgtaacatgacacatgagaaaccactgtgtcattactacagactgcatcttatgttgacaaacaaatgactttgttttctttgcatggaataacatattattcctatatacttgtacaattaatcctcacttaggtggttaataccattttcctgttctcttgtgaagccacatcatctaaattaggccagaccattggatgaaccatatgactttgtttaaaacgccttgatacaagagaaccatattgcaaggagccaagtagaggcatggatcacaatcccgatacaggatcaaaaactgctcgcgagcgatatcttcagaattagcgaaaaccattgataaactgacaaaaacgagaattagcgaaaaccattgataaactgacaaaaacgacaaaattcggacaaattttgtcaaaaaattaaaattcagtttgattttgtttaacttgacaaaaaaaaaatctagcggtttatgttttttatctgtcccaagaagtttggatccattggttttaaaccttgactagaggtagacacattactagatggaataagttcactttgactccctcaaaaatagctccaatctagtttatatttctgaaccggaataagttcactttgtgaccctcaaaagtgatcgaaatctaatccatgaccctaaaccacaaaaccggatatatggaccccccaactctcaaaaccggtgtaatttgactccctcggcggttttggagggcggtttcgctgacgtggcgcctacgtggcagtgttgactcggtctcctttccacgtggcattgacgtggcacttaggtggcattagaaataaaaaatatgtgtgggacccatttgacatggaaccactgacatgtggggcccacataaaatcatcctctcctcatcctccccctctttctcttccatttgctgtccgagcgctggcaggtgggccccactcgccaggagcttcttccacctctgtccgtcgtctatttcatctctcccgtgaaactcaagcactgccgcctccgttgatcttcctgccctatcgtttctcctccaaattaattgcaaaaatcgattccttgtgtagtgggcatcaatttccccaacaaatcccacttaatcccgcactaaatcgccctcaatcgatttcttaaaccggtgtcttcaatagggagctccaccgtcgccgacgttgttttccgtccgtgcggtcgacctcctcccctccggcctatataaagagagcccccgtgatctgctctttcccatctcctgcatcgctgtggagatttcataattaacaggtggttttcaccgtgctttgtggtgaatttgcaccggatggctgattttttttttggttttattggtgggtcacgacgcagaccctctcggcggcggcgcacatgacgccgtcgacgagctgcggcatggagcatttggccagggcccccgggccgcagccgacgcggagcccgacgccggccatgtagttgcagacttctgtgcgaatcatctcctgcatcgtgtagatgagatcggtgttgaacgggtatggggacggagatgttgccggcggcggcggcggcgagggcggtagcgaagggaagcaggagggggaggggaactcctggaagtggctccatgcgctgtcgtggtggaaccccgggtcctgctgccccgggagggagagggacagcgaggtgagcgtgtcatcgtcgttgagagcgcgatagactcaacacaatagattggattgatatcgggtgcggagtacatataggctcgaaacctcccttatccactcaaccgacttatagaaacagaatcgggagagacattaggagggatcggcacaaaaggaaacaaacatgcacaagatatatatctatctaacaccccccccccccccgcagtcgcaacggcgctggagcgaacattgagactagaacgaaattccgtgaagacagatgtcggcagccctttggtgaagatatcagcatattgcgatgtggttggcacatgaaggacacgaacaactccagccgcaacacgatcacgaacaaagtgaagatcgatctcaatgtgcttagtccgttgatgttgtactggatttgtagaaaggtagacagcgctgacattatcacaatagacaaccatagctttggagggtggagtatgtaactcgtgcaataactggcgaagccaacatgtttccgccacggcgttggccacggctcggtactctgcttcggcgctggaacgggagactgtgttctgtcgcttgtcgcttggaggaccaagaaatcaggttggcaccaagaaacacggcatagcccgaggtggacttcctcgtgtcgggacaaccggcccaatcagcatcagaataagcaaccaagtcaacagttcgagagcgctgaaaatgcaatccatgatcgatggtgccctgagtgtagcgaagtatacgcttgagagcggcaaggtgcggctcccgggggtcatgcatgtgaaggcagatttgctggacagcataggatatatctggcctggtgaaagtgagatattgtaatgcaccagcgaggctcctgtaatcagtcaggtcagcaactggggcaccatcgacagctgagagcttggcattagtgtcgaccggcgtagaacatggcttgcactcggacatgccagcacgagcaagaacatcaagaatgtactgttgctggctgaggaacaaaccagtggatgtgcgggtaacactgattccaaggaagtggtggagaggcctgaggtccttcatggagaattcagcttgcaaggcggaaattgtccaacgaagaagactgtcagaggaggctgtgagcacaatatcatcgacatatagcaggagatagaccacatcggaaccacgatgatagataaacaatgatgtgtccgaccgagcctcagagaagccaagtgtgagtaagaaactggcaaaccggctgtaccatgcacgaggcgcttgcttcaaccatacagggacttgttgaggcggcagatcatgtcgggtttggtaggatcaatgaaaccagcaggctgagagcagtaaacagtttcctggagagtaccatgaaggaaggc

SEQ ID NO: 14961 - DNA, 1251 bp, Oryza sativa
caatgggggtccgccaaggccgcacgataggtgcgaggcaccggcgacaagggtgcggcgtggaggttgaggcgatcgatcggtcgtcgtatgccagatttgccacgcgtgaccatggcatgttcattgtcggccggagaagcatcgaggatcggtggaggagcgcggccgccagggactcgcgcgctgcgagggcgcgtgggcgcgcctgtcggtggaggccgcagggaagacgcacctgtggtgggagctaggccggtcgacaggggcggctcgttggaggagccggtgttggagggggccgccgaatgggtggaccggggggacagcatggggtcccaagcgcccggtccagcggaggaaggcccagcctctgtgggccgagctggtgaagaggccggggacgcctgcctagccgagccggatggcgtgccgacggaggcacgcggcccagggggtgttccagccggccggctggagctgctgcctatgcgtcgaccgatgggagctggcagaggagatgaaaaatcctcaagaaagtccaaattaggagcatctgcactgttagtcatctcagcaaaaggaaacgagtgctcatcaaacaccacatgatgtgaaatatagaccctattggagacaggatcaaaacaccggtaccctttgtgattctcgggatatcctaaaaacacacacatgatggagcgaggggcaagcttatggggggtagtggcagataagtttgggtaacacttgcatccaaagactcgaaggtgtgtgtaggatgggtgagcaccatagagggcaaaaaacggggtgtggtgatgaagggttttggtgggatgacgattaatgagatgtgtggcagtatggagggcctcgacccaaaaagaaggtggtaggctagcttgaaacagcagggagcgaactatgttattgagagaacgtagcatgcgctcggccttaccattctgaggggaggtgtgggggcacgacatccgcaaggagacaccgttggtgaggaaaaaggtgcgggcggtagagttgtcaaactcacgaccgttttcacactggatgttccggatgctagctgcaaattgagtcttcacaaaggcaaaaaagcgtgataaggtggcaaaggtatcggatttaaaacgaagtgggaaggtccatacatagtgagagaaatcatctagaatgacatcgagcatagttgccggcgacgaggtctaatgtcacggggacgagagcctt

SEQ ID NO: 14962 - DNA, 10343 bp, Oryza sativa
  unsure (1)..(10343): unsure at all n locations
cgataacctcgcattggcagtacccgctccgtgaacttaaatcctcatgcactctaggcgtccatgtttctagcagtgagaggagttctggcgctcccgggaaagagaagtctcacacgcatattaaattatggttcaagttaagttctctctctcacacactcatggcagtcctaccaatggcgacaccgatgtagggcacgcttctcggccctacctcaacggctgtcccatcgtagcgcacctgcctcactcaggggtgaaccatctatgcagggatactgcctccgctcggctatctaatccgctaggtctatacccatacgagaagtgcggttgtacgggggttgtttcatgcttaacttcatggctcggtccttaattgaccggggacggtactagccttttccagataccacccaaatcctccgtccgccccagtcgaaaacagttatttaattttatttctcctttcacaaatcatgtcatcaacatcatggcaatgtggcgctcatgtctccacatgccgcatctcaattaccttcccaaaggtaattgcccaagcatatagcatttgataaatatgagtatgcatgattctagaatagcatttctaagcaattgtcatagttgactagggactcatacgtaaacatggttacaaagatttaagggtaaacaataatcaaggcatggcataatcacaagtaggatgttcgtcattgcatgcaattttatttgtaaacaaaacaatttcgcaattgggatcaacatgttcaaggaatagtgatgacttgccttgctcagagtcttgcgggtcttggccttcgcttggatccgcaactccctcgggctctatagttacgtgcaaaaattgatttgaattcggttagaattcaaataaaaatccaaataaatccaaatgaaagtcgaatgtgaaagtcgattcctttttattaactttactatctgcgaactacggcaaacccaatttcgacttaaactattttgcgggtataaatattttgttgtcataagtttttaatttaatctacccgagcattatatccatataataggttagagatttctatcgcgagctaaatatcggacgaaatcctagaaatattatatgatttaatttagtctatgactaaatgattaaatataatacacggctaaaatccctagtaattaaatccgaatttctaccgtgaaccgatgacttttagagattaccaaaaataatctataataatctataagaattcatctaattgtttagttattaattatatctaaattactaccaattttaatctaatctgatcaagaaatatatttttataattaactcggaatttcgaccgaaatactattacgctcaaggaattttccctctttttctctcctctctttctttttctctcttttctcttttcttttctttctctcctcccggctccttcctcctttcctctcttttctttttctctgctccctcccggcttctttctatctctctctctctcggctctttgcttccccgagcggcgacggcggtgggcgcgaggtgagaggggggggagacggctcaccggcggcggcggtggcggcgacgacggcgacggcggcgcaaggcggcgacgcacggcgcggcggctccggggcgacggcgcggcggcttcgaaggtggcggcgcagcggcgcgacaacagcggcgcatcggcgcgacgacagcggcgcgtggagaaggggaagatggagaagatgagggaatggagtggggtggagaaggggggattgggccggggtctttataggggagaggggaagaaagagaggggaaggagggggaggggtgaaacgacggcggcgcggcggcgcggggcgcgaggcggcgggctcgcggcgcgaggcgacgagacggcgcgcggcgcggcagcggcaatgggacgcgcgcggcgacgggacgtcgatggcgacggcgacagcggtggcgcgcggctcggggcgggatgcgatgggcggcgacacgacggcacggcgcgacagcgacgatgggacggcccggcagcggcacagctcgaggcggcgatggaacgcgcacgcggcgacgggatggcgacggcgacagagcggcagtggtggcgcgcggcgcgaggcgggacgcgacggcgacggcgcggccgcggcgatgagatggtgacggcgacaggcggcgatggcgacggtggcgcggcggcaggcgacgatggcgacggcgcgcggcagctggcgacgatggcgacggcgcgtggtgacggtggcgacaaagagagggggaaaggggaggagctgggttaggggaccccgtcgaacaccttaggtgcaatgaacagtgccgttttctaattaacccgattttagtgtattttccatataaatttgattccacaattcctaattttgcatatatgcattttactcaatatttgtgttatcttaactaatgaattcaccctagattaatattactcatattttatttttatgtaatttatttgagttttaattagggttaattcttattccatcgtatttaaatttaattgatccaaatatggttgcgataatattttatttatttctatccccacctaatctttattttaatttgtatttattttaccaatttgtttttaagttttattcctaattaactattctttactcacgattagtaatcttcgagatcaaatccagataaaatagacgaataagattggcatgatgcaattagtttaaaaagtttttttgaaaatccgtatttttagagttttgattttgtcggtcgaattttcagggtgttacaaacctaccccccttaaataaatctcgtcccgagatttcttaccagttttcgaatatatgcgggtactccgtcctcaagaattcttcgctttcccatgtggcttcatcctcagtgtgattgctccattgtaccttgtacatacgccacactttgctcctagtcctcttttcggcttcatccaatatccggatcgggtgttctggatatgtgagatcattgctaatgtgaatctcttccagcggagcttgctcttccggcactcgtaaacatttctttagctgagacacatggaagactgggtgcacatccgcgatattctctggtaactgtaactgatatgcaacttctcctcgcttggcgatgatctggaatggtcccacatatcttggtgccagttttcctttgaccttaaacctttttgtttccctcatcggagaaacctttagataaacgtaatctccctccttaaattccaggtttcttcttcgggtgtcggcgtaactcttttgtcgtgattgtgctacttttagacggtcacggatcaagcgaaccttttcttcggcttcttgaataatgtcaggtccaaataccgcccgttctccagtctcggaccacattagcggggtacgacattgtcgaccaaacaatgcctcattggttgacatttttaggcttgcttgaaagctgttgttgtaggagaattcggcgtagggcaaacatctctcccagtccttgctaaaatccagagcacaagccctcagcatgtcctccaggacctggttggttctctccgtctggccatctgtctggggatgataagctgtgctaactgcgaggtaacttcctagggcttcatggactttctcccagaaatgtgaggtaaactgtgtgccccgatcagatataattttcttaggtacaccatgaagacatactatcctggtcatgtataactcggctagcttagcactgctataatttgtcttaacgggaatgaatctcgccgtcnnnnnnnnnnnnnnnnnnnnnnnnnaaatagaatcatatcctgttgcggttttgggcaatccaacaataaaatccatacctatctcatcccatttccattcgggaatcctaaggggttgcagcaagcctgccggtcgctgatgctcagccttcactttttggcacacgtcacagagtgctacgtattccaccacatctctcttcatgttgggccaccagtatccttccttcagatcttggtacatcttcgtacttccggggtgcaatgaatatgccgattcgtgagcttcctttaaaattaatcccctcagtccaccctgttcgggtacgtaaattctctttttataccatagaacatctttttcgtcggttgaaaattcctttgcacgtcctgcagctaagcgttccttcacctctcggacttcctcgttgtccttctgggcttcttctatttgggttctcaaaagaggttgaatgtccagggtgtttatccgtccacgaggtactatatgtaggttcagctgagctatttcctccctaagctcagggaccatcccttccattctcagatgattgcaatggctcttacgactcagagcttcggccaccacgtttgctttgcctgggtgatagtgaacctctaaatcatagtccttgattaattctaaccatcgcctttgcctcaagttgagatctgactgggtgaagatatactttagactcttgtggtcagtgtagatatcgcaatggtttccaattagataatgtctctaaatctttagcgcatgaaccacagttgcgagttctaggtcatgggtagggtagttttcctcatgtggtcgcaattgtcgtgacgcataggccacaactttcccgtcctgcatcaatactcctcctagtccttgccttgaagcatcacaatatataacaaagtctttcctgatgtcgggaagaactaaaataggtgccgaggtcagcttttctttgagctgctcaaagctttcctgacactgttctgaccacacaaacttcttttccttcttgagtagttgtgtcattggtcgggctatcttagagaacccttcaatgaaccgtcggtagtatccagccaagcctagaaaactccgaatttcagtcacagatttgggtgctttccattccgtgacagcctctactttagcaggatccactgctactccaccggccgagattacgtggcctagaaaagcgacttcttttaaccagaactcacacttgctgaattttgcatataacttatgcttccgaagtttctcgagtaccaatcgcaagtgttccgcatgttcttcctcatctttagagtagattagaatatcatcgatgaataccaccacaaatttgtccaagtagtccatgaacactttgttcataagattcataaagtatgccggagcgttggttaaaccaaacgacattacggtgaactcatataatccatagcatgttgagaacgcggttttgggtatgtccccggttctaattttcaattggtggtatcctgaccgaaggtcaatcttagagaacaccttagctccgttgagttgatcaaaaagatcatcaatccgtggtagtggatacttgtttttaatagttacttcgttcagtgatcggtagtctacacacattctcatgctaccgtctttctttttaacaaataacactggggctccccaaggtgatgaactggggcgtacaaatcccttctcttgcaactccctgatttgctttttaagttcttctaactcattgaccggcatctgatatggtctcttggatatggaggcagttccgggtatcaggtcaataatgaactctatgtcacgatctggtggcattccaggtaaatcttctgggaacacatcaggaaatcgctgcactacgggcattccctttaggggtagcatggtaaatatacctccggcacgttcggttagcctaggatcttgatccatggttgctctcatatccgatccccagggtgtggtcagggtaacttctctatgtctacagtcaattattcctctatgctttgctaaccaatccatacccaaaatgacatcaagagtttggggtattagcaccataagattgtagagaaataccacatccctaaggcggatgggtacgtcaatgcaagctgtatccactgctatctcaaccccaggtgaatgtactaacattggttgtcttagtttaactctggttaaattgtgttgttgacttgctttcaaagatataaatgaatgcgatgctcctgaatcgaagagaactttaactggagtggagttgagtgaaaacatacccatcagtacgccttggtcttcctgggcctcttcagctcgaacgtggttcacttgcccgcgtccaaatccggtagcggtcctgttagtctgcggagtcctgaatagacctcgtccagcagcaggggtagcagtcccgtgaatagccgttgcattagctccggtgcgaatgggtgtcttgtttggatgaggacatttattggcgaaatgctcgtactctccacagttgaaacagcttcctgtccttactgatccagtggcggcctgattcggtgcaggagctcggttctgaatggtaaccgacctgtggaaattgctggaggcggcaggtcgactggttgtcaccactgttggtctccatgccgaggaggttgtccctttaggacgctggggtgcggtctgaggcgagcggttcatggcaagcctccttttacgattgtgctccacgaccttccggtcgttctccagcctaacgaccttattgattaaactctggaaactatcgtgatcttgtccaatcatgggcccgcgtaactcgtcattcaagccttcaatgaatttgtcgatcttttcctcctcgtcggcaagatctctagtcgcgtagcgcgctagctgagtgaaacggttcaggtactcttgtactgtggtattccctttccgtagtctcctgaactcattcttcttcatccgcatcaccgcggcaggcacgaagttgtcacggaaggctgtggtaaattcctcccagtttggttctccagcatcttcttctcgggcttctttgtacgtgtcccaccagtctccggctggtccttccaattggtttgccgcaaagatcactttattggcctcacgtactcgaacaagagttagcttcttctcaatgatccttaaccaatcttcagcatccataggttcttcagctgtggcgaatgtgggtggcttggtcctcataaactctccaaagcttgaccctccgcggttgccttggttgttcgcgatagcttgcagaagttgagtttgggtggccataactccggccagagtggttaagtcgggtgtctgagtttcgtcattgctggttgttgcccgacgtcggcttgccatctgtgtaggttgatggagtaagtatcctaattttctaactagctcctatggctttatcccattaagggagttgtgttgatatgaactttgttttgcaagcatggtggaataaactcatttataacacaacaacaatagatatcataaataatatcacagagtttcacaaatggtacataaatcatgatgcaatcgactgcatacatacgcagtccaaataaggttcatccaaaagatacatcaaactaatcatcaaactactcgtcaatctaggtaagggaggggggtgtctcgcatactatccaaaaatccatctgatacgagatcgaagctgcaaggagtccgtcagtctagtcctccagccatccgcaggatcctggggcaggtagagggtggtcgcttgcacacgcaaacctgagtccccacggctcagaagtagtggcctctggatctggcttgggcctcttgcccggaggtcgtgtgctcttgcgagcagtgctgagggtgcgaggacctccaaggaaggtgatgcggggaacaggggtctcatcctctgaaggatcagtgatgtctggctcgatctctggctcggtgtcggtcccctctgtctcggagtcgacctggatcggagtctccaaactggaacccagctgcggagaaggtgtagggatcagtggagtgtgcaccatctccgggacaggtggctgtgccgctgtcgggtccactaggtaaagtgctaactcggtagctagcatactagcctctcccagaagagcgtggaacgccggtgggtacggcggggtgaggaagaagtagcggtcacggcctactgctgtggaagtagaagcccctgtggtgctgatcttggctactcgaagctgctcctccagctggctgacgtgctcctgactctctctcagctgctcctcaagagtatccatcatcccgcggcgatcgttgtactggtcagataactgctggaactggtcgccgtggacctggagctgtgccttcagtgagtctatctcactgccccaagcctggtgctcctcctccaactgaagctgctgcactgagaggtcagtcaactcagtctccagctctcccatacgtctctggtggtcgtcaatctccaacagagcctcctcgtagtagtcatctactgcctcagcccatcgtgacaaccaagtcaccatcgggttgtagcagcagggcgtgtcctgaactgtgcaaactgagttgctctcctcccggaacgggtgatgagcaaactcgatactcactaactcagctcggtggatagagctgagtcggaggaaggcctcccgggctgcatcctgcatcgcggtctccggcaggtctcggtggtgacgtgtctgaaagctgtagtccaactcggaagggactcgggggtgaacctcgacccgagcctcccaaactgagccatactgtctcactcggtatgacgggaacccagagtatcgcagacgcctcaacatccgatgcagctcaatgacatacccctctgattgaggtaagctcaactcccaggtagcgggtgaatccggatctgccatctaattttaagaaaaacccaaagttagttgagagtaaaacttgttttgtaaagaaaatagttaagagtaagatgaaaattgtaccgagttttgtaaacatagcgtttttatttttgaaagtattactaaatgggaatttctcccttggccaacttagaaaaggggtggggcgccttttggtcttttcctacggttgtatggctctgataccagctctgtggacccctgtttttataacaggaatcaatcgtgtaaacagtaccatttccctggatcaagtagtctggtacacacgaattcatagctgaaataccaagtgcacatacacgagtgtctaatacgaattattacatcataaccccgcaggcgtagtctcaaattatcggaccgagcggtccggaatacatccaaaagcagaaatagataaggcagcggaattcaggcagcggcatgccattgccacaggcaacgaccgtactaagacctactgagcgccatcgtcttcatctccctcctggtagtaggcatagggatcctccgaggcttcatctcccgcttctgattaattttatatttgcaagggtgagtaccaaccgtactcagcaagccaccacagcaatgatgcacatgacagaggaattcaaaggatggctatggttcttttgcgcaaagcaagttttgtaattcttttcacaagcctaagacctagcatagactgatcaagttttaataccagtgttcatattaaacaatgacggttctgtccaccatccattgtgatcccaaggatagcttcccgccattgagtcgttatggttttctgaggacgtccacgttcccgcctctcaggaagtggctccatcagcataaaaatcatcatgcaatatcccatcccacacaagttaaagaatttagagtctagccaagtgtaatacatgtcccggtgctcaataaccgcgagcacgactatttgaatagatttggtttactcacactgcagtggatgtacactttacccgcactccgcgattgcccaacacatgagcctcgtcccaacacatgagacgcgtcacggcaaagcttttcgataacctcgcattggcagtacccgctccgtgaacttaaatcctcatgcactctaggcgtccatgtttctagcagtgagaggagttctggcgctcccgggaaagagaagtctcacacgcatattaaattatggttcaagttaagttctctctctcacacactcatggcagtcctaccaatggcgacaccgatgtagggcacgcttctcggccctacctcaacggctgtcccatcgtagcgcacctgcctcactcaggggtgaaccatctatgcagggatactgcctccgctcggctatctaatccgctaggtctatacccatacgagaagtgcggttgtacgggggttgtttcatgcttaacttcatggctcggt

SEQ ID NO: 14963 - DNA, 1925 bp, Oryza sativa
ggcttctgtgccgagacctcggggtcagagggcgacaggcgcggccttcccgcagtggcctcggggccatcctgggggtcgggggcgcctggcaccgtcggacaagcaggcggagggccagctccggccgtcgggggccttgggccgccgttcggctcgggggcctctcctccctgctctctctctctcttcgggcagaatcccggcggtcgcaaatcgcgcgcatcagcaagggaaaaccgaccgacaataaggagcggcccctcggctcgcgtttgccttcaactccaacgaggagtgcggtgacgacggtgcggacgacagcgacggcgaggccggctacccaggcgcgtcggagtgagcccccaggcctccgccaatcttaatagcttttcattcttcttccgaggccttcgggcccccttcttgttataggctgatttaatctgcaatcaaataaagaggaaatttttgtgtcaatttcatttgttctgtgtatgagacgaggatggtctgtgccatagtccttctgtgtcttggcttgaacaagggctcgtgcccaggtcccagcctcaaacggcgcgggtcaaggctagtgcctggggagatccacatgtcgagactggccaggccgggagcgtggtgaccgagggttatgggtgacccgattgtgggtttttgccgattccccccggagttcaccacgccccggggcacagctcggttctgggccccgtttggcgattttagccgacccgagcccccgagggtaggattgagcacgagtgacctatttcaagccaagattcttcaaaaggaaataacagcacagatacagcctttaagaaatcgaaaatgcttttattgaaatacggaagagaaaaaagataagcccccggccaaccctgcacgcccggggggtgtggggttggcccgagcccaagacctgatacccgacccccactaggggtagaagcgacgaaggtgttcgatgttccacgggttaggcagctctgtgccgtcgcccgtggccagccgaacggagcccggccgggggacgccgatcactcgatacggaccctcccacattggtgagagtttgctcagtccagcacgcgtttggacgcggcgtaggacgaggtcgtcgacgcagagtgatcggacccggacgtggagctgatggtagcgccgcaggctctgctggtagcgcgcggctcgaagggccgcgcgccaccttcgctcttccaagtagccgaggtcagggagcgtcggcttccttctttttgtcgctcgcaggcctcccctttcgggtggcccgcggagcgccctcgacggcgaggacatgaccctcgtcgccggaatggaccgacctcttcttcttcctcctgtcacgctgccctgtctgagcggcggatccgggggcggcagaagctgccactccggaaccggaggggttccaggtccaggcctcctccttgcgagccactcggtccgcgagctgaaaaagctctgcggtagtctggggctctttggaggcgatcttttcgagcatgcggttgtgccgcacgccccccctgaacgcgtagattaccgcgtgtgcagggatgcatggtatggtgttgcggacttggcaaaaccgctgaatgtacgagcgaagtgattcatcatcccctcgctgtactgcgtgcaagtccgcttcttcgcctgggcgcggatatgtgccttgaaagttcatggtgaactgttggcacaaatcctcccaggagtggaccgacgcgggtggcaagttcattagccaaccccgcgcctatcccttcagggccatgggaaagaaattcgccatgaccctgtcatcacccccagtggcctcaatcccagtcgtatagacctggagagactcggtgggaaattgacgctcccgtcat

SEQ ID NO: 14964 - DNA, 913 bp, Oryza sativa
tttcaggtcagtgctttgacacagctgaaattgagccctaaaagcaggtgcaataccagggacctaaccaaggtaattaattaagttcaatcaataatcagttggtgttttattgaaaagatactattataaattgtccatccatttttttcaggtttctagaaaagtagtaaaaatattgtcttgttttaacatcctgtctcttttttttttccttgaaggaagttgggattggagatgatcgtggaagagaggggatggactatgcagatgcaatggtagagggggtgaggtttgttgatcaaagtcagaagagtgtaactccatgtggagagctaaaggataaggggctttgtttgtttcctttgtccatgttgctacactaccatggatgaaaatttgagaacttcaatgtagagcacgtgtagggtttatgccttacatgaatgtgtgtgggataaatgaccaaaaaatatagtgtgctgagattactgtggatatattttttgggtgaaaatatatgtgaatatatattaccgctcctgctctccttgtttcatttttttttccattttgttttacttaccactagttatgctctgtgcgtgcagtttattttattagatatctatatggatgctcctaaaagcaacaatatatatagatggttacaaatggtacaaaattgtcatggttatttacatggtgttttgagatgttgtgcagtacaaattaatgaattaaggtgagttgctctcctgctgtcctgcacatatatagctatacaggtaagttccaacgattgatcagaggccatgtaacttagtaagacattagtattaattagtatattcacaattcacaaatgagtgaatgactaacacatgagttacagaacatgtcaatgctctac

SEQ ID NO: 14965 - DNA, 758 bp, Oryza sativa
atccttttggagagatgagcagcggccatagcacttggcccgttacgatgtgtatctacaacctcccccctggctatgcatgaagaggaagtacataatgatgccgattattattcaaggccccaagcaacctggtaacgacatcgacgtgtacctaagaccactggtcgaagatcttaaacagttggtgttaccaaccgggactaaagatcgatctttactcccggttatttcacccgggactaaagatagcgatctttagtcccggattggtactcccggtttggaaaccgggactaaagggggttacgaaccgggactacaaagggtttctccaccagtgtatagtgtatgttaaatttgtgtcataaattggaggggtcataaatttctgccatttaacatagagaattttgtccttatataaatatgagacttgcaatagcaatgcgtgtggtttgcgaaatttctaatgggcgattgatcgccccgcgtgatcacccctcctcacgtgatttccttttttggcaccgcattacttttctattttagtaaatttatgcatctaaagtttatacacctcaagtttacacatctaaagtttatacacctaaagtttagagacccaaagtttataagtcaaaatgcccgattcaaatttgaatttaaatttaaatattttatatatatattatttctatatatctaaagtttacacacctaaagtttatagacccaaagtttttaagtaaaagttt

SEQ ID NO: 14966 - DNA, 695 bp, Oryza sativa
aatcagactattgggagtttttcctcacaatccagattatgctgatgtacacatatatttagggccaacgcaaatgcatttgtgatgacagacaatcaaatccaatctcttaaatgtctccttatgacattctttcaacatgcctccttatcctactatgtcaaatacgagaagggaagcgacttgtcctctgctgcttaacattctttttggcatcatttcaaaaaaaaaaaaacattctttttggcctgctttgaattgggaggttctagctggaggaaggctcatatataccttgttcatcgtacatcggtaaatgcataagcatatcttgtaagggtgttcagaacttacttgtgcaaacgcataagacagtggagagtacatccctgctgccttttcacggtaaaagactgtcctctcaactgacaccacaggcaaaagtgtgagcaaatttgctgctccaaggaagaaaacagcagcataggtggctccaagtagattgttcagatcattcacggactctctgtacatataggaaagaattcaaatgatcagctaagaggcaatagagttgtgtcactgtgaaactacattcagtgaaatggttgcaataagaataggcgaatgggtagaatttgaatataaattagaacaagaagaaggaacatacatattctttcccctccgccaaa

SEQ ID NO: 14967 - DNA, 760 bp, Oryza sativa
cggcccggtgacgcgacgcgcgacgccaggaataacgggtcctgctgccggtacagggggcgcgccgagagggagaggggacgtggcccggcggcggcggcggcggcggcgaagaggggaggaaggtggaggggcttgaataatgccatcttgggcgccgtggcggtcccggccgtggagagcttgacggaggcggcggcggcgagcatattggcggcgggaatggtggcgccggcttcttcagttacagttactgtgttgtgttgtagccggccgtccgtacgtctatggcggcgatgggtaggggggaggtgttggggggaggaaggtatttatagggagcgcgcgaagaagaagggaggcggttttgtgcatgtatgtcgccagccatggcatctttctcaccgtagtgaggtttttgatttttgctgcctctgaattattgcctttcttttttcttcttaaaatgtgcatttctttcttttttatatacagtttgtccgctgtgtcgtttttcgatattacaattatttgcgattaatttatggtcatgttttatacataatgctcggttaattgtatataatgcactatcgatccaccatgcacgattaaattcagctataaccatattgggaggacataaatactatgcattatgttaagaaaaggctagtgcttccatgatttgtgcctgctaagggcttgttcggatcacaggataggaaaaagcataggaatagaacggggatccactagt

SEQ ID NO: 14968 - DNA, 1822 bp, Oryza sativa
caccgcggacttgctttagctcctcacctgagagtgtcagaatggaccgcccaatgatggtgttgatcgcctttgtctgggtgaaaatgaggtcctggttgctgaatacaaagtgattggccgccgggccagccataagcaccgtcggtgagccaaaaagtgacatcttgaacacagggccatacttcttgatcctgtcctggtaccactggtaatcagtattactgcggagggcacgaagaagggagatgctctggccaatcactgggaagccaagggaacctggagggagattataggatgagtacttgcgcctgatgacaaagtggaggaggatgggtatgagcaaggcaagcagcagagcaaaaggcatggatgaatccattgatggagtatgttgttatgcactatgaaggttggctgatcagtttgtggatttgtatacatgtatatatgtaggcaaaccagagttgttttctttctccatgatagacaagggtgtatggttgaacaaatttgatattttctcccgaactcagtaaaaggcctagttggtgaagctgaatatatcactttctcaaaagtcatacaacaaacaagcaaagattacaaattgagataaggggacagaaagatcattgtcaccagagtaatgagtctgattcatgataataacttaaaatattagtttataagtaaacaattctattacgccacatgataggagcagcttagcacgacatatgtgaataactggaaataaatggaagccacagctcaaagaatcacatttatgctagccaatataatttctagatttatgctagttaaagaatcgcagttcctcctcaaatgaaagacacaaaaacgaattccctaaaaaaactaagggaagaacatagacacaagcaaataaagagatgaactgaatattcctttggatctaatattagtttgaggaaagatgctacatacagcagcattaaattttgcaaagcaagcaaagcaaaccattgaaaagatctggtgacaacaatttggtcatccctaaggaaacgatccatgtcctatcctatgtaataagaaattttgaacaatattctagatttaattcttctgcataactgcaggactctcgatcaacaagtatagttttagccttagcacaggccatgtatgcaggacagccctttttttttggcatattattatgcagaatatttgccaggaaaaacaggtagacatttcaaaaattagaagcaaattacatacttagtggtcagaaaagtttagctccagttctatatatgtgcctgtgcacaaaatgacacatttaccgtagccgcagttcttctgaaaatggcatggccctgcaatatagattacagaacagtacttcacaatatatctagggtgtgttcagttcttgaaaaaagttggaagtttggaaaaaaagttaaaagtttacgtgtgtaggaaagttttggatgtgatgtgatgtgattgaaagttagaagtttggggtagttgggggtgaactaaacacaactctataagcagacgattcctcccaaatatagcatggccgtttatttaataacgtaggcaaaatcaatgcattatcaggatacaccacaatgacctcgagggccacttagatcctgaaaaactgggcaaaaaaaggaaaggaaaacgacaggtcggataacatattctgaaaatccacatagtcaacttctaagaacaaaaaatgtacacagacagatggacttcgaagggatagactctacccaatatagattcggagatcacatcatgaatg

SEQ ID NO: 14969 - DNA, 611 bp, Oryza sativa
ccgatgcgcctggaaataatggcgcaacttcctcgaagttatcaggatagcgtaaagcatcttctgggcctgaaggtatcgggtctcagcgtcccggagggcctcgctaacgaagtagacgggccgctgcacctttcggcggggccgatcttcttcgtcaggggccacatttccagggcgctctccatccgagaggccacgcggggcgcactcggcttctgtgccgacgacctcggggtcagagggcgacaggcgcggccttcccgcagtggcctcggggccatcctgggggtcgggggcgcctggcaccgtcggacaagcaggcggagggccagctccggccgtcgggggccttgggccgccgttcggctcgggggcctctcctccctgctctctctctctcttcgggcagaatcccggcggtcgcaaatcgcgcgcatcagcaagggaaaaccgaccgacaataaggagcggcccctcggctcgcgtttgccttcaactccaacgaggagtgcggtgacgacggtgcggacgacagcgacggcgaggccggctacccaggcgcgtcggagtgagcccccaggcctccgccaatcttaatagcttttcat

SEQ ID NO: 14970 - DNA, 618 bp, Oryza sativa
gccggattcattataccccgtccagtaagtgctttcaataagaagtgatgctatcggacttacattatctaggctctcagcttgtcatacatctctgaaatattttctcttgcagctgattcctgtttggtggagatggttctattgggccaacccggtctcctggaccatctatggagtgattgcgtcgcagtttgcggacagcgaccgtgttgtcaccgttcctggccaatctaccaccatggtggtgaaggatttcttggagaagaacatgggctttaagcacgacttcctcggctacgttgtgctggctcatttcggctacgtcatcatcttcttcttcctctttggatacggcatcaagtgcttgaacttccagaaacggtaggaggccggtgtccagcaggatgtcaatccgaggtcacgtttttggagtgtaaagcaaatgtagcaacttaataccgatgctttttttgtgtagatatatagtctgttcgatatctgctagcttgtattgacacttaatgtacaacattatttactcaaatgttctgagtttatggtatattattattctttttctatgttatcgccatcttgccattttgctggccttat

SEQ ID NO: 14971 - DNA, 739 bp, Oryza sativa
catgcttctaggttctcatactcctcaccgcgatataggatacaatcgttcggacatgcgtgaatcttatgaacttccagtcctaacgggcagactatcttcttagcctcgtacgttgtctcgggcaatttgtttccccccggaagaatgttcttgacgagtttcaataaatcgccaaatgccttgtcactaaccccattttttgccttccattgcaacaactccagagtggtatccaactttttgtgcccctgctcgcaacctgggtacaacgaagttctgtggtcctccaacatcttgtccaatttatgggcctccttttcactttcgcagtcttccctggcgtcctgcaacatctgaccaagatcatccgcaacgtcgttaccatcagcagctatttcctcctcgcccgtttgatttccttcaaatccaacatactgagcaaagtccggaatattgtcgtcttccacttcatcttcttccatttcaacaccttgctctccgtgggatgtccaacaattatagcttggcatgaaccccgactcaaacaagtggaaatgaatagtcctggatgcagaatactccttctgattcttacacttattgcatggacaacaaataaaacccctttgcctgttagcttcggccactctcaaaaaatagtgcacgccgtcaataaactctttggaccgccggtcagcgtacatccattgccgatccatctacatgagtcaaaaaa

SEQ ID NO: 14972 - DNA, 573 bp, Oryza sativa
taagtactacagatattgaaagttctaattactcaaaatctgatccaagattatgatgctgtgagactgataggaacactaacttagtaagcgtgcaccggctcgtgagatcgaacatgtacaagatcgccacggcgtccttacacgcgatcgggacgtggtcgaggaactggctgtctcctgcattccatcacacaacaaaaactcatcaaacaaagcaagtttaggcacaccaaaaaaaaaatctgattcttcaaccaatgcaagtataaagggggaaacaaatcctgcatttgtagttcatatgcttgtgcaaattacctgccacatcccaaatgctgaaggcaattcgagctccccgaactgccaaggtcttgtccatcagattcaggcccgtcatctgcaagccgttctgctcctcgtcgtccccaacatacttaacctgcagaatcaattacccaatagattaatttactttttactatctggattgactattctgaattcaagaagaaatgattcttgtgttcgattgctgactcgagtttcagaatttgattgcttcttggttga

SEQ ID NO: 14973 - DNA, 623 bp, Oryza sativa
aacatggacaaaggaaacaaacaaagccccttatcctttagctctccacatggagttacactcttctgactttgatcaacaaacctcaccccctctaccattgcatctgcatagtccatcccctctcttccacgatcatctccaatcccaacttccttcaaggaaaaaaaaaagagacaggatgttaaaacaagacaatatttttactacttttctagaaacctgaaaaaaatggatggacaatttataatagtatcttttcaataaaacaccaactgattattgattgaacttaattaattaccttggttaggtccctggtattgcacctccttttagggctcaattccagctgtgtcaaagcactgacctgaaagatgcaaatcaaacaggcaaatcaacaccaactagctagtaatctctaatttttcttttctttatttcttttttaaaaaaaaaacaaagactctctagctttaagccttcatagcaacaaaaatatatagggaattaagctagctgtaactaccttagggctatttactggagagcttgcggtatcctccagggaatcatcatgatccagggccttgaagaccttcttcttgagcttcttcaactcc

SEQ ID NO: 14974 - DNA, 561 bp, Oryza sativa
catgcataagtattcagtattccttgctgatggctgaagaaaggccctattgacaagttcgtagaaccattccccacctacatcctccaaccttttgactccactagaactgtccagctgaataaaaccattagctatccacatgtgaaccaatttatctttttcaaacacatagttcctaggaaatattgaacaatagacaaagcactgccgcaaatatccaggtaacgcactgtaacaacttccaagagaagatataattctgattgcaaagttatcatctgaaacattccaccaccaactatttaagatttccctccaatcagcttcttccaactgacttctcaatgttgccccagttacctttatggatagaggcaatccatgtaacctgtgtgatatttttctaccaatttctttgagaccttccgtggacaaacttctgcagggttcaacaaatgcatatctcctgagaagtgcccatgagtcatcggattgtaaaggatccagaattacagggcctgcagtccctacaaagttagctacactgtacaattgagt

SEQ ID NO: 14975 - DNA, 501 bp, Oryza sativa
cgcgtgacatgaatcggatactgatgacataccatagtttttacaaaaacatcttcaatttttaaatcgagggagagggcgatgcagtcttaatcggacatgcggcagtgaaaaatcacgcgcgcgaggctgttgtgggcccagttgcggcagcgtgcaaaggcgcgtgtggataatggacactgccatcgacgtcgacatcgacaccacctgagtactgtagcttactgccatcgacggtcgttacaccatcgttgtcatccccaacgcccctgacctcattgacatcctcgccaccaacgacgtcgacatctccgtcgtcgagggtgacgccgccggcctgggcgaattcctcgccttcgtaggcaacctcctcttccccttccttgccttcgctagcctcttcttcatcttccgccgcgcccagggtgatcctgacaccagccctggtagcctcggttggcgcttggacttcgaccgctccaagagcaagttcgagca

SEQ ID NO: 14976 - DNA, 1261 bp, Oryza sativa
catcaatcccatattgttgaaatttcaggtctgaaatatgaaaagaaagaaggtcctgctattgatttgaagtgtttattttgaaacagttgccgcaaagaaaaagactcaaaatgaaactcgggatcaggccaatctggatccttcttccaatgatatgttgaacaagcatcggaaagttgtcctctacattgtaagatttcttatcatttgtcatattctatcttctatatatttcatatgttaccactgttgaacagttgtcaataacaatgtcagatttatgatcaattctatgaatatctgaaatcatgctcaattttatgttatatctgctatataatacttcctccgtttcacaatgcaagtcattctagcatttcccacattcatattaatgttaatgtatctagatagatatatatgtctagattcattaacatcaatatgaatatggaaaatgctagaatgacttacattgtgaaacggatggagtatataattagtggtttacaacgatgtgattattatacatgtcgaatattagtcttttgctataaaaagttttttccacccttcacattttgaatacacaacttttaaatcctgggtctgcctctgctcagaccgctcgactagaccatacaaccactcaacccgttggctacccacgcaggccaagccccaatgcagcctcgagagcgcctttcccgccaactcggagagctccacgcccacttcctccgccgcggccaccccttcccgccggcggctcaccccgaccctgacctcgaccgcgcctacatctccgtaatccgcgcggccgccgcgccgcgtctcgcactcgcggccttcgcttgcctccgccgcgtgggcctgcccgcgccaggacgccgcgcgctcccatccctgctccgtgccatcgcgttcgcgcgctcccttggcaccgcaggggccgcgcacggtctcgcgtttagggtcggggcagaggtcgatggcttcgtcgggaccgcgctggtccgggcctacgcggcgtgcgggcgtgtggaggacgcacgcagggtgttcgatgggatgcctgaccgggacctcgtcgcctggggcgtcatgcttgactggtaacgcactgtgaacagctccatttcttcacgcaatcctatggaatcctagttgtttgatctatctcgtaagtatcatgttctgtgtatgcctggctgcctgcaaaatggtttattcagttgcttgtgcttagttgagagtt

SEQ ID NO: 14977 - DNA, 1398 bp, Oryza sativa
taattactatacaaaaaataggtctaatttcatcatatacatgatgaggatgggtggctacattgcgcgtatggattgcacttatctaatactacctctgtacaggttgtttagcaaaatttaaggtttacgaagaataaacataatgccctttattcaataatgtacggatggaagtgagaaggtagttgggggtaggatggagaaaattttgaattggaaattgttgtcgggaagacaaccatgccacgtcgaaaggcgtggcactcttagaggattggatgtgtagtaaagacaatatattaattggtaaaaacttttgggatccctcattacatggtcctagatggctatttatagtctcagtacaggctcaaatcctctagggtttaatatatatacagaggaatttatatggatacctttatgataggggcattagtaagggcatatagtgtctaccctagctatgggcccctatatgggcttcttgggccagcccgctaatggtgaatagccttcctggatcgttccgtcctttgggcttcctggcgaagatgattcctcttcgggcgaatctttcctgcttcgccccatggcttcacccaaagtgaagatccaacgatgagtcccataggctcggtggtgaaccctctagacgctgtccttcgacttcgcctaggtgtttcgcccgagtgctaacccattgggcttcaactggcgcctcgcgggtgtggggttctttgtggtttcggcaggttcggtcgaaagcccttgtgacatgcctccaaatgattgatgttacaaaaggtgctctaaagtgacaagtattttgtaacaaaatttaaaccctaaagcgacagacagagggagtagcttgtggtgactcgggttagagcatccccagcacctcctgtatcacatgctccatcctgaaaatagcgcatgaggagagaaaagggggctccaacagatacgccatagggggctccaaatttggcgtttctctctcctcatgccatccagcaactgcccgtctctggataaactcacgccaccatccggatcgcgtcgctccatgggtgccgtgcaagggtagaggtgaaggcatggaggtagagaggagagacctactggatctggcggtggaggttcggagtagaggcagaggcccgcccgccgccgcctgtcgttcctccgccgcgacaccgcggcccgtgcccgtgaccccgccgcccgcgcctcgtctgtccacccgccaccgcctctgcccggcgaccccgccgcccacgcctcgcccgtccgcccaccgctacctgcacctcgcccatctgcccgccgccgcttgcctccatctgctccccttgcctgccgccgcctgcctccatccgctcccct

SEQ ID NO: 14978 - DNA, 945 bp, Oryza sativa
cggtggaccaagtccacgcgcgcaccgggacggcaccgtggacccggaccacggtggttcacaggcggctacacacggtggcagaggggcggcgacggctcacggccgggcgcggccaccggcgacatgacacggcacggcggcgagcatgggaggtggccgccgaagaggagaaaggggagatggaggggagtgctcaccatgcgccggggcggcgaggggcaacgggcagtggaggcgctccctcgggaagggcggtggcggaggtccgatggcgacccgcgagcacgaagcggcggacggcagccgggattccctggggaagaagatagaagggttagggaggaacataggcgaccggagcggtgagaataccacgccggagaggagaggaatggtggagctcaccggcgaccgagagataccgagcttcggcgggatttcggcggcttggagtggcagccgaggtgcattgggacgtggcgaacgtggtggaggcagtggcgtagcttgcggtggacagggatggcggcagtaggcggccggaggcagcaaaagcgacggcggcctcgggtgtgcggtggggctagtttttcggtggtggttgaaggaagaggagcggttgccggggtggagctcggcatggcgatgccgacggcggcggcggcgcagcgcagcggccgctagggcggaggtggtggccggctgaaggcgatgaacggggcggccggtagggtgatgttggggggagggggttccggcaatggattgagggctcgaaggggaggccggggcgcggcatcgtgcggcaaggtgggcggtggtggcgacgcagtgcggcggtggcgggagcggccgtggcgtgtggctggagatcgccggcgagcggcggcgcataggtttcacggggaggagggggttccgggcatggggcgcttcggggag

SEQ ID NO: 14979 - DNA, 15319 bp, Oryza sativa
tttgacggctaccgcgaagaggagtttgtcattgttgttgcacaacgtctccattcccacccaagcattttctagtgacctccacttgtgccctagctagtgaaggtgtagggccgtcacaaatttctcgaggttgaggatcctcatgcaagttttgatccagttgaccttgcattttctgccagtgatgtctcgagatctggcccagaggaaacattttcgttgcttgtcgagaacttccaaggattctttgttcaccttgagggcggtgagaaggtagacaggttgcgaggtgagcatagatttaaccaaggttgttctacccgtcagacccaggttcctccctatctacccagccaggcgtcctaccgactaatcgaagaggggctagaggtgcactttgtgcaatcgaccgagcattagaggtaggcctaaatatttcagcggaaaggctgtccttgtgacttgggattcccccaggatggtgtcgatgtcaagattgtcacacctgattggtgccaccagcgatttctggaagtttgtgcgaaggctcgttgcttctccgaacttctcgagaaggctcgtgggagcatcaataaattgtgttgataaaaaccacggcgcatctgcatagagagaggttcaaaggtgtgcatgcatgcctctcaaactgctgagaatctttagctccgtagctttgcccataatttttttggagtgggtcaattgcaaggatgaagaggagaggggacagtggatcgccctgacagagtccacaaccatggcgaatctcctcccctgggatgccattgagaaggatctttgaatgggaggttacgaggagggcccctagccaatttatccaccgttgcgggaaaccctgatgctgaagcaacgccattaggtaatcccaacgaacgaagtcggaagctttggagatgtcgagcttgaacagcagtgtgggtcgcttgttcctgtggtagcttcgagctaggttgcgcacatacgtgaagttatcgtggttgctctgtccacggatgaaagcgctctggctagtcaaaaccaaggagtgccgccttaggtgtaaggtcagcagcttggagaagatttggttgtttgtttttacaacctattattcattcgtttgtctaagaatcctcattgtcggtgccgagaatgactagaaatgcaggatcactattgttgcccaaaaggtgctcgttgaattcgtgcgtaacccactggttgtccaaacattttatggttatcaattttttttaaatacgtacattcagacaaggatgatacatgtaaaagaactggtcttttattccctatatatagctaggtgcttaattgcgcagtatgaattgcaaaacgattaaaagtacaatctacaatttcaatgctatttcaaatatatgaaaaataatggtttgaaaagaaaactggtgtgtacctgtgcattgatagctgagataccagagtcaacggtccgtaagccaacaccagaagttaagtatggggcagtagttcaaccacaatccatatcattccggatccggctcctctgtctttaggtgataaaggcatacgagcatagtaatatgtgccttgtgctaaagtgggaaacaatgattttgcagtttattgtggtaacaatggcaaacagtaaaagtgttgtatatatgtaccattcatgtgctactgtagtgggctgtagccatcgatatcgttagttcgctgtaaatttgacagctgaaaatattctaaaggcacagcattgtgcttctcctctcttcactgtgtgaagtcagaggatctccttccctgccgttactctagaatttaacatttcgtatcacaaataatataaacaggtgttatgatcacaaacgagattttcgatcacagttagaaggattcaagtgatacataccaagaaatcgagaatgaggtcatgatgatcttgtcgctaattacttttccgcaaatcctatctacaccgatgaaatgtttcgtaggagatttaggatgagacggccgttgtttctgcttatcgtacatgaacttagtgagtggtctccttatttcacccaacaagttgatgcaactggtaggaatagtctttcaccgcttcaaaagtgtacagcagctatcaggatgttaggttatggaaccgcggctgattaacttgatgaagtcttgaggattgctccaagcacttgtttagaatgtttgggaaaatttgctgaaggggtgattgaaaagtttggtgacgaatatctacgcccgccaagagccgatgaattggaaaaaatcttacaagaaaatgaggctcgtgattttcctggaatgtacggaagcatcgattgtatatattggccatggaagaattgttcgaaaggttgggcaggcatgttcactgtggtaacaaaggcgttcctactatgattcttgaagcagtggaaactaaagatcttcgtatatggcatgctttttttggtaccgccgggtctcaaaatgacatcaacgttctaaacaagtcgccactgtttattcaagcaataaaagaggaagctccaacgatacactacaacggaaacggaacacaatatgacatgggttactatcttgccgatagactaaaggcattgtaatataattattatatttatggttcataaaaattattgtaatcatatatcttattctatgcttgatagtattaatcaaatatatagccacacaatggtatacataaatgcatttgcagttgatcaaagctacatgcaaagcattaaacagcttacagacagaccctctatatgtgggttgtatgagctgtctttatatttatatctgtctggatgataacttcgaggttcttggagacacacccctgtctgtgggttgtacatgcccttaggcttcatatcacataaaatttgtatgagaacacctacatactgccatagcgcaatcaatacattgcagtgcttttagcaattcagaaagtgagaaatcaacacgaaacagaagcagtgcagttccaaattgtcttcagctaatatattgatgattcaaacagatgctaacgatgcaacttagatacaagagacgttcataatccataacaactccaactacaacactgaaccatcaaatatagctgattctggtcaatcttagccaaaggcgtttggacattactaagagcgacgtagcaaagagacaatcctggatacaagaccatataactcatttcgggttcctgagcacaatgatgaccgaatccccacgtaggaacatcttgctaatgaacctgtccttgttcactggaagagccttcttcttgcctttaccagtctttggtacctgcagcaagagaaacccatgttactgaaaaatagcaggaccggaaaatggaccaaaggtttagaacttcagataacaccatgtacctcagtccacatctccctaacattctcaagaaccatgttgcaatggcgatcaaatgccctcacacgaccaagcaacttcttgttgttccggcaattgataagcacctagaaagaagagtaaatagaatcagaacagtgcatatcatacaaagcatcaactatagtcagaacaaccgtttatggtgggctaactatgtaggcaactcctaaagacaacatttacactaacactacaacagaaggactatggtcaattattcatatacattcaaaaggcttcattaacataacgggctgtaggtaactcctaaagacagcatttacactaacactacaacagaaggactatggtcaattattcatatacattcaaaaggcttcattaacataacgggacttagagagcatccttattggctaacagagttgaggaaactacagttcattcacctatcaggaaaagaacacttccttttttcagaaatccagagttcattcacccatcaggagaagggcacttccttatttcagaagtcataagcatggattctgatgttccttattcctccttcaataattccatgtaaagatgtatttttctcttccattttgaatatcgcggtgtgttgatgacttttagttactaatgatgtacataaattttagccatgtgcatatgcttgtgattacttcatacattattttcaatagctgcacaatgtatgactaagctgtatgatgttactgtgttttcttatttctacacacattcaatttttacatcgattaactttcacagtttgtgtcaaaagtagtgatacattttcacaaaaatggttaaatttagcgaacttattttatttttgtttccaatgattttacatgcatgcagtgcaaagctaatagtatggaagcaaatcctatacaggactccacgataagtactaatatttactgcataatcaagatctcaaggatatttggttggttcagttatttattttttatttagacgtaattttcttcgaagatttgatagatggccttatatcaccctgtacagcatatatatgttcaatgttaaattgttaatagaagaactacaaagtatatgttgaactttctctatgaaataccttcagtctagagcaaaaccacctcaagtcgctgtgtaatttgtatagtgaagtgatcaaatcaagtagtagtcattgcacatgcacgataactagtagttaataagttagtaacattgttcaatatttccagtttgaggatgtaaaatctttaaaaataaccattatactaatatgatatggatttatgaacatagctaacatcctggacaacttgatctacttgggatgggtaagaggcaactctaactattccacgtcatataggtagggaacaagaattctataggcatgatgacaccgttgtaatattcttcatcccctcaatccaattagttggaacatgtaaggatgtacttttgcagaagaatacgtctaagtgaggaaacagagtaactgagctaggttttaaactatatttgactaattggctagtctgccggcaagaacacgtagaacaaacgaattcccggctaggggaaacccacaagtaaagcaacagtagcaaacaccacagtaaacagtaaagaagtttggctgaatcaaactccagaagaagaagaatcccagcaccaaccaacctgggtgttgttcttcacgctcatcatcagcacggacagcggccccgtactgaattcctcctcctccttcttcccctgctgctaggagagagtaagaaacaagagaccaggtaaggttagtagtttccccagaaaaccacgcgaacggagagaagaaactttcgagggttttgggaaggccgcttacagtggcttcctccgccatcggcagcgaaggcgggcgggcggccggcgagcctggaggcgggagaggcctctggatctggagctcaggagcggagacgatgtcgacgacggcgagtggcggcggctagggcaaactcgcggcttgggcacaagtccaccaagatatatcggcgcgacggctcacggcttcgtgggctgggtttggctggcctgttaggtatatatgggctttgggccttggaggtcgctgccaagtgcaaaccccgccccgccaggccgatgcaattattaaggaggcgactccgggggtcagtcgcgcgtgtccctccccgcgcgattggacatgtgtcgcgcacgaaaaagggatggcagacgcgccacgcgggagaacgagtttcccttttttttttttgcgtttttcgtttctgttcgctttgcctttttttccgtttttccctttctattcagtttggtttttctttttttgtttctcttctgtttttttttcggtttttttaaagatgtatgaatacaaagtttgtattcgtatgtataccaagctagtttatattcgtacgtatacaaagtttttatacgcgcgtatacaaactttgtatacatgatgtaatttctttttttttattttttaatatatatatatatatatatatatatatatatatatatatatatatatatatatatatatataaagtttgtataatcgtatacaaagtttgcatacatcgtatataaactttgtatatgtgtatatattttttatgcattaaaaatatattcatatatatacacacacgtatattcatatatatacatatgtatatacgtgtgtatatgtaatatatacataagtatagtagaaacagagaagagattagaggcatagaggggggcgattgactgcgcgcgtaggggcgcgcgactgatcgcgtatcagccgccccccaactccggctcggacgtctgatgtttggaggaaaatcggacgctgacgtcagcgtccgatttacatgtaaaaactactttaaaccgatttttctcttaaattacttatccaaatcatgattcgattgcatcattaaatttgttgcaattaaattttcaaaacaagaccacacatggatatattccgatgaattttttttagcttattattgaattatttttaaatgttgcacgatgttccaccaggtatatcggaattgtagatcgaaaatatttcactcgtttaaatcgggtgttgtttcaccttgtataaaaataatgtttcagcaaatagcgaaagaacgtttcaattcactgcaacatttgatccatacatagtgaaacattataagtacactaggtgaaatattttttggtggaacaaaaaaatgaaacgaattccccttaatagggggtttctaaaatatgtgggttttttgttgcaatagaatatttcagctcactgcaacattagatctatacatagtgaaacattgtgagtacactaggtgaaacatttttggtggaacaaaaaataaaccaaatttccttaatagggttttccaaaatatgtgggtgattttttgcaacggcgcgttccataatatcaaaatccactgcaacatttgatccgtacatagtgaaacatcgcaagtacactagctgaaacatcgtaaaattactggttgaaacattgaaagagatcatatgcaatattcaaaaaaaatatcaatagaaaggctaaaatatttttttatcgaaatataatcatgtgtggtcttgttgtaaagatttaattgtaacaaatacaacggtgtgatcggatcatagattggataattagtttaagagaaaaatcgttttaaaactacttaaagtaggagcggcagaggcgcgggcgcccgaggcgtccgatatttccttctgcagtcggacgcccggcgcgcagcattctccaattattaacgtcggtaagttcgagtacatgatttccctaatctctaatcccagaaatgtttacccctcaggaattcaaaaccatataaaataggtcccatggcagtatgcataagcggtttagctgacgtagcatcttagtaaaaaaaaaaagaaaataaaaaaatagtgggacccatgtatcatcacctactacttttactgttccttttcccatgccggaccacgcacgcgccagctgtcacaaccgccgccgtgctgcagcggcaaccgaccccgcttgcgtcttcacggtgaacaccaccgtggcggctgtcgcaccgcaccacgctgaaccacctccgctcgctagcggcgatccttgtgcacgcgccttttgccatagcctaccttgttcgcgccttttgcggtgaacaatgccaggagaatgcccccacggcagccgtcaccgacaatgtactggcaccacccaccgcaaccgcagctgaccccgcccgcgtcttcatggcggtggtggcggtgaacgccccacgacgaccgtcacaccctaccgcgcatccgctcgccggtggcaaccctcgttcacgcgtctcccagcacagccatagccgatccccacccgcaccttcgtgacggaggacaaccccgcagtagccgtcaccaacccgtgctcgcgccacccactgcagccgcagccaaccgtacccgcgtcttcgtgacggaggcgacggcgaacgccccctcggcggccgtcgtaccccaccacgctagaccggcttcgcccgcaggctgtgaccctcgtgcacgcgtctcccgtcacaatcacagctaaccccacacccactccttcgtggcgaaagaccctgcgacagccgtcgccgacgtcatactcgcgcatcccaccatagccgcaaccgatcccgcctacgtcttcacgacggaggcggaggcggcggcgaatgcccccacggtggtcgtcgccgacgtcgtgctcgccatcatcagatcaacagaccaacctctgcatcttcttctcctcgccatcatcagatcaacagcttcgctcctcgccatccaatcgattttcctcttgttgatgcatgcgcagacttcacagctctactcttctataaatcaatcaatgcccacatccacaggggatgtgggcacggctggcggcatgccggaggagggcggcggcttcgctaccacgggcgggggtgcccagtggcggcttgctggcatggaggaaacgaagagaaatagatggagaagagaggaagagaggaggaagaaggagaagtcacttgacacatggatccaatatttgtttttattctgccttgttgattaaaatgccacgtcagttaaaccacctatgcatactgccatgggacctactttatatggttttgaacatttaaggggtaaacatttctggtattggagattagtgatatcttacaggctcgacgtaaagttgagggatggcaagtgaacttattccttcgttgccacaatcttgacccagcctttgtggtaatgggccctcgcgtcggccacaatcttaccacggtccaacaaataatgggctcccatttgtacgcaaacaacgactgtttgccttgttatttggattccactttgggctcattttttgtatggtcctgtcatcggtgtcatggagaaaaaagttggcgccaatttgaaccttcccgcgcgattgccactccgtgctgaccgggcgtaagatcagcaagtagtaacaaaaaagagggaggggggattttaattagtttgctggttgaaattgcaagtgtttggtatttaaaatcaacatacagcacaacaccgtccttgttaaaaatgtatgtatacatcgtaaaaatgttgtggtcggaaacacgtcatccacctcatcgaaaacttcctttgtttaaaaaaaaaacttaaaattctagttatgagtttgaacagattttatttttttagagcaagtataatagtaggctataagccggctaaatgctgaggtggagaaaagaagagaggagagagaagagaaacgggctgtaaacttacaaccggcttggacacaggaactaagaaactctgtgtgagagacaagtgggccctgtattaattataaagagctaactattatataggcaggctgagagaagtctaaaaaaaacttatagccagcaggtcagctgtattattagcctttcttatgaaggttgtatgttacaacggtgtcacgggtgcggcgcccgcggccgggctagccaaaccgatcgatccatatgcaatcagggaacaaacggtgcgcgggtgcgacttgcgaggtgcctgcaaggctggcctagcttgccacgcacaaactatactcaagggagtagtagtagggtcgtagggaccacatgcatgcgcacgggcctgttttttttgtttaatttgacacgggtgaaaaaaagaataaatataattcacaggaataaatcatcgacctaacaaattgaaatacatataccatgtcccataaaaaaatacatataccatgtgcaccatcatgtacgtcgttatagacatcacgtcggagcttacatatttaatgaacatggttgatcaagcatgtatcgctggcctatatctcgaatacatataccatggcacgatgtaattaatctttgatattgtttaatagaaatggcctatatcactggcctcaatgaatattccattaagtaatgaaattacatacggccaggatgtacgtaaaatgaaaaaaaactaaacagcatgaacacatcatatatattgtcttgtggcagctttttctctctaaatagcaatatgcctataactatccaaaacaatgtcttcaaagaagccgacatttgtccgccaatgttgcccaaccaaccaaactattagttttgagctttcattctcccatacaacactttaaacaaacaaacaacaagcaatctcgaacaataccgaagaagtcatagctttcgcgcgcccggtcggagataatcatcttaagaatatcaccatttattacagaggaaggttgtgcctcctatcaaaaggacaactagagacaaaccacacactttctcaaaaaaaaaaaaaaacagagagagaccaaccgcacagggtaagtcatggtcactgctggagaaatccacaatagtcctggtttgcaatcccctttagtcccgagttgcaaatcggaatcatgaatctgggaccagagatgccgattggtaacaatcgacatattgattttttttattgttttttgctgtttgcatattgattttaaaccaaactcaacaattaaatcatccacattcacagaaacatcacaaaattatccacaaattcacaaatcgaatgaacatattcaatttgacataaaaaattcacatcacaaatttacagatccaaatatatcgcaaatcaacaaataaatcaacaaaaatcatccactcgtcgacatcggagcaaagccgcgtgggccgccgccgcccccgcgtaggccgccttcgctcattcctcgctgcaagaaaaggagaggataagagagaggaaagagagagggagagagagaagagaggaggaaagggaggaggaggaagttaaagatgaggaggagaagtttgcgatcgaggaggagaggataagtgtgagggattatatacaatgcattgatttttagtcccggttggtaaagatagtagggggccagactctttttgaatcgggactaaaaaaaatctttagttgcagttggtaacataaagtggcgttgggctttttaaccgggacaaggatgtttattggaaccggaactaatatgatatttggccgacccacgaaagatccgttatccagtagtgtcaccaagccgctttgaacttccactgcctaatcttcccgattaaaatggagtacaccacctatgtagccccttccacttgatcgccatcaacttaaagcttaccatgaacataacctatgagtttagatagaataattgagaactttgttttttaaaaaacttcatatttgtatattacttctcaaatttatgttcataaattttcgcttcatgacacataaatttgcaatttatcacaattttggaataaaaaagattctggcctgttgcattttattttttcttggaggaggcctcctggctcgagccttgtttcttgcgtcacaaaccaggtgcaccaccactataacggcttacaagatcaaaaagacatccccgcatcgcccgcatgttccagaacccaaacacaacgaagagacatatagcaagcaggagccgataaaggaggaatccatcgccgcagctgcttactcaccgacaataccccccaccccccgtgtctctccaccgccgctgctccctccttcgatcaaccgccgctgcaacacgctccaccgactccacgcgctgggccatttcgtgcgacgacgacttccacggccgccgacgcagtgacctcgccgccgacaaccccatctctcctctccagcgccgcggttccacgaccccccctcccccccgcgctgagaaaatggacattaagccattctcaaaacgcggtttcgttggaatgccatcccgaaacagcgattcgcgaaaatgccaatttaggccacgcgcactgctactttgccattttctcccttttagccattttccgttccattttcgaaaatgcaaaggatggggagatgattttgcccctttgtcctgatgttgaaatcttgtgtgcatcgagctggtcgagccatttcagctcgccaccgtgggtaagcgccaccgctaccgtcacctgcatcgccgatccacctcgcctgcaccaccagcccacctccacagcctccatccttccccagcagccgaagatcgtcgtccgcagcagagagaagaactcaactccaacccaagcccaaaccctaactagggttagggttatggtgatgcaacgagaattcacggcaggcaaggacaacatgtctcaaggtagttcctttcgtgtttccggacgccaattttacttgttttcagcttggccccagtggacttcctgttgtcaagtgcccaagatgtgggagatgcagtagtggagtgcaaatcgtgaaggcaaggtggtcaggtgtttttcaaatgcgagaagaacgaacaatatgttactaaattctccaattttgatttgatatgagatggctggaatttcagaatggtatcagaagtaattttcttaggttttgatgttttgacaggttccagaaccttgcacattcttcaagtggtatgatagttactagagaatggttgaaggaatggaactggattatattggacataatccaataccagttgcaagagctgtggcaggtgaaggtgacatggttgatgaaggcaagatggataagctaactaagtggatccagcttcttgtgttgatgaacatagggcaaggcctactagtgctgtttggtgtgtttgttatgcttatgaaatgatgtaattgatatgttggatgtaatagatatgtagtgaatgagctgtgatgtaaaaagaatggttaatgtgttgcttttggtaatatatgtgctctgaaccatttgtattagaacctggaatgagtttatgaaaagatgcagtgtttatggctagttgatgactctgaacaaaatatgtgttattgcagtgtttaaacctgtgggcagtatgttggtagtattttgccaatattatgtcaaactattggcagcattttggcagagtagttgcatttttgaatttatcagcacaattgtaggcatagcaattttagtgtcaacacaaaacaaaatgggcagaatgtgtgcacatatgccatcagatctgacattactaatacataggttcaaattaagctggttcagtgcacataggttcaaattaatacataaaccactgatcaagctcattacacttgtcattcagtgcacatggctgcatacagtttgccaaccaaatcagttcacatagctgtagaaaagctagatccaaaagctactagatcaagcacattttcagtttcttggctttttcttgggtgtaagtttccttggtgacctgcttggctctggcacaattgcaggctgggatctagcacctggattcagtggtgccttccttggtgacctcctacttagtcctgcaactggagctggctgtgagctggagcctgcctacaattgctttccttggtgatcttctgggtggtcctgtcggctgggaggtagagcatgcctgcatagatggttgtgatggtgttttgaagtgttggctaggagctagagcatagctgtagggatggatgtgagctagctcctccatgcatgagatgtgccaacctgatgctgaagcaaacaaaatacaatttttaacaacatttctaacctaagaaaacaagttacaaaaggtcccaggttttacctccttgtcaatctgccaggattatcttcaacatttgtagccacaacaggattatcttcttgccaccaccttcaagacaacttttgaacctaagttttctatttctaccagcagtctttcatggaagtggtgcacttagtacccaggtaaatcaacttctggccggtgtgatctgtcaccaaaggttcaatcactctcttgtatgcatttttaaacatctgcactaggtaatagggattcacaaagtcttcaatattcacatccctactctgttgtgcagtaatcaaagcaagtgcatgttggaatggcttccctatatgctgccattcttcacatgaacaatactgcaagcaagctttcacaatgtacttcccatgagttgtgctattgtcaacaacttcagctgtgaaacaataagctttaaccactcataggtggcccagacccctagtcattgcctttaactgttgtgtcactgcaggtagtattttcccctgctttttttttctgatatcctcattctcttgttccataggaccatgactagttccctatacttgtcaactaactcacatacagacaattctttgtaatctttaatccagttattgaagctctctgcaaggttattggtgatgtagtcacacttaattgcagggttgaaagcacttctcatccacttcaatggatggtatgtctcaagccactctagcacacaagggcatgctattacatgctagatgtgttcttgccacactgttctcctatatgatctagctgttgggtacatgtgagagtgaccatcaccaccaaatcttttcacaaagtttttcattaaatgccagaaacattccctctgctcagcatactcaaatacaatatgtacaactttctccaaccctttgcaagcatcagtacaaatagctaatggattaacatctcctatagccttatgtaactgtctcatgaaccattcacaattatcttcagtttctgcatctatgaaaccaatagctaaaggatacatccaagtatgcccatctatacttgtagcagcagctaaatgtccaggccacttaccattcagagccgtggagtctacactaatgtatggcctacaaccctctaagaacccatcaatgcaaggcttaagggcacaaaaaaaaatctattgaagtatgctttaccatcaacctcctttatgtaattatgtcaatctctacaacactaccaggtgaagtgcttaacacttgtgccctccatctaaatagcatgtggaagctttcttcccatgatccatacaactccaacattgccctttgcctacccttacatacagtgtcataattaattgtgcatttgtgatattcttgcaacctagtctataagcttttagggcccatacctggattattcttcataattttaactgcctttgaagctacccatttactagttgcagtagtggtc

SEQ ID NO: 14980 - DNA, 2211 bp, Oryza sativa
aaaaaaagggacgcagttaaacaaaattaaatgatgcacaaactacaacgaactcgcccatcaatcgcagcaagaaaatgcaaatcgaccaacaaattttaggattgaatcacttacccgccgagtagctattgccaagtgcactccatactcacagatggccggcgacgcctacatgcgggtgacgccgacggtgagctccttctacgccgcaccctctgctcctccacagtctaatcgactccgtcgccgacgagcaaggatgaaagagagcagacggagagagagatgaactcacacccagctggatctcgatcccctttagccactgagcaggggcaaaatcttctccccatcctctgcattttcgaaaatggaatggaaaatggctaaaagggagaaaatggcaaagtagcagtgtgtgcgcggcccaaatggcattttagcgaattgttgtttcaggatggcattctagcggaaccacgttttgagaatggcttaatgtccattttctccgcacaacagcatcggccttcaccatcggcaacgcgcgcgacacgctctccaccaactccgtagctgccacctcgccgtcgacaactccatcggcgctatttcctgtttcgcgtgcgaggacgacctccgcgcgtgattgcatcaacaaacgcccccattcttggtcgttgacgcctccggttcttcccgtgcacctccgccactgccgcctcttcaccgataactccgactctccacccgcgcgtccattgccgcgacgcctctccattgacgcggctgtgcctccttgtctgagcccgttcagcaggtgatatttcactgtgtttcccacctttcctcggtagcagtagaactcgtacgccgggagttcattgttgacgatctgttcttgaaatcgtttgttattctgatgatttattatggagtagtcaagtggatgaaatcggtggtttatcctgatgaatttttgtatagtatgttgacggctgttaagtgccaaaataacgtcgtcaatacctgcataaaaccataaatgtgaaacatccaacatagtggtaggatttatttctaacaattttcacgagtgtttgtgtatatttgtatgcaggtgatcaaccaccaaagttgggagagaatgagaataaagaatggaaatatattttgcgctgatggactcacatggttttgagctacaacatataaaatgtgcaatcatttggagccaaaacatggagtaccataaagtggggcccacatgttagcatcctgaagaaggatgtgggccaggggagccaaccagggttcggccgaacccctggttcaggggttcgaccgaacacccagctggcccagtctagcccatattcggtatgacggttgtactcctcatttcaatgacggttgtggccgtttctaccggtggaaactgtcatagagaggacacttgtcaagaggagatgaagctagaaggaatatgctcaaaggatgcttggagcatctccactctcccaaggtaactctccacctataaatacccctttcctctccctcattcacacacagcaaagcatgagctgaattacaaaaagctctagtgtactttattgtatattagaatagggagatagtaaggtagaaggaatctgaggaatcccggagttgtcggtaatctcctcttacttttgtatcttgttaattactctgctttaataaaaataacattatgagtaattaaggtttgcttagtgagaattacttcttggttagttcctaattagcatacggggtcattgttcactatagtccatttatttatagtgattgttttagtgtttgatcggcactagagtagtttttaattgcgttgatgtagtgtctgggtaattaatctctagtggttgctgcgtatcccacaatacgtttgaggtgggtgtagaggtggtgatagccctcaagagcacttaaatcctccctgtccgggtacgtagtagagcgacatctgagaacagcgggttgccagtgcctgaagtattgcattaggattaaagttaagctttccctatacactgtttctcattaggaaatcctctctgccctctgcccacattaactttgtatccttggatgaacctgacgagaagataatcacacacgttcccttggattagatacccttggaatactccgtaggtgaag

SEQ ID NO: 14981 - DNA, 12788 bp, Oryza sativa
ttgccagatctaacctagactcgctgatctagccttgggtggaggcggtggtagctcgacggtggagatggtacgacgacggccatcctgcgccccctccacggcgggggcggctcaccctgagggagggggggagatgctcaatgttggtggcgatgggaccattgcttcgcatttggggacatgtcctttccaaggcggtttcgcccctctccttgtgcatcatggagattcctcctgacaagttctgattaggtttgcatgaccaaatgaagctccacgttcttcacagggactcactccacaccgacgtggatcgaatctccgagctggcgaggtgaggccgaatgccatctcaccgcactgtgaatgccctaatagcgccacgcgccctacactcttccacctaaaatcatatttattactccctttgtcccaaaataagtgtacctaatataggatatgacatgtcctagtactacaaatctgaaaagacagatatccagattcatattcatagtactagagtactaggatatgtcatattatatacaatgtgtatttatttttggaacggaggaagtaatacatttccttctttacggtttatatataaaccgttagatcacacaacacaatgaatctcaagcactgattgactttaaaatgcattcgtgcagccaaagcatttgcagaaactggtaaagttggaaatgggaatatccagaagagttggaaatgggaatatctggcaaagtagtagaattaatctgagccatttattttttttaaatcgaagggatcagatctatttctactaccaacttataaatggtagtagaattgtgcaagctaaaacctaaacctgggttttcttgttctccatggtgattcaaggcggcggcacgaggctttttgttcctggtcgaggacagatcaacaatcttgtggcctgcaggctacccattagcagctcccgtgttggttttgatgtgaacatgtattcatgcatcttcatccaaacaaatcatataggaatagtaaaaaactgaatagcgctattcaagtgcatgagttgcttgacatatatggcaagtgatcctctcgccgcaaatcaaaggcaagagataaaagataatttctcgttctacgcgagatctaatcatgtgaatttctcgggaaaagaaaaagaatagaaagaacaaatcatacaaagaaaaattaccatcatagcctaataaatcaatggctaagattgtttctactggtagtatggtagtactatactaccaccagtagagagcactggagaatcactctattcagaaaggcctttggaaacaaacgacggatgcaatgaagcagatcttcaaggactgtgtggactcaaaaaatccctaagacttttttccttgtgagattatttgatcatattgtggaaggtggagcaaagaagcttcagaattatccacttgattggagtgaaaaggataaggcgaaatacctccttaagatcatggcaatggacatgtcgcatgtacagaagcttcaaggcataatgcaacaagcttcaagagagagtagtaaggagtagtatttgtcgaaacaagatttcggcaataataaaagggggtggctatcaagctaggaaagtggatgggtttagagacaaggaattttatacaggttcaggccttcttattcaagaagtaataccttactcctgtccggggatgattccgccgagtgtgttattgattgtatgactgggagaaaaagaatcgtcccgagaggaacccggacccatccttatataggggaagggatccgtattacaaagtacagtccatatcctaacagaacatgggattacagataaaatacaatcgtaaccgactaggatcccgggtattttcttgacatacaagtttagaatctaacccgagtcctcataaagatattctatctatatttggtaccatatatccagctggaatataaccgccatgtagatatggggtaaccataatctccacagtagcccccgagaccttcgcagttgaccaaaatagtcttctcgaaacaaaaaacaataatccgagtgcttcaattcaacttgctccggcttgccgagtgctaaaagactgtgaagggcgaaaataaaacatggtgcatcgagtagatgcacctaattaggtgtagcccccgactatgtgattagttgaaaaactaaacatatagtcaagaaccgagcgattttatatcgaagcatgcatggtactcaataaaatacccagccgactgcttctcacttgaatatatcaaggacaaaaaatatgaaaagggccgaatgataaacattcaaaaggtccaaaaatagatatatttggtaggaatccgagtaagaaactcttaaaatgatccaccaaatatgataaagatcatggtaattaagaagttcattagcctaggctataacccttactataatcaaaataagcatataacatgctaggagaatgactactaataaaccagtcatctcaaactaacccaacagctttcgtagcctaaaaaagcttacaaaaatggtataacacctttctgtcgggcaccttttcatgtgcatcataataattccaaagaattattaaatcgcgttaaaaaggattttaatagcatcgggccgcatcattgtgagcacatattgccaaagcaaaaagcgcctaagtccctagggatcacaatgagccacgctgaaaacataattgggctgaagtactatacaggcccaggcccattagtactcccgataccctaaaaacgccgaagtccaaacgtcgtttcgtcttccccgccgagactctcgtcattccccactccgtgctacagtacagaaccgcgccgacgaagctagggttcatcaatctgctccaacccaccctcaaaaacttcacgaaatttctccccgcgtccaccgctccgattccccattcctctctagccatatcccggaccaaattaaaccatccagctcacactcatggcggaagaaagagaaagcttcgagagtcagtgggcgccctccgatgtgacagaagacaatctgaaggagatggtggcgcacggcgttctcccagcgaaggagatcattgggtggcgaccggcgttcggcgaagcattcccgacccccgacacacacgaaatcgtggtatttgctcatttcttctatggcggattttctcttccaacctcaagattcttccgggggattctgaacttctacgggattagcttgcatcatttgaatccaaactccatagtgcatattgccaattttatccacgcctgcgaagcttttctgggcattaggcctcatttcgccttgttccgccgcatcttcttcctcaagccccagccaaacaaaagcaaaccgtgcgttgttgggggagctggtttccaactcagaggaaccttgagccaaaaatatttctccatgcccttcaaaacctcaaacaaaggctggcatgcaaactggttctatgttcagaatcctgagcccgcactccccgagtactgccgtcttcctccggtttactaggacacatagaactcattgcccatgggagatgaagctgctcaggcaatggaattgatggaacgcatgctaaaactgaaggaacaaggtttgcagggagaacagatcgctcggcacttcatcaaaagccgattagctccaatcaaagagaggtcccgcacagcttttgagtttgacggcaagcatgatccaaatcgggaagatccagattctcttgactttaaggtcatgaaagaaagaatgtacaagatcttctcaaacgctattgttgtcagctattcacatctgctgcctgttgtgccattcaatgcattcaaccctcctccaccgatacgtattcatatacttcaacctttctcaaaatatgatcttgttttcttgttgaatcagttaacaatgaaggatattacacctaggaatttgctttgatgaagtcggatcccccaatcgctcaactccgatctccccgtcaccaaactgggcaagggagcggaggaccaagaattcggtctaaaactcaaccaagtgcttctgatccagtcggccagttagattctcgaaagaggaagctggttctaagcgacgacgaagccgatgataccatcaggaggcctgaagaccgagagacaaccaagaaactaccaaaacaggctactccaaggaagaaaacatccagtcgccctgcgccaaagatcaggaagtcttctaggtgcaactcatataacgacctctcttatattgatgcgcatccatcgcggcaataatactgataatcaaatttgcaggaaaccatctgatatagacccgtctggaaaagactctgacccgaccaacatggacacaaattcttccaaagaaaccgggccaactgcagagaatcgtccgagtgacaaacaaccggcaaccgacaatgtagaacctagcaacgagcccccgactgggaaccagtcggccgaagctgaagtaggtgctaaccaggagcccccgactggaaaccagtcggatgcagggccaagccaaaagattcccgaggttgaagctcaaacgaacagttctctcgggaaggatgctgacattgaatcagaaaccagatctcttgtgaagacaccaaagtccactcgtccccgaccaggaatcatcacaggtagacacgctatctgaaatcattttgatccaacagactttatttggctgcttcatcttcactcatgaatacactagggccaatgattggtgatgaggaggaaattctccggatagaagcagctgaggattcgcgccctcccattctagtcaagtggtgggatgacaacatgcatcctcaaggaaatgtaataaataagcaaaaagaggacgaggaggtatgcttgctgaaaaaggcgctcagccaagccacccgcattgtaaatgtaagctctttggtgcttgatctcaaccatctcgtttgccatttaatctaggcgctaattaaactgtcttgtagaggattcatcttaggaacgaagctaaaacggcaaccttagagaggctagtccctcatctcgggaccctcgaagccactaggagtcagctgcacgagacaaaagagcttgccaggaaaaatgagcatgatctgagggaccgaattgctgagctccaggaatccaattttaaactgagtggctcatcaaaaggtttgcgcaaactctacccaactgatatgtgctgttatctctgtaatcctgattaaccgaagttaatgtagtgcaagctgccaaaatatctcaattggagaagcagatccaaactctggaaaatgacaaggctgagctagaaagacagagggattcggctttaaaagaggttgaaggtaccaataatcaacacttcaaaagccattatcttctatatgctgattcattaatgtgaatctgttgatgcagaccgcaagatcaagtctcaagcacagtttgatgtcttagttgacaagatcaaaaaacttgagggagcccgggatgaggttgctaatgctgctgccctaattgttcaagcgatgttcttcaataacaacggcccgagtgcacttgatgcttctgaaattttcgacaagctgagagttgctccggatacatatttcaagaacatcaaagaagctggaagtatgggagcaagtctggcgttggcgatgaccaaatccctttatccaagagttgatattgatgccattgatggctttgcagacgggacgagcgaagaagctgctcttgacctcatcagtgatgcgcagaaagcggctgacaaaattgctgctgatgtagttgagagattccaagatgtcgaccttcggccgactgggtctgataagtctgatgatgaaaaaactgatactgattaatgtaccaatgattttgacgattaatgatgatggaggcacaatttgtacaatactgatgaatttatgttgtgcttaatatcttaacttagttcctgatttcttaaaagtttttgtcaaaccttgttgagcctaaaacccgcaaaagttgttaaaaaactttcagtcctcattgactaagccaagaaattaaacagggcaatgatacatcaagtaagcaaattgaattgataaaaatcacactccattattattatagtagccccctgactgaaaacttcaagaaaaaacttgaagttagcagtcaaagaggaaagatacaaacgaaatgcctaagcgtaaaatcgacgaaggtgttcaatattccaagaattgttgatgagagtaccgtcttcgcgcttgagtcgataagaacccggccgagtgacttcagcaattatgaacggtccttcccataagggagataatttatgccgatcctgtgttgtttgaatttttcgcagaaccaggtcaccgactaaaaaggctcgcgatcgaacattccaattatgataacggcgcaacccttgcaaatatcaagtcgactgaattaaagctgcttctcgggcttcttctagtcggttgatgtcgtctactcggccctcttcatagccctcctcattgaagttccgaaatcgtagtgattcaaattccacttcactcggcaacattgcttctgcaccataaaccaaaaagaacggcgactggccggtagcccgactaggagtagtgcgtaaagaccaaagtacggatggcagctgatctacccacttgccaacataggggcgtagtcggtcaaaaactcgtgctttgatcccttgcggtattatgccgttagcgcgctcgacttgtccgttactcatagggtgtgccacggaggcgtaacaaattttaatgccgaagtcttcacaaaagtctttaaatgctccgccagtgaatactcggctttaattccacgtgaggaatctgcatatcgtccagggtcttagcgaaaaggatgttgagcgcgctgccaccatcgatgagagtccgtcgaagcttgacattgcgaaccactgggtctagtaccagggggtaccgccccgggtggaccactcggtcgggatgatccgagcggtcgaacttaattgctatctctgaccaccgaagatattggggcgtgttaggctgaaccgcattgatctcccgttctgtcagcttctgctttctcttagactcataagccatgggtccgccgaagatgtgattaagttctttgcgatgatcttgaaaaccagtcggggcatcgtcttcatcatctttcttctttgttgtgccttgatctccgtctgaaggtttacgtgcgttcttgacgtattgctccgcgaactgtttgtagacgaagcaatctttggccacgtggttggagttcggatgatgcggacattaggagttcattatcttgtcgaaggtgttgacgcggggacgttgtcgggaagatggagaggtggtcgccacaagttcttcgggcttacgcttgcgatccttgtggttgttacttccactccctcctgcagtcggcgtgtccttctttgtttccaagtggtgcccgactgtttggacgcggtgatagcatcttcggctttggcatactcgttggctttttcgaacatctgcttaaccgtcctgggaggtttacgtccgaacttgctgactaggtcctcgtggcgaatgcctttagtgaaggcggcgatgatgacgtcgtcagtgatgtcggagatcttgttgcgttgttcggagaagcgtcggatgtaatctcgaagggattctccagacttctgaacgacgttgtagagatcaaactgtgtgccggggcgttcgaaggtgccctggaagttggcgatgaagtgatcacgaagttccgcccatgatccgatcttgccacggggtagtccgtggagccaggatcaggcggagtccgctagggccacaggtagatagtttgccatggccttgctgtctcctcctgctgcgcggattgcgagtctgtagacggtgagccaagactccggattagtggtgccgtcgtacttctcgattctagtcggcttaaagccggctggccaatccactcgacgcaggtcattagtgaaggcagctactccatccacctcgtcgtcgtagcgatttggtgaatgacgatgacctcgtgctgcacggcgctggttgattgtgtcgcgaaggtcaacgggacgctggtggggtggagagcgaggccatttgactcggcgctccctgtaacgttcgggaggcgagtgaacagatcattcgtcgtgacccctgctcctgcgactagatcctgtgccgatgatgctgaggcttggctgatgataatcatgagatcggaggtgagggactcggctaccagtcggggtgcgggtgcttgcggagttggttggaaccgaggcagcgatcatggttttcgtctggttcaagatgttgacaacatgatcagcttggttgagcgcgtcttccttgaggagggtgtcgaggagagtgattgctgcaactgcgttctgctggggggtgcgaaagaccgctgttccatcgacgtcttgttgcccaatgagctctctcgctcggcgcccagattccaaggcgcgttgccgtcgatcttcagcctcctttgcaatccgttcgcgatcttgttgctcacgctgtagtcgttctcgctcctgtcgctgtcgctcttcctctagtcggcgacgttcagcttcttgccatgcgcgatcttggtccgcttctcgggcttggcgctgttcctccgtttcgttgtcagccatgaatacgccgaagaagaggggcgtgtagttgtcctcatagctgtcgtcgaagttgtcgaggtcgccgtggtcgtagtggtagccgaaatcgtcgtagtcgaggatctcggtcggtcgagaactgacgccgggagagctaaggtaactatccaactcttccgtcgagactgtcccaagaggttggagtataacgccaacctctctggatatagattggatcggggccgaagccggagctcgcctagatcttcgagtgggagatgtcttggcagtgaagacagtggccaaatcatcaggaagtttcatcaggattgagggataggacccgtcgtcttgatctggtcgcggaagagtagattggatctcgtccgagtggtttgaagtcgactcgggagagatgatcttggagtaggcctcggccgagttcggaataccgaacggcacagggacctggtctctccccgactgatttgaatccgagtcaaggagagagatcttgccgaagtcattggtgatgaagttgaggctgccgaaccggaacgcctgcccgggagggaagacgaagtcgtcgatgctagaaacgggacccatcgcacttagttggcaaaaacttgacgctacccctacctggcgcgccaactgtcgaaacaagatttcggcaataataaaagggggtggctatcaagctaggaaagtggatgggtttagagataaggaattttatacaggttcaggcctccttattcaagaagtaataccctactcctgtctggggatgattccaccgagtgtgttattgattgtatgactgggagaaaaagaatcgtcccgagaggaacccggacccatccttatataggagaagggatccatattacaaagtacagtccatatcctaacggaacatgggattacagataaaatacaatcgtaaccgactaggatcccgggtattttcttgacatacaagtttagaatctaacccgagtcctcataaagatattctatctatatttggtaccatatatccagctagaatataaccgccatgtagatatggggtaaccataatttccacagtattacatcaagtaaatttagtatggtttaaaaaaataaatcagcaattagaatgtagtaagaactgaaatatatttttggatgttaccctctaatctatatactactattagaagacagtagtggtgggccaccaccaccatcacggacatgtttttttttaaaaggaaccatcgtggacatgtgggccacaatattaggatttgggggagtcgtctgtaccatgtagactgtaactctttaattttctaagcatgacaattttgttttttcagagatgaaaggttgcgcttcaaccaattaaaagtattgttttcaaggacttaattttcccattctcaattattcgttgcaacacataggcatcttaataaaagatgaaatccagcagcactagaagcaacaagcagtcgaaggaaaacatagaactaacagataaacacacttagaaaagaaggaaaacaatggagagagaggtggcttgggcacgcacagcagcgcagcagaggagagggcagtgggcggaagaatgaaacgcgtagagccaggttgacaattggaggagccggagggagagccgagcgcagtggagacagcggcacgggcggtggctcggaggagcagcgacgcagggtgaggccatcggctgccgtcgttgtttgagaggaggaggtgggtgtcggccgggtgaaggaagcgcgtgcgtagggttagcggggtggacgactgggtgggtgagcgggcccctccccaccatcgggcctgctccccttcgccaggcctgctctctgctgccggtccagcttgccgttgtctagatggcctatcatagatgcctcctgctccccccctccaaaaaaaaaaagaaaactagttgggccaccaatgtcgccttctcctggctaggtcatcgccgccaccaccgtagcttggcctagggttcggggatagggaaaggtagagaagggcacgagacgagtagaggaagagcagtgacgtagcgactggtgtgggagggagggcattaggtggcggcaaagtggacattagccacggacggcggtagcggagccgatgcgaggcgtgcatggccaggattctttagttgtcatgatttattcggtttccaggctcctgatagaaaagattgtaattgataatgttttgcgataggaaacgtataggaggttttgtgctcatatggtttgagaaaatgattcgaatttctatctagagtacaaatagatagaaattcgactattacttgcattaatttatgtacgagaaaaacaaatttcatttatattcatgatacaagctgactaattttaattgacaaacttagtacaagacaacaaatcttttgaaattttttgagttgtctctaaactcttttattttgcctcatctcaaacgaattcacttttgtccctcattttggtccaattctatcaattgaaaatcgatgtttttctgttggatgtaaaagatgaaaaaggtggcatgtgtgatgtgggaaatatttaatttgttactagttagtcaaggaccttggccactatggtgatgaaaaaatagcaattagatcatagcagtattctctcttagtctctttttaaacggagcggcacaaaatacaaactaaggttgtactaatttcattgaatataaaacgtcaccatctgtactataatgtagtaatttgagcaaatacgttaaatacggatcattcgatcattagacccaacggtccagatacatcccacgatcctccggatgaaatcattcgtgcaactcccccaaacccattcccgtcatttgctcaaccacgatgcacactctcccccttcgccgtgcccggcctccgcctactaccgcgcctcctatgccgcgcccaatggccgatctcctgatcccctttgccgctttgcacccactgtcagccatccactccatctcgccgtcgtttggatcccctcccacactctcacgactgatagccctgcaagggacccatgagggagaaggggtgtggcaatgacatctcccatcaccgccattttcgtgctcgatcgacaggtgcagctccctcgccagcatgatgcaacggcataggtgaaaactacaggcaatgcccatgcccatgtcatggacatctttttacatcctttcacatgtcgagctcactctcaccatccatttctcgataattctgttgttttaaccatagatttggtttttttttttttgaacgaaagacacagcgtgtctattcgttgaatatagaaggagtgttatttacaggtaaaaaaaaacaaggagatatttacagacaaagcggcattctatggcaatatcttagctaggcgtttggctcccaccagtgcccaagatctggactccttaatttttgcaataagatcaggggatagctccttgttcctaaagattctctggttccgctcttttcatatttcccaagagattaggaagactagggatcgaataccttttctggggacaccctagtgtgttgctagcttttccaaccagtcgtggactgatgtcgcttgtacccagttagtcggcctcatgtggttgcaggctatccaggtagtgatcgcttcttaaactctccttgtgaatatgcactccaccattaggtgaagggcagtttcccctgtgcaatggcataatggatagtaactgttgttttgccatcctcaagtttcgagtctgtctgatgtccataccctgttttgaatgattagtcacgcgaaggttttgcatttccttgaggcctagtctttctagattaaggtatcgaagtttgttttgagtgatccgaaggattgcgctttgtaagctaaggaggcgg

SEQ ID NO: 14982 - DNA, 21356 bp, Oryza sativa
aacatcgctcttgttaaggtaaaccaattttttttgtggaatttccagaatttttacttttcaacacacagctctatgccttatttgtatgcactccattgtagaatcagaatgatttaatcactgctgacttttattcatttctcttaagagcatcatagggaactggattcactgtcatgtaccttgtttttgtgcaccgtataactattttagacaagcttccatttgcttaagaggtgggactggtcctttctcaataagcgagagtctgatatgaattctgatgaattattgattgggcaaggttagcctgaattcattctcattgaaactaatttgaggattaagaatcctatgaattaagaaatacttgaagcagacaacagtagtgtaaagattgcatcagtggaatcagaaaaaataatatgatcaaccaatctaaagttgaatttttagaagactttgaatttgcacgatagctttccagctagaatgtaaaatggaattgctggggaattcagaatatttgattgcagataaaatgtcttcatacataacttttttttaaaaaaaagaaaacgagtaactaattgctgctgtgctgtttcagaattggacaattcatggtttgtactggggaagctacttcactcatcggccacctgtactcattgactccctcaatgaactcttttcatggctttcaaaggggttgataaaaatccagatttcccacacttacaggctccctgaggtaagcgacaacattttaacaaaccttattataattacagttcttgtaacactaaccacatgtcacatgaaacgtcgcatggcccaatcaatcttgaagacgacacataagtcttgaatgcaaaaaacttacataaatttcattagagacagctctgcacaatatttatatataactcccatgttctgaatggatctttcatttgtaatgtgagcttttcatcagctaggatagcttaaagttgcttggcactttttgcatcatttggctgccatattggtttttgagattacgatccaatcttgttgatacttataaagtcaaagtagttccagtatactaaaatgtacttatgaagcaactaggcgtgactgcctgagcatgtcaacacggacacacgtggtaatatatgccagtggtgcatcttatctaagaaaatggtactgattttagtcaatttctggctttgtatgctgatcaactgcccagattatactgtactgtcagccagtcagaataaggaccaactacgtgggttttttaccatttgtaactactgttcatatcttcaagcttgtaaatggattactgtgtatattgaaaattctcttatctttgtgttttgttgccttatcatttataagtgaactatgtgatgttaacttctctacaggcacatctcgctttcgcagccctgagagacaggaaggccgttggtaaagtgatgattgtgatgggctcaccagcaaaatcaagactctaacgcccttcagggttcatcagggttctattcaaaaccatacatctatgcacatgtcatatgtatagaccatgacggtattatttaaagcagcggtagtccctttcaataatgtggtttacaagtactgctagcttgcaaactaccagagacatgaattattttatgtatgtagattagtggagaataaatttgaaaaataaaatagagttatctgtaggttgggccgtcccctgtaatgtctggcttctgcaatgtaaccgacactgtgtaccaatgctgcaggatgtatgagaagagaaaatgtgagaaatatgtgaagttattaattgtagtataaatttcagaaagcatcaggtttggagtcacccgagaagatctcatgcatgtaagcaaaaaatcacccttcgttgacagtccaagcatgattgtgttcttattttccacgtgcatgtacaaactattaaatgtatgtttgttttaaacaaaatccttaaaaagattgttcccttaaagaaaatcatattaatctatttatatgttttaactaattttaaattaatcatccacgaaatttgcttcccctcgcgggccaagccctcggcaagggctgggctgggcccatctattccctcctccttgggccgttgggcgcctccaatgcaaatcccctcattttcgctacgccgtgacggggcggccggtggccggcggcggcggtcgaggctgaactgaactgaaaaggtcggagggtttcaccggtgcaccggcggcggatagctccacggttcgtcgccggcgatgatccgcatttcctcctcgccggctactgcctctgcgtcctcctcctacggtcctacctcgcctccaagctcctgccgaaatgccgctccctcgccgccatcaagcaactccacgcccacctcctccactacgcccaccgtgcctccttcccttacaaccacttcctctccaagctcctctccctcttcacctcctcctctgccgccgctacaaccgactccaccgccgctgcctccgactacgctctcctgctcctcgcatcccaccccgcctccaccgccttctcctacaacgtcgccatccgcttcttcgcttcctcccgtccccacacctcgctccgcctcttcctcgaaatgctccgctccgacctccgcccagactcctacacgcttcctttcctcctcctcgccgccgcccgatgccccgcgccatctctcgcccgtcgcgcacgcgctgcttgagaagatcgacttgaatagccacgaccacactgtccattctcttatcaccatatactcctaccttgatgatcctggagccgcacgaaaggtgttcaacggaattcccagccgggacgtggtctcttggaacgctatgatgaaggcatatgggcgggtggggatgaacggtgaggtaggcaggatgttacgggacatggtgaaggacggtgcagttgtgcccaatgccgtgacgttggctgtcgtgctagctgcatgcagggatgagggagatttggtgcttggaaggtgggtggaagagtggtcaaagtccgcagggatggaaacggactctcttgttggctcggcacttgtgggtatgtatgagaagtgtggagagattgcagaggcgcggcgtgtgtttgacagcatcattgacaaggacgtagtcgcttggaatgccatgattactgggtaagaatataaaactctttgattattacctgaaataagctaattagtttatcccttttggcttgtttatttatatattgcatttaagattatgcagatatgcgcaaaatggcatgtcaaatgaagccatttccttgttccacaacatgaagaaagcaggcgtatgtccagataagataacattggctggagtcctctcggcctgctctgctgttggagctctggagctaggttctgaactggacggttacgcctcatgcagaggtctctacaataatgtttacgtcgggacagccttagtggacatgtacgctaagtgtggagatcttgacaaagccatagaagtgtttaggaagatgagatgcaagaatgtagcctcttggaatgcccttatctgtggccttgcctttaacgggcaaggtgatgaagccattcagcattttgaactgatgaggaacgaggatgggctcaagccagatgatatcactttcataggtgtcctttctgcttgtgtacatgctgggttagtgaaagatggcaagcgctggttcaattccttgacatctgagtttcagattattcctaagattgagcactactcatgtatggttgatccattggcgcggagtggacatttggaggaagtgtgggacttcatcgagaagatccctgacaaggtagatgcagtgatgttgggggctttgcttgcagcttgtcgaaaatgcaagaatgttgaaattggtgagagggtcatcaacaggatcattcagctggaacccacaaactcgtggaactatgtggtgtcgtccaagatatacgccagctcaggtagattggatgactcagcaaagatgagagggctaatgagggaaagaggtgtcaacaaaactccaggttgcagctgggttgagattagtgggaaagtccttgaattctatgcaggggacgaaccacagcatggtgcagatgatatgtatcaggtcctagacctactggttgatgagatgaggttggaaggatatgttccaaatcttgatgtggtgtagcaaataagtttcagttgttgccgtcttgctgaaagttgcttctgcattggtgtttacgtctctgaggctgtgactttgtggatatgtgatacaagttacttcatgataccaccttcctaactgaaatgttgctttgctacagaattgggatgggcaaacacaatttagaacggcatcacactagagaaaattcttggcacaattattcaggaaagtgactcaaggttgccacctggatatatcaacttgatcaggtaattattttgcagttccttatttacttattcaggaatatgtcatgtgccattcagttcttactaacagaaatattccagaaaagtagaaaactaatttgttgcaccctcaaactcttcaccactcggcaccctcaaactcactgtggaagatattttgctttgtctgttatatcaatgttcagttaacatgcaaatcctagctaaattagcacccatgtgcgcaagtatcttgttttctcttcttatgttatatgcatcagtcaaattcttcttaataagcatttgcctcatgaagcatcttgaattaacattttcactttgtataaagcatgtatgggtatgctgcttccagatctcatataggccccaatgcaatcgcgaccaactgttccattgaatcttgcttagaggttacacaggagatccagaatttgcgatgacggctacctacaccctacgtgttgacgaagcaggcaagattgttgctgttgaagatcacagaattgtatttgggataagcaatccatcaatgtaccctgcaagcattggcttcccaaaaccagagaactctcacgaaggcggtaatctgaaataggggcactgatcatcctgcactacagatgcaacaatttttgctatgctgcttttcaagtggcaagcagcaatgttatctttgttattgaggcatttgcttctccttctctgtgcatgcagtagcatcctctgtttaacacgattgtttctcctctattctgtttattaacatgtaaaaatgctgttcctgctcctcacttttgcatcagctgttttatacaaacatgtgaaaactcagaattctgcgtacaattgaaataactaggaacacttgcctaatgcaattctagtcaaatcgtcatataacagaccagatcattaatcagagcatgaccaatgtgacaagaatcgtccctggaaatttctattttataagaatctacagaagtagataaatcattgacaaatcctaccctgctgtagctcgtcaacactctgctggcctatgtttcaggaagaagctgagcttctgtagcataaacataagcccaagcgtacaattgaaataaggttgaaacaattgtttaagacaaatcatatcacattcatatatcatcagaataatgtacagtatacatatgatggggctactgccagcacaagttggctgcaaataaatcaatggcttcaagtaaattacattaaacagatttctaaggttcaaagcaggcttgacaagcaaccaaagaatcgaacagacagcagaaacagacgagatcatggtcctattcctactctgctctagctcatcaaaactctgctttcaggaagaagccaagcctctgtagcaggccgcctccacggcgacgcaggctgtccctagatttcaccgggctgacaatgtactgcgcctcgccggagatccccagctgcttcatgtctctgggatcgatgatgtcgaagaccggctgcgccgtcctcttcatctcctgcagctgctcacgcgccgcctttctctcgagctcacgcgctgcctctctctcgagctcacgctggagtttctgcctctcctgggcccttgcaatcagctcctgcatctcagtgcgaggagatgctgccctctcagtgatcagctcctgcatctcagtgtgaggagatgctgccctctcagtgatcagctcctgcatctcagtgtgaggagatgctgccctctcaatgatcagcttctgctcctccattggcttcacttcagcttcggtgggatgatcagcggtggtgtctggcctgctgctcgcactgtcgtttctttccgacgaggaggatgaaccgctgcaagatgaactgctggaagagtcgctgctgctcgagcgaggagtttcagggaacttgctgaccgatacaggggagtcgatgccgccacagatgtcgatcaactcgtcatcctcctgttgctgcttcgggagcggcgagaactgagccttgtccacgaccaggggagagacgccgccgcagatgtctatgcccatgtccgtgatgcagagctgagatgcaggagatgctgctgccctctcagtggtcagcttcttgtcttgctccatgacctcgtgctccaccattggcttcacctcagcttcggtgggatgatctgtggtggtgtctggcctgttgctcgcactgtcggcgtcggcgtcggtgtcacttcccgacgacgaggaggatgaaccggcgcaggatgatgatccagaagaggcgccactgctggaagatgaggaggagccagagccattgctagagctggaggatgatgaggagtcgctcctgctgctgctcgaacgaggagaatcagggaagttgttgactgatacaggggagacgccaccatagatgtcgatcaactcgtcatcctcttgttgcttcggaagtggcaagagctgagcactgtccacgatgaggggagagacgccgccgcagatgtccatgcccatggccgcaccctcatcggctatctcaccgtcctcgaggaggtcgcagatcgacgagctgctggtggcgtcggatgcctcgatcttgggcggttcttgctcctcaataatcttggtggtctgctgttgagcgaattccacgagcaggttcagcaactggaacaaggcagcatccttcgcggagctaagatcgacatccatctcttcgccgttagggtccacgacgcagcagcattggcttcgcatcaggccgacgatgtgcggcggcaatggcgtgtccgccgacagcgaggcgaggaggccgtagaggcggtccctctgcgccttgggcatggtcggctcgatcacctcaacctccacctccacgatcgggctcgcggccgtcgtcttcctcctcttctcggggggagagacatccccgtcgatcgcggtggcggcctccggtggggtctcctggcggcgcaagaaacgaccgctcttcttgccgcggctagggtgatcggggtgctgctcccccgccgccgcggcgccgccatgggcgcccttggcgcgggccgccattaccaaggcctccgccttgtcgaggagggcggcgaccacctggtgctccgagtggatctgctccgtcaggcggcgcccacggggcgccatgtcgcacagcgcgtaggccgcgtgaggtccgcggcgcgggggaggagatgaagatgggaggcgcttcgcgaatccgcgggagatggagatgggagggggaggcccgcgcaggcgcagatggatcgaggtgaggagtgagtgcgatggaggatgggagagaagtgggggaaggacgagacgaggagcgcggcggctatttatggtcggctatacgtgacagactcggagtccgagtcggagtcccctgcgctcggttcttgtgcatttgatatgcgcttgaattgagtcagggtcgttgaagccaaaaggtgccatcctacttcggatacatacacaacacgcctttctttttttttcttttttttttagaacataaacaacacgcctggatgctttcgtcttcgaaaaggctgatgtggagtgttcacgcgcgtatggacatcagcgacaattcaatcctgggttgggtctggggtgggagggagaagagaggaggtcaagctaggcttagagggatggatgtaggaagtggtggatataggtggacgatgccaaagctatggagattgagaaaagcgagatggaccggtattggtggctagggcgaaccaaagcttgcggtgaggaggtggtgtctaagtggtgggaagccaccggcgggacaaaggcacctcgtcgtaacctgtttgagaaagacaaagaaagcaggggaagaggatgaggaggtcaatcgaagggcctcgctcatgcctactagctagccggtgagaccgggtagtggcgaaggtataagagtaaaggaatcgagcagcggtgaatggcgatgcatgagtcgaggcaatggtggagtgaggagggatgagagaagttaggcttatgtggtatcacacaaatcttaaagcaatctaatagtatgaaatttgcaagatttccttggatgttttctgtcaaattagaaatagagagagtgcctttatttcctgttcatattgcacacaggtatctatacttttttaaaaagacttcaatgataatggcaataaatctgtgaccccacctactccaattatagattttacacattagcccttaaacttcttaatatatgctcagtctggtttttaataaatgatgtcgttgacttttgaacaaatgtttgaccattcgttttattcacaaaattatgtaattgtataagatataaatcatacttaaaagtactttgagtgataaaacaactcaaaacaaaataaactataattacatatttacatattgtaggtagtacataaacaactagatctaaatagatagatagcctcataaaattaaatcaacgtgagtattcctcgtagcaaaaaggtggataacatattgatgaaaaatatacttttatttattttaggcaatattatgattttttttttcatagcaaagctcagacatttagctactagtactgtaagaaaaataataaaacccatttcaaatcaaagttgaaaaaacttgccccctcataattctttcaaagaaaaactctgctagctgcactatatttatgccttgtaaggagttcctattacaaaataaataagaaataatgtctaccacaaacaaaatacaacaaatgttggatgagaaaacatatcgcagtgtctgttcaaagaaaaaaatattctatgccatcgagtttgctcatttctactgagtaagcccatttctactcaataccatcgagtttgcaaaaaatatttactctatgcatctatatcaataagttatggtgttgtttgtccacattaatattaatgttagatggatctcaacggctcaagggggccttgacccgcgccctgatcgggggtgcctaacccaatggctggtgggcccccgtcacactgcgccatataaaagggggtggaggacggggcggcacacagtacgaggttcgtcgccgccgccactccaccccacaaaaccctaaccgatcgagagggggcacaaccagtgacgggaaacgccaccgccgcgccacgcctcatcgccgggacgtctacgaccaccattgccgcaaccgtcatcgccgtcaacctcaccggcgccgcatccacgacaaccgcgcgaccacgacgacgatggccggcgcttcttcatcctccaacacctcaaccggtcggtctatctaaaccctctcccgttttcaatctctattgttcaaacatcaatcccaaatagaaccacccgactagatctaacctgggtgatcctagtgcaaagtctaacaatggtatcagagcaaccctagtgattagatcggttcggggaaagaaatccaaagaaagaaaagcacaagatccacacggatcaaaagatcgaaaccctaaccctaccttgtcgccggccgtcgccggcaaaagggggggagggcaaagggcaccgccgaggagccactcgacggccatgcacgcacccgtcggtgcacgcgccggcgagggggcccgcggcggcgccgccatctccgtctttcggccgccgctctctctcacacggtgggggttagagacggtggggggagcgtagaagaagagaaaagaaaagaggcgccggccatggcgcggcggtggcgagggccgccggcgtcggtgacgccgctcggcgcggccgcgcgctcgcaagagagagaaagaagagaagctagggttcggcgcggcggctgggggggtcgggggttttgtttgcccgatctccccgcccggccgtccgatcgaaccctagtggatcggacggccggtgacggtcgggccaaaaacggcccaagaaggagagcgcgcgcggcgactttcccggcccaggcccaggttgcggcctggggggaggagggagcgcccgcacgcgccaaaaagccgtgggccgctggcaaaagttcaaattaggtccctcggggggccgaaaatgatgaaaagagggacagtagcaaattttccttttattttgtataattttcatgcaaatttcaatagaattttgaattgattttgcatgttttacctctgtttaaattcgaaccaacgggagaacttttacagagagtaaattacagagttttgttgttgttcatatgatttttatatagtttttccgctgcaaatagataaatttgatgaaaattagtgtttctaaaattaaatttcgaaccaacgggagaatttaattttaggaacattaattatgtgctatgatgttgtaattttctgaccaacgttgataattgcaatgttatagttatggttatatgtgttatgtctaattctgcccaatggtgatataggcttaatgcataatattttaatgttaattttgttctcaccgtacatgattatttcaggtggctactccttgatgggttgcattaaaaatattccaaccctaaaaggagataactacacagaatggaaaagaaaactcgaccttgctttcatcttgggagaggtggactgggtgttgactaccccatgtcttatagaacctgctgcacttgtcagaggtgaaaatgagtcagatgctaaccggcaaaagagacaaagggacaatgctcctctcgtcatgtcgtatgacattgaacaaaagaaatggtccttagccaacaagaaatgtttggctgtgggaaagaacacgattgagccaaccatattaggctcaatcccagagtgtgacgctgtctcaaagtaccttgaaagaataaagagtcagtttactggctcttcaaagactaatgctacacagctgatcaagcagcttgtgacagaaaggtaccatggaggtggtgttagagaccacatacttaggccctctttatttaggcttataagccaacttataagtccaaaattctaagcgaaaacaaacaagcagcttttttatttggcttttttgaagccataagccactctaacactattaagccaaaagctaggttggagaagcttttttggcttatatgagatagatgtatgactccaccactaaacttaggacattaaatccactggcttataaatcatataagccaataagctgacttaaaagtctaggctaataagcctaagcctaaacaaagagggccttaggatgaacaacatggcttccaagttgaagccaatggatttgggcataacagatgaccttctggtccatctggttatggcctcattgccaaagcagtttgacaattttattgtcaactacaacataagtccagataaatggaagtttgaaaagctcatcgctaattgtgtgtaagaggaagagagaatcaaagagtcaaatggtggttcaattaactatgttaaagataacaagaaaaagaaccacaagtctcccacctcaaaagctaaatagtctcagcatctgcctcagcaacaacagttcgctattgagaaagatcagtgtctccactgcaagaagacaggacattacaagaaagactgtcctgacttcttgaaaatgatcatggcaaggaaagatgagaacattattacatttgtaaatgaatctcattatgttggttactctagatccacatggtggattgattctggagcaactattcatgcttgtaattgtttaaaggcattccgttcaacgaggactacgcaaagaagagaaagctccattagagttgccaatggagttgaagaaaaagttgaagctgttggagatcttcctctagagctcgcgaatggcttcacacttttacttcgagatgtcttttatgttccttctttgcaaagaaacttaataagtgtatcaaagttggattttgatggatatgattgccgctttggaaatggcaaatgtgaactatggtataataatgcatgtattggtcttgctgtgttgcgagacgagctttatttgttatctctttctgacaatgtgaatgttgtgtcctcgttgacaaaagaaaacaagaaaagaaagagaactcccgatgtctcatcgaaattatggcactgtcgtttgggccatatttcgaggggggagaattgagagactcgttaagaacgaaattcttcctccattggagttctcagacatagaacaatgcatagaatgcattaaaggaaaatttgtaaagatcatcaaaaaggatgcaaaacgaagcgcaggaattttagagaccattcatacatatatttgtggtccatttcctgtgaaaagtgtggatggctatgactcgttcataacattcacagatgattactcccgctatggttatatttatccaattaaagagcgatcagaagcattggataaatttaagatattcaaagctgaagttgaaaatcagcatgatataaagattaaagtagtaagatctgaccgtggggggagtactatggtcgacatacgccttatgggcaagtccatggaccttttgcaaggttcttgttagagaatggaatagtagcccagtattcaacacagggcgaacctcaacagaatggggtagctgaaaggcgcaattgtacccttatggatatggtgcgcagcatgatgagctactctacactaccactgggtttatggatggaggcgttaaaaaccgccattcatattctcaacagagttccaagcaaatcggtgcccaaaacaccatatgagctatggataggaagagtaccctcgctagctcacctccgtgtgtgggggagtcctgcagaggctaaagtatttaacccaaatattgggaagttggaccccaaaacagtcagctgccattttattggctatcctgaaagatcaaaaggctatcgtttctactgtccaaacagttaatacaaagtttgtagaaacgagacatgccgtcttcttggaagacaaaatgattagggggagctcggtagttcgagaaattgatcttgaggagaggcgggtgtctgtacccgctccgtcgactcaggaacctttcttctctttacctgctgatgttgtgcctgcaatgcctgtcattgaggtaccagcacctgttgttacctctcctgtggcaacaatgaatgaaaatgaggaacctgttatacaggattcaacagaaatggttgccacaccagaggaggagctgcaacatcctcaaacagataatgtgacagtacaggagactcaacaagagcctcaggtacaggatgtgccaaatgtggaggcccctagaaggtctgaaagagtcagaagatcggctatccgtgatgactataaagtttataatatagaagagtcacatatggaggatgatcccacctcatatgaagaggccatgagaagcgctcgctcatctgaatggttggaagccatgaaagatgaaatgaaatcaatgaaactaaacgatgtttgggatttagaagaaattcctaatggagccaaaacaataggttgtaaatgggtctacaaaaccaaatatgactccagagggaatatagaaaagtttaaagcgcgacttgtggcaaaaggcttcacgcaacaagaagggattgattacaatgagatattttctccagtctcttgtaaagattcgttcaggattataattgcactggtggcacattatgatttggaattacatcagatggatgtaaaaacggcatttctaaatggagatttggaggaaaaagtatacatggcgcaaccgaaaggttttgtcatgaaaggaaacgaaaatatgggatgccgtctaaagagatccatttatggattaaagaaagcttcgagacagtggtacttgaagtttgacgggacaataaagaaatttggatttcaagagaatgtcaaggacaactgtatttattcaaagtttaagaatgggagatttattttcctaattctgtatgtggatgacattctactggctagtagtgatgtcagtctacggcaggaaataaagaaattcttgtcctcaaactttgacatgaaagacctcggtgaggcttcatatgttttgggcatagagattcactgagatagaacaaagtatgcattgggactttctcaaaaggcatatatagaaaaggtgttgaagaaattcaacatgtacagatgcagtatggggcattgcaatgtcctagaaatcagtatgagctcaatgaaatgaaaacaaagccatatgcatcagctgtaggaagcctacagtacgcgcaagtgtgcacacgacctgacttggcatttgttaccgggttacttggcagatttcagagtaatccaggcccagagcactggaaattggtaaagaaagtattgcgttatttgcaaggaacaaaaggcctcatgctgtcttacagaagatcagaatcgctccagatagtggggtattcaaattctgactttgtaaaagataatacaaagtcaacatcgggatatgtgttcaccctggcaggaggagctatttcatggaaaagctcaaaacagactatcactgcagggtctactatgtatgccgagtttatagcatgctatgaggcaacggggcaggtgaactggctaaagttcatacccggtttaaaggttgacagtattgagaaaccactaaagttatactgcgacaacgaacctgcagtaatgtacgctcacaacaatcagtcaagtggtgctgccaaacacattgacataaagtactatgttgtaaaggacaaagtccgggatcaaacaatcagtctcgagcacattagaccagaaaggatgctcgcggatccgctcacgaaaggcctaccatccaacatgttcaaggaacatgtagccagcatgggtctaaggggagccttatgaatcctagactacagggcccaaaagtaaaagtatctgtttctgaatagagatgtgtatagtggctatcgaatccatcggtgattgaccgtgacgatgaaacatgctctatgtgcaaatctgtgatggaatagaaaacttgaccttgctttcatcttgggagaggtggactgggtgttgaccacccgactagatctaacctaggtgatcctagtgcaaagtctaacaattaaatgataaaattgtccctagtgccatattcacatatggaagtttgactgtgcactcctagcgtatcccaattcccaacaggaattttgtccatcatgctgtagaggagcaaccttgttcgttccaacccagaaaagatttcacttcctacattcatccaggatatactttcgaaccataggtggtgttccaccgaagctagcaagagcacagcgtcctgtaagcttcgcgcttgccacgcaagattgcaagtagttgaactgtcttcttggatctcgagggccaccacatattagtaggaagaaaggcttcagatattgtatttggtggaaggggaagaacgggcgacctgttctcaattggcaggttgtgaatgtagtccatcttcctagcagccgcgcagaaagaacctacaaactcaggctgaatatcaaacaagaaccttgagatggtcgtccatacacctttcgaagatagggcgacgttttcatagtaaaagaatggtggtccaaaagctggtttcaggaaggtttctgtggactaaccttaaactgtcactgggcaagctgaatcccaccaatccaccataggatttggcagaggcattggctcttcatggctgtcaccaaatggcatttgattcccttgtggcccacttccataccactctttttcttgcttccatccatgaatcttgtattctttcttcctccaaaggaactgaactctgcatcctgcaaaattataaacatgatgctagtgccattacatttaaagaaatgaaacaatttcttgattcggatgcattataatcacaaggtacctcatagtcagataggtttgcagagtaaacatttcctgcagccagataatattgaatcagccaacatatctacatatgcattgaaacctgcgaaattttacccaacgtaggcagtataaggtcccttcctgtgaaagcagcaaattcaagaggcataccacatctagtaatagccgtctttgcttcatcttctggaaaacccatgctgactaaggacttgattttctcatcgttctctgacagctcctgtaagaaatcctgcataaaagcacatgaaaggcagattgaaaacatttgctaaatctcacagatgacttgcagtttggaataacaaaaagtagtactcacacaaatatacctgctttttccatgctcgtaaatgttctccttgtatacccactcagtaacagataaagcccacctccaatttcctcttgcctcaagcccttccagtatttgtagtagattaccttcactataaattaggtcagattttttttcatcaatctagtaagcctccaatcatgtaaacttagatcatattagttcagtctgacaggcaaacattcttatgcaatatggggaaaaaaaatgcaacacttcatgcaggttcaaatgtgtcttagcatagattaagaggagaaacctcagtccccagactaattatttaatcaataagaaaaacttaattcgataatagcactaggatttaggataagtgaagtttacaatgaagttaagtgcataaccgcatataggtgcatactacactgctgtctcaatggtaaaatatccaggctttgtaaaaattagacctttcttttctactaatagtgaatggcagaactcctgcctccttcctcgaaaaaatacactgctgtctcaatggtgaaaggaacatgtgtataccagtcagaaacaatccatgctaagtctacgcaaattctaccatatctcatattcatgaaaatgtgattatttaagtcataaagcaaccagcactactttgtactcctacttgaaagcaggacaaaggccaagaatgccagaaaaagcagtagcacgaacatacctggcaccacagagttgacaccagtataagctgcaggaaagtagttgcacgaagcagaaggacatgtagacagaagcaatgaacaatctacagagcctggcaccacagagttgagaccagtatatgctggctacaaacaaagacttgacttatgctagtaaccgttatcatttgtctccatctttgttgtccaaagtttgagaacttgaaactaaacctttatctacaaatttcaggatatctgaggaagttattccatctttcgacagctccacaactgcttcatttattaatcctaccattttcaaattattgccgtaggtatctttttggagaacctcttttaaaagctcacatcccttcatgggatatccatttgatatcaaaaagtttataaaatataagagggaaaaagtatccaactcaaaaccttttgtcaccatctcttcaaagtaggttagtgcagtctctattcggccacatttgcgcaacccgtttataaaagcagtatatgctatattgtttggagcacaacctttctccctcatttcgcaccacaacttaatggcttcatcaggtcttccagcactgcagaatccatctatcaaacttgtatatgtaattactgttggttgcttttcttcataaaccattttatctaagtaagaaattgctttctcaatcctgccagtcttgcaacaaacatcaatcataaggttgtaggtaacaacagaaggaaacagacccttctctaacatctcttccataattttttgtgcttcatccaatttacttgattttcgaaacccatttatcaagatattatgtgctaccacatcaggaagataatacttacaggaaatgtcacggaagaggtgtaacgcatcgtccacctctccagtgttacacattccattcatggctgcagagtatgtgacaatgtcaggaagaaaaccaatttgaagcattccatctaaaaattgcactgcttctgttactctgccactgaagcaaagctgttgcaccatctccgtgcagttctttatccatgggggatgcccatttgtctgcatctcccttagtaaatccagagcagcctttggatcttttctcctacaaatgccatagaacaatgaattatatgtgaactctgagggtgtcaaaccaaggtccttcatttggttaaatatcccatatccttcttctaaccgatccatattgcacaactcatggatcaaatcattaaacatcaaaatcttgcccttacaaccaaggctaatcatgtcttttgtgagagctaaggccatatccagcttcttaaccttacataggccacagacaacaatgttaaaggaatcagaatttggtttagcatcttcacggatatgcaacatatgtgcaccaccagccacatcattgttaaccgcttgaccaccacataccatggagcggagcaactgataagctgcttctacctcaccacaatggacaagctcttctaaaactacattgtatagtgggacaacactgccggatttcaaatactctgcattctcattaatgaacggaccaataacggcaaaatccccttctctacaaaaagcctcgatcaccttcttgagtaagcggacgtcaggagcaactccactgctcttcatttccttgaacaacttcactgctctcgcaatgtccttctgctgacagagcccctcaattaaaacgctgtacattgccaaatcgacaacaaacccgtaactgaccatcttggcaaacatgtccatggccttgtcaaccctgccttgcttggtgaacccgtggacaagcacgctcaatgtcttctcactcaacctcatccccagtgcttccatgctccctagcagctcaaccgcaccgtccaccttcccccacttgctgaacgccaccatcagcgtcgtaagcacatgctcgtccacccaccccagctcgctcatcctttggaacacgtcgttggcgtcatcaggacgacctgcattgcagtagcaccgcaggagtgaggtgagcgtgtacttatcaacgctcccgtcgccgcacctcgccaccatctcccggagccttgcctgggcatcgtccgcgcggccggccttggcgagcgcgtcgaggaggcagttgtaggtgtacgagttgggggtgcaaccgaaggaggccctcgcggcgtcgaaggcgcggacggcggtgtcgggcagccccgcggcgccgaggcagcggaggaggaacccgagcgcgcctggcgtcatgaggcagcgcgcggagatcgcgtcggcggcgaggcggtcgagatgcgcgcgctggtggcgggggaggagggaggccatggcgttgagcgagtagcaggagtggcggaagcccggctggtcggcggcccagcggaagaagtcgagggcgtggcgccaggacgggagccggaggaggacggactccgcggcgggggcggtgagctcggcggcgagccggcggaggcgcgccgcgtcgcgggtggcgcgcgggcgggagaattcgtcgagcaggtggtgggcgaggtaggaaggggatgcgggcacgggagcgcgcggaggcggagaggcggaggtggagaaggagaaggagcgcggggcgcagagagagcgcgacgagggggaacgggctaggcggcggagcgacatggaggagggcgcggaggcggcgcacggcggagtggaaggcagggaggtggccggaatccggaagggtagagagaattccaagcaagccggaccaactgggcctgggccgaccagcctgactaaaggctctcacagtggatttatatatttatttatttattaaaagatttaaaaacataaagtaccgttcaaagttctacaaaaatatgctcctcccacccaaccgtagggcgaggacagaaggagcatattaatgtgaagtggcacctcaggagaggggcgtgcaatggcaattttctagataatctcctcccggcgataaatcgttcttccctagggtgatttattgctggaagggggtcgcctacaaaattaccatagcgcaacgtttagctatgtatgggacgcaccatagcaattgtgtagtggctccttcccaacaatgaatcgccctcccctagggcgattcattcttgggaagaagccgcctgcaaaattaccacgcacacctcccacagggtaccacgtcgcgtagattgtcctaccgtaggacgatttatctacccccgccctacggtagggcgggaggatatatttatgtgaagctttgaaatgagaatatatttttgtaaatcttaaaaataaatataaaaataaaaaattttcctcacagtgcatcccacctatataagaggcctcagagtgtcacgtaggctagagctacgaattcaaaatctgcgttgctcaccgtgcatgtggctatagaagtggctttaattttataattccagctcatgattttttttcagttcttatactttctctaatttacatagaagtaccaattttacattgcacaccctaaaatccaagaaataatatcaaatcccctcacctaccctccctctctctctcctttatcccctccctccctctcggttcccacggaacacatcggtgccactcactcctctacgtcaaccccccaccatcggcaccgctccccctccgccacaccgctagcgccgctccccttccccc

SEQ ID NO: 14983 - DNA, 3778 bp, Oryza sativa
aaaattacgttaaaagcatttcaaaatcaacttcaaaatcaagttcaaaaattcaaattttggcttattctttggctgtttaggccaaacgatggggctatctgataagatcaattttttttcaaaaaatatcttcagattattggatagagaataatataccgattctgttggactgttggtgatgctctgaatccccgccccgagtcctccttgactatccaaaagcaccgcccgccgccgtcgccgcgacgccgcctagaaaaaatggacgcgctcgtggtgcggcggctcggggaccccacgctggcccccggcggcgaggcctccccgttcgcgccggtcaccggggaccacccggcgccggcgctcgcgtcgccgacgtccgtgcgggtgcgcgtggcggccaccagcctcaacttcgccacctacctgcaggtacagggcaagtaccaggagcgccccgcgctaccgttcgtcccgggctccgactacgcggggttcgtcgacgccgtcggccccgccgtgcggaggttccgccccggggaccgcgtctgcggcctcgccgccgtcggctccttcgcggatctcatcgtcgccgacgagaagcagctgtgagttcggtttttcgcctctcgctgcctcgtatggtgatctccgtttggaagattagcttactccaagtggctctctctttggaaatccccatttttgggttaatttatcagtacatgccttaattagtgggatacagcatcacgagttatatttggttttctctttcaattgtcggatgcattttcttgtatgtagtcgattagttgttgaagcatttctacatcggcttatatctgttcgctcttctcatgtccgatcgtagagttaaactttctgctagttcggtaggtgctatgcagattttatagcttatgagaagggttgtttgcttttgggagtaaatgtttctttttaaaaactatttattctatgatatgtctaaatatggggatgtgggagtgggagagactatgctggttttcgatgaaaaagatgagaatgttgctgtctgtctctctatagatagttaagccttgatcccctaataaagaggtggaatctttcaattgtcgggatgccttaaaaaaggcgatgttaatgttgtagtgaggactggattgtattttgttttgttatttcagcttgatttcactagcaaacaaagcgcacagtatgtctcctgtttgtttatcttagcaatatgcaatgtataaatcaactaatacaatagctgcacttgtggtggttgcagttgcagagtaaaacagttagcactgttgtgaaataaaataaaggaagcaaatgttggttagatacttgtatatatgtgaatttctgaatttttgtatatgaggggctatctgtagttaccagaatttttttgtaagtataacatgcattttaaatcgttggatcagaatcataatcagacaggcgcacatctcaaagctaatgctttgtgcaggtctgcaggaaaaaaatgaattgtacttggccaataatcagggaacttacacaatagagaaacatcttatttattctggtatgttctattgaatcagtgctatgttctttcgaatcagattttcggtgcctgatggatgtgaccttgttgctgctggagcattgcctgttgcatttggtacatcgcatttggcccttgtacacagagctgaactaaaggctggccaggtgcacccctgtgttaatctctttgtttataaaatgcctataagatatccatttggtacttgtgcattgttcatgttattgttatggacattcatcatggatacggcacaaatctcctttggaatggccatccacattctcggagcactgcattgagtaaatcagcatctctctgctgctgctccacatctctatatccataattactgttagtgtgttaagttatgtggcagtggcatcagtgtcttaccttcgtttgtgacatatcatgtacacacaatattatgagctagaccgcattacctcaaatggctcattttgatggccattattggtcaaacataggccttgtattttatatttatgaaatttattatgtcaattttctatataacttaaattctacagtttctatcatagaggtgaacttctgcaacagtacccaaacatccacaccgttctgataaggtcaaaatgttatggatgcttattcgtggataaggaagggtccacagattgggataaaggtccacagataggataccacttaactattccctatccttgaaaactaaaatcatctaggggcatatttctaatgctacagtgtacaggcactgttcatctgcagtaccgttaccatagcaccattttgttggtgtctccaattaaaacccttccatttaggacccaccatctgatgatctgatacaggggttttgattattttattctcacattaatgaaatctgtcagtactgttctgttttttaatggtactgtagcagtaggactagggaagcatttgccttccaaaataagaatatctatactatattgattaattaattagcttcctggcatagagaataattgtttgtatcctatctatttgagatatggtttattccgaaggtcaggattctaagcttgtttggttggtgacctgggcgtcatgcctgagaaaaatatgtgcctgagtgttgcatgaggtgggagtggttcatgcctgagagaaacttgtttggttggtgacctgtgcctgagaacacttaaaactaatattatctggcatttttctctttttaagcttggagtttaatcataaatccaatatagatacttaagagatttaacaaatatttttttttacatagtctcataacatatctttagctaatcaagtggagagcagttcagcacgtttgccaatcacaagatagtgcatgcaaaagaaagcaaccagctgcagcgtgagagaattactttaattcagcagttagtagagaagtacttcggctaatcaagtggcctggctctgcatgcaactgaggtcaccaaatttggtctcctgactcaggttggttgagctgccggagagcccaggcctggaaaggtatggagcgcaggagtggctcaggcactaaccaaacaaggtgtattttttctcaggcttgtctctggctaggcagatttgtctcagggtggcaaccaaacagcctaaggctgtgtttggcaccgcatgttcccaactcctctcccttctattccgcgcgcacgcttttcaaactgctaaacggtgcatttttggcaaaaactttttataggaaagttgcttaaaaaaatcatattgatccatttttgaaaaaaaaaagctaaatacttaattaatcatgtgctaatataccgctccgttttccatgcacaggagattggttcccatctcttccaaacgaattcagcctaaatcttctaatgggtgaagttactattcactcaaacctgttcagtaatataccaaatcatccctatgaaagggatgcatgcacctctattatgattaagcaataagaagaaataagttaggtctagtttgatcagaaattcagaatccctcagcaatccagcttggcaccaatgagtgcgatcccatctttgtgcaggtcttcattctccatcggtaaatcaatgtccattacagtttcccttctttgattaagagtcagctaccaaagctcctagtaacgat

SEQ ID NO: 14984 - DNA, 2814 bp, Oryza sativa
cgtcgaagtcgtcgaggtcgcagctgtcgtagcggtagccgaattcgtcgtactccacgatctctgttggtcgtgagtcgatgccgggggagctgaggtagccttccagttgatccgtcgaaatcgtgccgagtggctggagtatgatgccgacttccctggagctaggcatgatcggtgttgaagccaacttccgcctaggcctacggggagaagacgcccttgtagtgaagactgcagccaaatcgtcggggagtttcatcatgattggcgggtaggccccatcatcttgatctggtggtgtcggagtagatgggatctcgtccaagtggtttgaagccgactcgagcgagataagcttggagtagatcttggccgagttcggaataccgaacggggctgagacctggttctttcccgactggtttggatctgagtcgaggagagagatcttaccgaagtcgttggtgatgaagttgaggctgccgaaccgaaacgcctgcccgggagggaagacgaagttgtcgatgccggagacggaacccatcgcactgatcggcgagaaacttgacgcaacccctacctggcgcgccaactgtcaaaacaagatttcggcaatacttaaagggggtggctatcaagctagaaaagtggatgggtttgaagataaggaattttatacaggttcaggccttcttattcaagaagtaataccctactcctgtccggggatgattccgccgagtgtattattgatcgtatgatctggggaaaaaaggtcgtcccgagaggagcccggacccctccttatataggggaaggggtccgtattacaaaatacagtccatatccctaatggaatatgtgattacagataaaatataatcgtaaccgactaggatctcgggtattttcttgacatataagttagaaactaacccgagtcctcataaagatattctatctatatctagtaccatgtatccaactaaactataactgccgtctagatatggaatatccataatccccacatgtagcaagcgacagcgcggcgatgcccgacgcagcccctcgtgcggagccgagatggaggtgtggatgtgtagcgtggacggcagccagggagaagtggaggcaagccgcaagcaggccgaggtcggcggcgcggcgtggcgcgaaggaggcaggcggcgccacggcggcgcgtcgcacgtggcgcgaaggaggcaggcggcggcgcgacgcggaggaagggctggcccctccggtggccgggacgaggtcccgtgcgagtcgaggctggggagcatgtgccgtcgtcgtcgaggagttgccgagttgaggataactgaataagatcgagactcccctttttcctttcttttgttcacccggacatgtggtggggaactggagattagtcatgtgggcccaatcgaaatggacggtgggctactagggcagccaatgggctggaggcctggagcaacatggaagttgatactttcggtcttcggtttcttcaatttgtagccggtactgagagcaagtacagtaagtcacctataacgatatatcaagaagaaaaaaagaaagagaagtaagtgggctataaatttaattgccagtaacaacacggacttcaacacgttgtatgtatgaggtgggaccggatattaattgtgtaggatatttgtgtaaataactattgtatgaataggctattagattagttatagatgatttggagctaacatttggctatactattaaacttgctctaaccgaaccggtctctcccatcgtgcaaccgagcaaacgaccgaagaccgctactttggttttttcggtttcggtgtcgattttttaggtacggtattcggttctcggtttttatgctcacccctaatcgtacgtacgctaaccgctgctagagcatcaccaacacatcttaaaattttattcccaaatttttagttatggggatgcaaaaacataatttgaggtgttaaaaattttctcactccaagagattaggtaaaattggtttcctaaaaattaaaagggtgggccacgataaaacctccacgaaaaaaaatatgttttgcgctccttcctcccgtcagatcacgtgtgcatctcttccccgcacgtgaagcgccgtgattaggagccaaaacaagacaacacatggatatattccgacgaaaaaaaaatttagcttattatttaattttttttaaatgttgcacgatgttacaccaggtatatcgaaattgtttcactaagtagatcgaaaatgtttcactcgtttaaatcaggtgttgtttcaccttataaaaaaacaatgtttcagcaaatagcgaaagaatgtttcagttcactgcaacatttgatccatacatagtgaaacattgtgtacactaggtgaaacattttttttgtggaacaaaaaataaaccaaattcccttaatagggggtttccaaaatatgtgagttttttttttgcaatggaatatttcgttcactacaacattagatttatacatagtgaaacattgtgagtacactaggtgtaacatttttatggaacaaaaaataaaccaaattcccttaatagagagtttccaaaatatgtgagtttttttgttgcaaaagaatattttaattcactgcaacattagaaatagtgaaacattataagtaaattaggtgaaacatcttttgtagaaaaatgagagaggaaagtgggtgggccgaggtacacacgtggggatggttgtggaaaaatgggagagggtagtaggtgg

SEQ ID NO: 14985 - DNA, 11225 bp, Oryza sativa
tttggaggtgttgtggtttttgacgccacttaccatgtcaaccgtacaaccttccttttgttccttttattggtgtaaaccatcaccgtagcatggttgtctttgggtgttgtctttcaaatgagacggtttcttcatatgtgtggctgctggagacctttattaaggcgatgggtggcaagtgccctaaatcgtttatcaccgattgggacctttccatggcaaatgccattgccaaggtctgtcctgatacagatcatcggttatgtacatggcatattaattgaggagaacgcaaaacgccatctccgtggggatgcgctcactgaatttcgtagactcatctacgaagtaatgatggccgatgaatttgagagacgatggtgtgcctttaaaaacagtgataatgtaccggagaaggagttatggttagccatgatgtatgcactaagggaaaagtgggccgcagcgtataccgataggagatatttcttagggatgaggactacacagatttgcagcaacagaaataaagaacaactaatgagacacttacatacaatatgatggctcccatcattcaaagttatttctaccattccagcataaacaagggatgacaaagtacatatgttctatacaacactaggttttcaagccttgcagattttttcttcttcagcacattaaacatggctgacatgttttcatcggcacatgataaatcatctagctgcacttgaagaaaaaagaaatcaacggcttagttgaagcaagatgcaaactgaaatcaataggcagtacacataatattgtgtgttaaaacggcttttggtcaaaacagtgtaggtagcacatgcttgagcatttttaatctgtaactttacattcaggaactgcattttcaggacaactggaactgaagttttcatgtgccctatactgatgagtatattggtcaaatctgttctttttgtgaattcataatgtgaatgaaattaaaacggtgcgatataataatggaatgtgcttacataagttattactactgaattgtgtcacttagctagtatgtatttatgtgatcactaattaatagatgaaatagaatgtagtatgtgaagcactacggtcacaactgtggtgctgctggcgaggaaacggctgcagaccgcagctttgatgggctttatcagcgtgcggcaaaattagggtcacatgaaaagggtttagctgttcaagcgccaaggcattccgtgggatatgcaggcctccgtctagctggccgcagcagcgccgccgccaacgaacgttcgacaaaaactattccctatttttctaggttttttttaattagttggttttctagaaaaactatttggtgcatgtatatatggctatacatctacatggctattggatctaactggggtcatgtatcgtgaatcgatagtaattatacaaaagtaattacaaataccttaagatgcgtctttgctgtagagttgagagcaggactgtcatcttcacccgtattaaccgtagaaaattactgcgattgacgcctctatgcagatggtggtgatggaccggtcaagggatccatgatggtgaatgaagatgcaaaatattgtgagaagaagagaggagaaaataagaacggatgtgcaccgaagacaggagaaagaatgccttttgtgtcgttgctcggttgcctttctgttttttttctgttgctgcagatttagtaatagataaagctaataaccaactgccagattgatgcgtgtttttagcagaagtccaggcgtcgggtgcctgacggggagtggaaaaatcgggcgcccacgtcatgctgatgtcagcatgacgcatgtgtgcaaaactattttaaactattttttctcttaaattatttatccaaatcatgatccaattgcaccattaaatttgttgcaattaaatctttaaaacaagaccatatatggatatattccgatgaaaaaatagcttattattgaattatttataaatattgcacgttgttccaccaagtatactggaattatttcactaagtagatagaaaatgtttcaatcttttaaaatcgtgcgctatttcaccttttataaaaacaattttcagcaaatagtaaaagaatgtttcaattcattgcaacattagatctatatatagtaaaatattttgagtacactaggtgaaatatttttggtggaacaagaaataaaacgaattcccttgatagatggattatgtgggtgattttgttgcaaaagaatgtttcaattcattgtaacatttaatctatacttagtgcaacatcacgagtatactagatgaaaaaaattgttggtggacacgtggcggcgtacggacacgcgtggtggggccacgtggcagcggcgcgtgtaggcgcccgacgctgaggattatcggtgtttatagtagtaatagtctgattattttcgttggtcagatggatcgtactattgtttcctatataagttaaactaatcccgagatcaacgttttgtacctccgcatgatgccgagttatctgtttttttagccgcggatttagaatagctaataaccgtctaacagaactttttatctccgcatgatgccgaattatctatatttcccaaccgggtcgatttttagaaacatagttttccggcagatccttcatagaataaagcggaactgtttattttggacagataaaaaattaagtccgggagaccgggtcgatttttataaaacatggttttccggtcgaccacgcatagaataaagtggaacggattattttgaacaaataattattaagtccgggaccgtttgggaagggtcgatttttaaaaatcatggttttccggtcgatcgctcatagaataaagcggaacggattattttgaacaaataactattaagtccggtaccgtccgggccgtgtcgatttttaaaaaacatggttttccggtcgaccactcctagaatatagcggagctgtttattttggcagaaaagaataagtttaggttagttttggtcgatcgctctagaatatagaatatagcagaatggtttttttggcatacaagaataagtccgcgaccgtccgaactaggtcgaatattaaaaaccatggtttcccggtcgatcactcatagggtatagcagaatggtttattttagcataaaataataagtccgcgaccatccggaccaggtcaaatattaaaaaccatggtgggtcaaatattaaaaaccatggttttccagttgagcgctcctagaatattgccgaacggtttttttttacagaaaagaataagtttgggtcagttcggatcgggtcaaatattaaaaatcgttgattttcggtcgagcgcgcatatattatagccgaacggtttattttggacagaaaagaataagttcgggtcagtgcggaccaggtcgaatattaaaaatcattgattttcagttgagcgcgcatatattatagcagaacgtttttattttttacagaaaagaataagttcgggtcagtctggaccgggtcgaatattgaaaattgtcgattttcgctcgagcgtgcatacattatagtcaaacggttttttttttgacaaataaaaagttaagtccacgaccgtccggaccgggtcaatttttaaaaactatagttttccggtcgatcgctcatatattattttgacatatattattttaggacatgattggtgtccgaacgtaatttcctagaacttagtctgtagttggacccactctagctttttttacacacaatttatccgtatcacctttaaaaaaatcaataaatcaaccgtgaatatctgaaacgattgggcctgtagttcaggagtcccaacacctgacgcatgcaatactttgtcaccctaatgattacgccgtcagtgccgccgtcattaaccataatattggatttcttccagacaaacgccgttgcggcgtcgccaggtggctttcttccagagaaacgccgttgcgacgaccagcgacacctccaccccggaaggatctacatgtggctttaactcaaggttagtcttctcttcatttttaactagatgattaccccgccgcgttactgtagaaaattaagttgcgtaatatatacaaataagatgtaatttgattatcaaaacaaaaacagtttgatacaattttgagattaaaaataattgagatggcatgtttttaagagagaaggaagaagagacaatttggaccatagatctatcatccaaaggttagaaataattaggggtgatgtggcttaatgagataagtgagaaattgcattaactacgtttagtggggatgaactatataactatgtatgattactcctagttaattaccatacttaatcacattgttggacggacttgtgtgtcattcgcgtgcatggaaatggatcaagttaaatgacgatgtactacatataaaccacaggaagtgtccaggaaacatcacctacttatttacttattatgctaattacattcacacaaattacacgaggtagatggttgttgtggctgtaattatttacaattcgtggcatgttgtacacaacaaactagaaattaaaccactgttaatatatgaccgaattaattctccagaaccagtccctgttctacgcttttgaattttcatagttagaaagtaaacccttggtcttattttagattttgaattttcgtagttgctgaagtaatggctcatcagcaaccgccatacttcatctcttaattaacattgtattaatgcatgcattactatttaaatgtttttaaatgatttaattattccaatcgcatcacagaatataatcctcgatgatacccaactatgagccgccaccgagaatgactaggaataatattcgagccaacaaaccggtgagcaactattctttcgacttaacgatcgctctctatgcaataatgaactaaattgtgatgtttattattgcagggaacacaagtatgctcacaagtagcctactggaaattcatacagactttggacaaagaacagctgcaagccagagatgatctaggttttgggggcttaacaaaaatgaatggagtccagattcgccggcttttctgcaagcaaattgctaggcaatatgacgagtagactagagctttcaatataaatggaaccatgctggagataaccattgaagatgtggatcacatactcggcgtgccatcggaaggtgctgaactggttgaagtcccacaagcaatccaagctgacgttgatgccccaaaggacaaagatgaaaacaaagctctacagacaacaaaggccgctttgtttgcattatataaagacaaaaggggaataagataactctgtcagccttgcaggattcattgaatttgaacaaatcttgtgacgatcactttaaaaggcagtttgtgctatatacaattggtctgatcctatgtcctacaactgagagatttgtccattcagattacctaaatctgctcataaatataccagatataaagagaaccaactaggctagcttaaccctaaaccatctcaagaggtctatcgtcagtttccagcatgataaggtcaatcttaagggcaaccaaattcttctactggtaggtgtaatttcaattcaagttatggtttaagtttgtatgatgtgactacaaaatttttttaaaaatttttcttgcagctttggtactgggagaagtttcgagtgagtcacatagatccttccaaagattacatcggacgtgtcagaccactgatacaatgctaggatgagaagaaggccagaaaacgtgaaaaaatcatgtatggagtaggataggtaattcgtgtgttgtaatttttgtacacataattaggacaatgtctagtattaacaatttgtacacatgttcgaacatagattgtgaatgatatcaagatccctatcgaggccaccaaagagtataccactgaagatcactctggaacagatgccaaccaaccaagtaacatggtacatactgaattgtttttctaaaaaattgaaagttgttttcttattatttttccacgtaggataatactaaggcacatacaacagaaatggcggatgtctagttgcagcttaaatcaatgaatgaacatttaatcatattaacaaaagaaattcaggtacgagttgtgaagtacaactatcagttatcatgaactaactattttaagttttaacatttgtgcatgctagtaaatcaataatgtttgaaggcaagaaaaacaaaccttaaggggtcgttgcaagtcgacacacctggtgttaggataagtccaacaaaaaacatggcatgacacaggcatcgtccccccaacaaaaggtatcaacaaatttctataataataagtaactctatacgatttacaaacttgttgttaccgaaaattgttcttcataacttgccgaagcaggccaagaagaaaaaagatacaagtaactcgcctattgcaccacgggtgcgaacaacaggaagggtcctcacatcaacgatacaattaaacactaactttgtgtacccagagaaccccaagaacaagcagaaggcaactccaaccccccccccaatacattccgaagttatgcctcgcacaaatgcttaaaaattttcctaacacagcattttatatttgtgactatgtaattaattgggtagtgattgcagagtttacatgcaccgaagaggatgagttcctcatcgactacattaacacttcaccgcatcaccgtgttatggtgagaatggaaggattgctccttacaagggaacaattgcaaccactgacaaatcggttcttgcccgatggtgaagctagatacgtcattgacgaagtaacatcctacttaccctctattgtatcattaaattatatttgttatgcatactaaattgttcaaaatgtagatcatcgatacatacatcatgcacctggaacataaataccttgaagagtcacaagctctcagaagagtatatatgatgaaaacgttcatcacaggtaaaatatcgattgactgcgtgcacgaaatctccaagcggcagtaggaaaagggatacatcttaagaattactaaccaaatttcccaaaacgaacaggtaaaactagaaatctccaagcggcagttggaaaagggatacatctcaagaattactaaccaaattgcccaaaacgaacaggtaaaactattttacttcagttaatgacaatttgttcggcataaaagaactaaacaaagcttgaaaatgcagatctttatccctattaatagaaataagaaccattggtacctggtggtggtccatgttaagcaacgtcagattcaactactggactcatcacctagcaccgataaacaagacacgaaactgacattagtggtgagcctataatgtcccgtaccgctttctatctataaataacatccttataatcttagttcatatttggatctcctgcatgatcaaaagctgataggaatggtaagatatttcgaaatatctggatacaatgaaagatctaaccaaaccattttggccgagattttgatttgtcgacttggcatgtgttcagtgtgacaagcatacccaggcagaaagatttgtatgttacccttcttggattaaatgcaattatctttcttacacaaataattgttatgttaaggaacatctttctataggtcttcatgtggcactacgccagatcctcacacctctgacgggatacctgtgacgggcaaacgaattggtcagtagtgaccattacctttgacgggttatacgggatgccgtcaccggtgaggcatctggccgcggcccgtcacaggtatcccctcacctgtgacgggccgaaaggaaaacccatcagaggtataccagtgacgagtttttcttccaacccgtcactggtatcccctcacctgtgacgggccgatacattagaagccgtcagaggtgatgggccgccacctgtgacggctttcatttctggcccgtcacaggtgagcggataccagtgacgggccgttgaatagaagcccgtcaaaggtatgagcaatacctttgacgggctttttttatctaacccgtttgaggtgtgttggctctataaatacccccaaactgccaactgctttccatcccgaccattgtactgttcacaaatcggttgggagggcaaggggggcgattttttgctaaaattcaaggtaaaaaacacattattctccatttattctcaacatatcgatcatcatttatttttcttcgtatgttgttgatttcagatggatcgtagatggatgtactatgcgcatcgttcgtctaccgagtatagagagggggtcactgaatttgtcacatttgcggataatgacagaaaaagtaggatgagcatgcacatgttgtgcccatgtagggactgtaagaatgaacagatgatcgaagacaaggatgaagtgcatgctcatttgataatgaatggattcatgaagaaatatacctgctggaccaagcatggagagcaagaggcgcctgatgtcgcagctgaagaagtgttggatcaggatgtagagaacaccgcagcagctcgagaaggcatgttcgtaccttctcctttaggtggagagaccatagatttggacactcaatgtctatctacaatgttgcatgacattgaagacgcagaggacaacgacagagattatgagaagtttagtaagttggtggaagattgccagatgccgttgtatgatggatgcaagtcgaagcacagcaagttgtcatgcgtgttggaactcatgaagcttaaggctagtaatggctggtcggacaagagttttacagaactccttgagctgttaaaggatctgttgccagaggggaacaatttacctcagacgacatatgaagcgaagcaagtattatgtccgttgggcctggaggtcagaagaattcatgcatgtccgaacgactgcattttgtattacaaggaatacgctgacttggatgtctgccctatctgtggggcatcaagatacaaacgagcaaagagtgaaggtgaaggaagtaagtcaaagaggggaggcccagcaaaggtggtgtggtatctcccaattgcggagcgcatgaagagaatgtttgcgaacaaggaacaagctaagcttgtgcgctggcatgccgaagaacggaaagtcgatactatgctgaggcacccagcagattcagtacagtggaggacaatcgataggatttaccaggaattctcaaaagacccaagaaacatgcgtttcgcaatatgtacggacggcattaatccttttggtgatttgagcagtcgtcacagtacatggccagttctgattgttaactataaccttcctccctggttgtgtttcaaaagaaagtacattatgcttgccatgctcattcaaggaccgagacaacctggcaacgatatcgatgtgttccttgaaccgataatcgatgactttgaaaggctatggaatgagggcacacgaacatgggacgcatatgcacaagagtatttcaacctccatgcgatgctgttttgtaccatcaacgattatccggcccttggcaacctttctggccaaactgtgaaagggaaatgggcgtgttcggagtgtatggaggaaacaagaagcaaatggttgaagcattcacacaagacggtctacatgggtcacaggagatttctcccaaggtatcacccgtataggaatatgagaaagaatttcaatggacacagagatacagccggacccccgacagagctaacagggacaaaggtgcacaacttattgatgggaataaccaacgagtttggaaaaaagaggaaagttggaaagcgaaaagagaagagcacatcgaaggaaaaaatagaggagcatgtggaaaaacaaaagacaaaagagaggagcatgtggaaaaaaaagtcaatattttggagactaccatactggaaggatcttgaagttcgccactgcatagatttgatgcatgtcgagaagaatgtatgcgagagtttaatgggattactgcttaacccaggtactacaaaggatggtctcaacgcccgacgagatctggaagatatgggtgttcggtcggagctacatcccataaccacggaatccggcagggtttaccttcctccagcctgctacactctctcgaaagaagagaagattgatttgctaacatgtttgagtggtataaaggttccatctggttactcatcaagaatcagtaggctcgtttcactgcaagatcttaagttggttggaatgaagtcgcatgattaccacgttcttatcacacagctgttgcccgttgcaataaggaatattttgcctcctaaggtgcgacacacgatccagcggttctgttccttcttccatgcaatcggccagaagatcattgatcccgagggactagatgaactacaggcagaacttgtgagaaccctatgtcatcttgagatgtactttcctccaactttctttgacataatggaacatcttccggtgcaccttgtgaggcaaacaaagtgctgtggtccagcattcatgacgcagatgtatccttgcgaaaggtacctggggatccttaagggttatgtacggaaccgttcacaccccgaggggagtatcatcgagagttacaccaccgaagaggccatcgaattttgtgtggactacatgtcagaaacatcttcaattggattaccacgatctcatcacgaagggaggcttgacggtgttggtactgttggaagaaagactattaggttggatcggaaggtgtacgataaagctcatttcacggtactacagcatatgactgaggtggtgccgtacgttgacgaacaccttgcagttatccgacaagagaacccaggccgatcagagagttgggtcaggaataagcacatgtcttctttcaacgagtggctgaagaaccgaattgccaggttgcagaacttgcctagtgaaacacttccgtggttgtcacagggtcctgaatggagtgccaccacctggcaaggatatgacataaatggat

SEQ ID NO: 14986 - DNA, 1853 bp, Oryza sativa
ccgtacgtctgacgaacaccgttgcagttatccgacaagagaacccaggccgatcagagagttgggtcaggaatagagcacatgtcttctttcaacgagtggctgaagaaccgaattgccaggttgcagaacttgcctagtgaaacacttccgtggttgtcacagggtcctgaatggagtgccaccacctggcaaggatatgacataaatggatacacctttcacacggtcaagcaagacagcaaatgcacagtgcagaacagtgggttacgcatcgaggctgctagtgacggtggtcgtcgtgatcaatactatggtagagttgagcaaatattggagctagattacttgaagttcaaagtcccgttgtttcgttgtcgatgggtcgatcttcgcaatgtaaaagttgacaatgaaggtttcaccactgtcaacttggctaacaacgcgtacaaggatgagccgttcgttctcgccaaacaagttgttcaagtgttctacatagttgacccgtgtaacaagaaactacatgttgttcgtgaagggaaaaggagaattgttggattggacaatattgcagacgaggatgattacaaccagcacgtccacggcataggtcaagaaatacctctagaagaggaggaggaagaagatgaagttcaatatgcacgtgtcgaccatgaggaaggattatttttgtaatttatgtacgtagtttatgtctacatgtctgttatctgtatgactctaatatgttcgcaatgatcaatagtatattgcttatgaaatagtcaaataaaataattaagtgaagcaccctctagaagtgaaataaaataattaagcaagtataagcattggaaataatataattaaagtagtataataatgaagtgcaattactactgttagtgaaataaaataattaagtataaaaaaatatgtagtgtatgtgaaaatatgttaaggaaaataaaagaactaagtgaaataaaataaaataaaattgctctaggcaaactcacctgtgacgggctctatctgtagggccgtcacaggtgacctcacctgtgacggcccagagtgttgggcccgtcacaggtggtcttacctgtgacggctccacggttggcgcccgtcacaggtgaggccacctgtgacggccacatagttggagcccgtcacaggtgagtttgactagggttgacctagggttggacatcttctagatcgatccagatccggcgcccactctcactcactcactctctcgaccgccgcctcgcctctctcgacctctctgccgccctctacgcgccctcctctccaccgccgccctcgccgccgccaaatccgccgccctctccgccctctccgccaccctctacgccctcctctccaccgcctcgacctcgacctctccgccaccatctctgccgccgccctctacgccgccctccccaccgccgcctcgacctctctgccgccctctccaccgccgccgcctcactcactctctcgaccgccgccgtccatctccatcgacctctccgccgccatctccgccgccctctctaccgccatctccgccctctacgccgccctccccaccgcctcgacctcgacctctccgccaccatctctgccgccgccctctacgccgccctccccaccgccgcctcgacctctctgccgccctctccaccgccgccgcctcactcactctctcgaccgccgccgtccatctccatcgacctctccgccgccatctccgccgccctctctaccgccatctccgccctctacgccgccctccccaccgccgcctcgacctctccaccgctgccgcctca

SEQ ID NO: 14987 - DNA, 4548 bp, Oryza sativa
atgatctctatgtgctgaaggttttgctaatgattacgtacttcatatattttcttggcatattggttatacagtcatttatagtgagcatatttaacacaaatatcatgtcctccttatactcactaggtacatgattttttaggtccaacggtaccgtgcggtaccaaatcatggccattggatctggcccaatccaacagctggtagtgtttgctaccgcgaggtaccaaatatgtccttattgtggtacctcgcatagcagagacgtggaagggcaaaaatgtaacttcgcgtgcaatagatgggaggaatagacggacggaaccaattttctcgcattttacatcctcttctgtgctgccaccgtgtttctctcctcccctcccgccgccgtgttcctcctcctccccgctgccgtgttcctcctccagtgccgcgactttaatctcgggccttgcgctgaagcgaaatcgattgcggcgcgactttgtggtcctcctccagtcgccgcctggatggacgccgccgccaccgggaacaatgacttggacgccaccgctgccgggaacgatgactcgaacgccgcatccatccttgcttatcttttctctcctgatcctacccattccggatttaatggatagatgtgttttggtaccgagcggtaccagtaccgactggtacaacctgctggacagtaaagacactctttctaatatagatcccaacccattgtgtgggtcaccatctgaatttcaacttcaagtgtcctacttgctccatgaagtttcagtctgcaggagaactcggaaagcacgaaaagtttttccatgaagacgaagaaggtaaaagtaatccaatatattgataggaaatgctctttttccctatatcttgatgtctattttttttctacctgttataatcttcaaacggctcaatatttttttgttttggtgcagattggtggctcaaagtgtagtagatctagtcatctagattgttgttttatgtgttcatcctatggtacagataattaatctggtgtctttggcatgtcttttattccccatagttatgtttatatacggctcaatctggcttcgtgagctttgttaccgtctatcatgctttctagtacctcacggtacttgtaatcagggccatccattgagcctgatccaatgatttagcagcctcggtaccgcgaggtacaagaataccctgcggcggtacgtctcccttcctccgcaggcattggaacaggtggaagagcaaattcggattttcgcataatgcatccattttcgtagagtccatacggctggctctcacctgaatcgccccatctatcctcctgaggagaagtttgtttggtttcaaactccgattcaaacaagaggagtacgccatgctaatgtgacttggatgatccacatcttcgggtcagacgctgatgggccattgaactatccatgtggctgagagccctcacagcccagacacaacgacacaattattaggggtgcgctctaccactgagctaatagcccgtcgcgcagacctcgctacgccaaaagcgagaaaaactctatccctttccttttgacatcctcatgccgccacaccacaccggggggggggggcatggggacgtcaaaaaggggatcctatcactatcaactaatttgttccgacctaggataataagctcatgagcttgatcttacttcaccctaaacgaaagaaaacttccatatccaagacttttatgaaaaattgtatagggagtgtacgtgcctcacatgtatggcttaactgcccatacccggtttccacaggacatagcgcccatgcatgctgtttactggtacgaagcgcatagcgaatagggagcagcagctgaccttcgaaccacgtgccaccagttctgctagcccaatcgaggagcactgttgcacaaaggacaatgtggcagccattccaaggagccaaaaaaaattcaaaaaaaccagaaaaacggtagcactaggggttttattaattgatgattgccataggtgagaaaaaaaaaactcccatcctctagtagaggactaaagagtaccatgacgacgactacaaaatgctatacggttgaaccaacggaatactactttatatgtggcatcaaacacggtatcatagtatcaaacctggtaccagatttggtatcttggtaccatagtacgtcatcgacgccttcagcaacataaactataccacccaacgctgtagtgttttgtagtctttctggtatatcatgcatgatttattttttgaggctacaaagtttagagggcacatgatcaaatcttgagaaatccattctacttcctgtgcaataactagtagtatgatgctcaaactgttacactatccacagttggccattaaaacaacagactacactgttccggtaaattaaggagaagacaggttgcgttccccttggctgctgttttcacaacgccatgtacaacagccgatccacgtttggttacacgttattttcacacctgttcaacagccgaatttcatggatgccttcagagttcatagtgatcagtatgactgaaacgattataaggaccaccggagcagcgtcactggacatccacttcaacttctggtgttatttcctgcacacagcacagtactggtataaaacaatatactccggaaaggtatccagaacaccgtcacgtgtttcttttgatttaaaacttaatcccacttcatgttttcaaagaaaaatggctgacaactaaaatacacaataattaatgtctaaactccggatacacaagagtatttatacaccgatgtcgtggaacgagagtcgtttttggtatgtataacatactctccctctggaattattccaccttaaaacaatcacaggtttgatcaaacaacagatatttgataatgcactggcaaattttggataaaatgcaaataaaaaattatctagtattatcacgtacatagtagataatagggccattaagcatggagggataattatgtacgagttgagttaggggataattgatgataaaaatgctactagtactaaagcattttactgatccttgattccttggtaatttagtggactaattgacttattttgacagtcaacataggcaaatcttttatgtatgagtggttaattagcatacatatatacatacaaactggaaaaaaaatagcgaaatgcggtaagatctacctaaatgttaattaagctccatatcaaaacaaaaaatctgttgtacacatcattgcacgtgccagttaagctatcaatttcgaactcattggcaacatatgccatgggacataagaacagaataactaaacctatgcatgatttgcgttcttcagacaggaaagcaaaagctcagggacatatgccaggacgcatcatgttgatattattactaagtcttagtatatatataccttttatctatttgaagcaaatttggctttggtttatttctgcagcactcccttcttgatgaaaatcctaaggcaataagaagagaatttccagagcgcaatatgttcaaatgatcctactggtaatgaaacctattttggtctggttcttaggcgaaagctaattccttgcattatcaacttttgctgaaggtaaagaatacataccaacccactggccttgctttctggaaatggatctttcatcagattcttttgatctcatcacataaacctagatccacctagtttgcatattcaggcaatgcagagctgcatgtaccaaacttatgggacttcatggctttcttcgtattcaccaatttggttagtgttaatgtgagaattttacactagccacatcaaacagcacttgccagatcacctatcctcacatggtggttcagccgttttagcagaaaacgtcccatttatcctatcctgctcccataattcaagaatttctgatgctgacggcatctctccgcatgaaccatcaccatacaaattcattgaatcaagtacttcgtcaactgcagatactcctgtccccaaccagccgagatcatgttgttctttctgttcactctcaaaatgtgaacctataacaatgtcctcgctcaagccagcattagcatcagattgtggagtattcataatgtaatcagagaactcactgctaactttctcatcgggaaatacatttgtgtttagcgaattcatgcaagaaagctgatctagattgctatttgaagacttggttatattctctggcagagagagttgagactgtccagtatatgtaccatcagccacaaaagaagtgtcgttcacaaaagttgtcccacattgagattgcagtgcacttacaaaacaaagttcgggatccgatttgatgatatcactggtactgaggtactttaaaagatctttcaaagcattcacgctgaatcgatgcatattttgctcaagtagcttgctccactgaagttcact

SEQ ID NO: 14988 - DNA, 9319 bp, Oryza sativa
cggggaattggtagcgatgtgccctggaagcatggactccctcagtacagctcccaatacaggaaacggaaagtctccaaggaagagagggacgctcgtttgaaggccgaacttaaggttgaggtcattcaagaactagaagctagcatgaatgcaagggtggaagaaagggttaacaaggtgctcgccgacatgaatataccccgagtcacaacacctgctgtgcaaccaactcctcgtgtacaacacgacgcgagtccgtcacagcataggagtagttgtgcatccacagaggtgccggcccctggtctcccgatcgcaccactagctgcagtggaccacatcgaggtaattattgttatccgatccatatctaataaaagacatttacacattccaatattaaattcaaactttcaccttatgcagggcgcagcacagtgtgtcctactagcgagagtccacccaactttcgctcctgaagtcgctgagggcatggctttcaagccctcggttacagacaaggtccacggcgcagacctgctagctgggtatgccaaggtgtccatcgatacagtaaaggacacctggtcaggctatccgctgcccgtgcccccaaatgatgaaatcatgactttgggcgatgcgcgcaagacattcatacaatggcccaaagaagacatagttgtgaagatgactcctcgtccaagtcgaccgacggagcttacacctcccaagtctaagctatcaattgaggctccccgtggaccggcattgtcagtacctcattctcccggtggagctgatatggacttggcagatatagctcaaagcttggctccaataaagaccacaagaaaggccgatagctccccaccacttgtcaagggccagaagcgtgaacgaagcaaggggaaggtcggggagttggcgccggagccaaaaaggggcaaggctgcgacgtcgatgccggtgagcaaatcggggaaggtcgtgagggcgccagcccaatttgagctaggcatgccattggtggaggacaatgtgttagctgtgatgggtattgcttgccgagagctacataagcaatacatggagctaagcaatgccaagcggaaaatgagggagtcatccatagttggacatcacgaccaccagccgttcctatcgtcgcctgcctatataactataggctttgatgacctcttcgaccttttcaggatccggaagttggacactggtcttctaaaatgctactccttgtaagtgcataccttctatacttgtgatatgactggactatatctcctaattaaattagttctaatacgtaaatattttaaggttgtgttggatcgagagtcgtcgccatggtaatcaggttgggttccttgatccatccatggtgaatgaggttaatttataacagagctccactgaggtggttgactatgtcaaccggtgtttatgggcccatcaagacaaggagtacatcatgtgcgcacacaaccaagagtaagaggacaatacccttcgtgtatattgtttttgaagttaaggttcttagtactaacgctacataaccactgcgcaggcgacattggattctcctagtcatcgtacctaagtggagtagggttacctaccttaactccaataagtccaaagattatgatttcagtgaaatcaccaaggccttaaatatggcttggggcccatatgtggaaaagggtggtaggcacaaggagggcaagaacgaactttatcatgacaccaagtttgcatgcgcacaacagatcggagaccaatgtggtttccacgtgtgccacaacatgtcaacacttctaagagaggtgaaagatttcgaccctgaggttgttgctaatggcgaataagctcatttcaatatctacattgctattcaaaacgtgctaattaacctcttatttattaaacagaaaggtagagctggcttcaagatctcacccatcaacccccccgctatcagaggcgaattgtgtgcctttattcttgcagaaataatgaacaagaaaggacgttttcatgccaaatagactcatgaacttggctagataatttattgtgatgtaaaaaagatgtttttataatttctggcgatgtaaaaaattatgtttttatagagtgcaatgtaatttactttcatatgtgcaatatttatggtactttactaaattgtcatcacatttgatcaactacgatttatgttgtacgtctcatctgttttctcctttttttttttccttattgacaggttgtgcaggtcgatgacatcatggctttaatccatttggtaagtatatatgcggttctatgagcaacgaccgaaattgtggctttcaaggggtgtgaatttgctgtgcaaaattgtggcatttgaactgcatatatgtgttgttggggatctgtgatgttatattgggggggtgatgtatctgtgatgttatatgcagtgatctgcatatatgtgttgttggggatctgtgactggaatatatctgtgatgtttctatttttcagagggcatggctagcaaatcctgaggctagccaatatttagcatttattttttttctggaattaactcatcagtgacgggtcagaacaaaaatccgtcaaaggtaacataacctgtgacggactagcaaataaaggcccgtcagaggtgacctacctgtgacgggcctttacttttggggccgtcacaggtagatcacctgtgacagcttctaactacggagacctcaacctctgacggcctttatttaaagggccgtcagagatgagtcacctgtgacgggtcctaactcgctcaaggctagcggagaccaacacctctgacggccttctagtaacttgcccgtcagaggtgggtgtcacctgtgacggccggccacccgtcaaaggtgactggactcaccagtgaccactgatcactgaccatgcgcgaagccgtcaaagatgagggtttgggcccgtcacaggtgaccttggccagtgtagtgtggtctcttcatgctgaagtgcatggaacactggaatggatgaaagtcaaccacaaaattgaagcaggtatgtagtttactacaaaagcatgtatgtaaacccatcaattcaaatttaaggctaaaaaactacatctgcatactatacaaggtgatatagacatcttcagacgcaagctagcggcaattttggttggctccgtattgaatgataacatcaaaatcccaacatacaagaaataggcaggtggcgagaagggtgtttggccgggagaataataacagcaggatttacaaataactgcatctaaatatttcagacgtattcttatttttataatttaaacaaattatggatattagtatattcactgtacttggctcaattttgattaatattttggtgttagagaaaatattagttaggtgacaattagtactcaactcctgcactgtattactgttcaatgttcagaatcacgatgagtgatatcaggatattatgttttcaggctacattgttgcaatgtacgcatatggattttcttcatttttttctactcactcttcgtcctgctctattgctgctactggacaaaggccccagttttttcaggtttttattttctttcttttgggttgttttctgatggcatgatgatccaaatcacccatttcgattatttcctacagccgtgctttcagtttcatgaacacttgcatctaaatacacggtaagctttataaacctcatggctaattgtcagtacatagcaagatcgtcataaaaaaggattattctaatgaaatggccaataacatatcccacagggtcttttagttgaggagctacacaatgcatacaccaactgatagcagaaagtatagagcatgcaattacagtctggtacaggacacaattccaaataatataattgtttcaatattcaccaatggccagacgagcatatcatgagacttcaggaccctcaagttttagcactatcaaggttttcttcagttttgccacgttggatggaaaagactgtcccatctcctataaatttcaaccacagaatgtcagtcatacaccgccattgattacttattcactatatgcgcattcgcatgtgttacgccgataaccagtttgcaatctaacagaaaattcaaaatgcgaataccaactcatattttcatgtgtactactcataaacctgaactacataattataattcatgtacaaccagtaaattttttaacataaccatatttttatgtgtacaaccagtaaacctgaactgcataattataatttacgtacaaccagaaaaatttctgaacagaaccatatttacatgtgtagtactcactggttgcagcttacaaactatacatgcaacagtcacagatcattaattagttcaatcaaaattaccagaaacatactatatatatgacctagcgaggagtgatagctactggagtactcaaaataaatgagtcttctacaggttatatcaacatatcttgtatatattcacaccctgaagactgaaaaggtactgatctccttaacagaaaataaacagcgtcccagagcatgcccacggcgtcgtcattaaacctccacagacagtagaacaaccaccgcgaatctacggaacgtcccacccgcgtcagccttgatggcgaccacaacctcccttgccagcgcgtgttcctgcttgtctgcgagggtgacgtgcataagcacagtcccctccacctgccgcgtgatgtggctgccgatgaagcggaggaggcatgcagcagatgagacgaggaggagctggtaggcgagcgtggggacgtcctgggcgtcagcgatgaggagggagacaaacttcgcaacgaaggcgggttgacggaagctgtaggccgcgggtaggtcgtaggctctccgacctttcattatatttaagggataaagtaaataattcaagtcatcaaacaaatataataaaatatccgacgtcttaatagaagaatattgaaaatattgtggggcctttaacctgcccgtcaacttcaaactgagatgcgcccgttaaacaactcgaaggccacgaccagatgtgttacacatttaggagacttgacaaaatagctaaagatctacaacatctcaaatattcttaactcatactcatatgaatctaattcccagaatgtgcactagattcacgatgtgcactagattcacactttcatcttaagcatggacatacatagcaaacacatttaagacgaaagggacttgaagacttacatcaacctaatagttacataggccgaccggccaaatatatatatgagagaacaacggaaacttgtctacccaaaccacaagcacaccgattaggggtttacccccattaagttcaagtcctagaagaagcagacgattacccgcgtcactcgaaagactaagtctaagacctacaaacaaatagttaatccaatagcaagagtcagcacattattagaaataacgtactggcaagcaccaagacaagtctaacaccctacttgtaaggcatataatcaaggaaggtataatatggttctttttagcataaagcaagttttatttgcataaaacactttcaaatcatatttactttcaaataaatttcagcaagctaatacttagcatatggacatcaaagtaggcattaatcatgtgtaaatatgcacctcattgccatccatggtagcaaggagatcattctcaaatctcaacataatttgaaggtaaatttcagcatttagaagaataaacacaagtcaatactcaatgcatatccacacgccgctcatgaccacgagcatgtctaatcgattagtttttactctgcagagtttgtatactttacccacatgatacgaaataataatcatgcaagagcatggtacgatttattacctgcaacaaagctgttccaaaattcatgatttagacaccagcacgatacatgtctctctatcataagccatacacattatatgacctagaactgttaagtggcgggcccacgccttaaacttaagtggcggccgcaacgggaacccaccacgtggcacaataccattgtattgaacagacttagtcacctaaactaccacgtcggggtaaatagaaagttcatctgagttatccgaactcatacacaccggtctaccagaatgtaaagctaaaccataaataatttagtaatcttgggctatcccatactagcatatgtggttgtattgtatacgaaatgaactgacattgagtgaagtccttaggacggtttgggcacactctccccctatcggtacacaactaatcaccatatatgcaccacttgagacccaaacctaaaatccatgttttccatcattttatttgtcaaatacttcatttaatcatctttgtccagaatcttaataaaatcattttccatgttaatatgagcccaagagataagtaaaactattctaagcttggctaagcaatataagtaaactagtgataatgtaactcatattccaagtagtaataggatataattcctaattaaggttaggaatgagggatatggatatatgtgaggttaaggtgataatgcaagtaatgggtgttggtctaacaagtttaacaaaattttaatttattagtgtacaattgacatgcaagatttgcaaacattttcaataacctccaaaacataggatcaacttgatcaaagagagagggaggtgggacttgccttgtaactggaaaatgtcagcacctaaatcacttcttcaccgcttaagaaattatctatataaagtacacgttatgccattaaacatcgaattatgcgaaaaatccaaaatgctctaaaatgcatgatttgtgcacagtggatatgtactggtctaagatgaatttaggtgaaagaatttctattttatctctttttatttgtgaattatgaattttagaagtttacatcggtatagggtagtatttacttaggcagtttataaaatatttttgcaaagtgatgtttattaattttgacttcacagaggtgtaaagaagtgttttctcaaactaacacatttggtttcacaatttttggagttaatctgaattctttatgtattttacaagttgtaccgtgttatagacgtatagtgtctatgtgtacatggctttggagatttaggtctagaacttgctccatcttgctagttatatttaaaatgagtattttagttaactaatataatcttaattcataattttagagtttatattattttactacacattttataaatagggatgttctatgttagttatttaacataccaacctagaaattgttatatgagttaagtttgcaaagtctttgggaattaaggtttgaactatgacctctctggtctaacaagttttattttggtttattcatagctagagtgcattttaaatatttctatagatatattttgcttaaccattactaggtgattaactcctaggttatctatttaaagattagagctataacttagtacagaaaattccatatttcattttactatgttgaagctcacaatttgctggttctatagaaacttggttcactccatttggacaaaagatgaattggttattacttgcataaatatttagaggcttttgttatacattaagtatatacttttattttacaatctggaaatacatattttggtggttctacagaacttaggtttactcaaaaaggatataagatgaattttatataaacttctaaagttcaggttatgtaaaactagttattttaattataatagtttagaggcatttgatgtaaagtgtgtatatgttttactttagtttgtttttagagaacatgttagtggatctgtagaaactaagtttgctctaaaatgagttgaaatgaattttgtaagcattttataactttatgcatgctttatgtataatttttcttagataaattttagaggtgaaatgtgtactgtgagtgcaagtttttatttcataaccttaaattcataacttggtgagttcacagaaatttgaatcatctcaaaaagagttatatttgattttatatggattttacaagcttgtgcatttttctgttaaacatatattagtttgagtatttcttttatcatttcccagattttaaaggatggggtccacgtggcagtgagagaccaatatgcagaaaggtccctggggttttagaaatcaacccgcgatcctgtgactgttctctgtgtgaggtagttttacaaagtagtacctaaagttttgtttcttctccacagaggtccctggttcgagctgaaacagggctagccatggctgagctcgatctcaagcttgccagcagcaaacggtggctcgtttgaggttgaggtaaaaatatgaaatgaagagcacgctctcgcgattccatttctctacttttctcggattgcggacatcggagtaacgccggcggcgagtccgagcggcggctgtgcacaggctgctactgcatgtgcgcctatagccatgtagtgatcaaatggatgcatgcatgtgtttatttcatgtactacgacgctcaccgaagcttgatcgcggcttggagtggcttgaacagcggtgacagtggagaagacggcccggcggcggcggaaatcggcatggcaacggtgacgatcaccatccggtctccgggctgccagaaaaagagtgaaacggctcaaagaccatctaaggatgctacacgagtgaggaattgcgccgaagctcacccgggatcaaggaatcgacgaccacggtcggcggccggagttgaagaagaagggctcgatctcctcgatggcgacgcctcagctcgattccttcgatgggcttgctactggcatcttggcaactctcgtggcgcgacggttcggcctaagatccaccggatttgacgggaacagcggcgcgatccacggcggcgctccgggcttgctcagaacagcgatggcgaggtccgcgttcccgaatatccactgcatgaaatcgactgaacttaagggggatggaaccagcactgagaggagacaagggaacgaacaagatatcgagacaaccgcggctcaaacggcgatggcgacggttgtcatccttgcggccggcggcaagaacttgagcggcggagaggcagaggctctccct

SEQ ID NO: 14989 - DNA, 3297 bp, Oryza sativa
ccactccccccgcctcccctcgtttactattggtcgccgattacccccctcttctcctcctcagcgccgccgtgccaagaagccgccgccgcgccgccgtgctgagaagccgtgcgcctgccgggactcgtcgtcgccgtgtgccgcctcctctgctcgtcgtctcctctccaggtacccctctctctctgatgcccatgaatggaatggtgcagtggatggatgaataaatgatgcaatggaatggatgaatgaatgatgaactttggatgaatgatgaactttggatgaatgatgcaatggaatggatgaatgaatgatttaagtgccattttgacatgtaaccattcatggagtgtgtaccgctttatatgttgttttgttcccttttgctagaactattgaattttggggataatgtttacatttagctgaaaaaggatggattgatagattggcaacagtgtttctagcttggtagggtagctagctagaaatagtttatctagctagctagttaggggttatgttcccttttcctataaataaagcatatacagggtttgaaatttagttcaaatggaaaatacaaaatgcatggggagttttggtggattggttagtgtagtccatggacggaaccgacctagtcaccaaaatttttcatgcattttgttttctgtcattctttgataattaaggaactttattaggtttagggtttgaaatttagttcaaatggaagaattgattgattggccgcagatttaatgttgttccgaggttatcaaaccatcacagaatacaaaatgcatggggaattttggtggattggtcagtgtagtccatggacggaaccgacctagacaccaaaattctccatgcattttgttttctgtcattctttgatgattaaggaactttgcagattatctaaacttgtggatttatataccctttttgtctatgaataggtgaattgcatgaattgttgtttatatacatgatttatatacccttgctgctgctgccacataaatgattgtgggctgttttattatctacacttgattgaattgaatggatgaattgctgtttacatgaagttagtagtactgtctcattttttttgatgaaatatatgcatatttgagatgtgaaatatatgaggtgatgaatttggactatttgtggatgaaatatatgcagtattagatgaattagtctttttgtattagatgattttaggattaattttgctgcattggttgaattttgcatgattttaactagataaatggccagtgatgttttatgttaatacacccctattgttgctgcccctgtggagtatctttgcccctgttgctgctgcccaatgtgttccttgttaaatgcccagtgatgaattgctcaataagaacaaattatctacacttgttttttttttatgcataagaacagattttctgcacttgctcttttttctggattgataagaggagactatatacacttgttttctgtcattctttgatgatttatatacccttgctgctgctgcccaatgtgttccttattaaatggccattgatgaattgctcaataagaacagattatctacacttgttcatttttttgcccctacacttgttcatttatatacccctgctgttgctacccctgtggcatatatactcctcctgctgctgttttatgtcaatcatgcaaattctgtacccttgctgctgctgttttttaaatttgcatgattgattcagtggttatatacctctacacttgttctttttttatgcataagaacagattttgtgcacttgctctttttttatgcataagaacagattttctgcacttgctcttttcttctggattgataagaggagtatatctagacatgttgttttagttaatttgcccctgctgttgctacccctgtggcatatatactcctcctgctgctgttttatgtcaatcatgcaaattctgtacccttgctgctgctgttttttaaatttgcatgattgattcagtggttatatacctctacacttgttctttttttatgcataagaacagattttctgcacttgctcttttgatgttatgattttctcttttttatcccttcatgcaaatgattgtaattgatgcatatttctcagcaaaactgaggccatatctttcatagtataccccgtattacattggatctaatgctatttagtctaatggtaggaaatttataatctttttcgcgaaagttaaaccatgtcaacgcccggcgcaaacccgccctccccaacacctgcgaggatccaggaagaagcaaacccagccacagaggcagttgccgaaggtcatcccgcgacaacggcggtccaacaacccgaaattcatggtaatttataggataaattttcaccacatgaccacataaattttagctagcaccccttagcaaatattgccttctgtttgtgctgcagaattgccgcaggaacaacatacgtcgatgtcgggcgagacaagtgcaagtaggtctagtagaaatccgcggtcacaaaatatatggccgaccacagtgcaagttataagagaggttgacgctagtggtaggcccacggcgcccaggactgtcattggaagatggtctaactgctgcgggatagcggcacgtgagaacttcgggatcctccataaagatatcgggaaggtcacagaagccgagaaagagcgagcttggacggcaatggagaaatggttcacatttccagccgaagcaaaggataggctcaagcggaaggcattccaaaagatgggcaaagcttggaagaattggaagtcgaagctcttcaccgagtatgtcaacccgcccggcaatcatacgccgttcgatgaataccctcaaataaccgaagcggtgtgggaggaattctgctctctcaagaccacccaagagtttagggaatccagcgaggcacatcgcgtactgcaacagcggaatgagcacccgcatcggctgggcaccgcagggtacatcggcaaggaggcaatatgggcccaagaagatgcagccgctgcagcagcgaatgtacctgccccgttttcagacatccctgaacaaagagctcgcaactgggcgcgggcaaggggtaaggtcaacccggacggctctgtcacatttgagaacaaaagtgatgccgtcgtctatcaggaactggtgagttcactacttaacctaactaatttccgttcgtataaagtacaagttcg

SEQ ID NO: 14990 - DNA, 2935 bp, Oryza sativa
ctaacagtgtaccggtaatttcaactaatcagagagctcaaagtagtagagcttacctaacttctaaatttaattccagaagttagggtttgaagtggagttatgaagctggccaaacccagctccacctctctagttcattttgtgagagagctccaccagctctactcccattttaggtgggctctagctccaagagagatggaggtagagctggagctgtgccaaacaagcccttcacatgtatatttatcgtactattggactgtccttttccaaaaacctttcatttcaattaattaaagataaaaaccaagatcggtccatgtcaaggagtgaacattattccttctaggaaagcatcacaaaaatcaaacaaaacaccaaaagtatattaaatggctagtggtgattcgtttttcttattctgtttttaaagataagaaagagttgtagagatttagctgtcacgtgcatgaacgattcagccgccaacatgatcttttgtctaggcctagtcatagcgtcttcgtcattgtgaaaataatccccctctcgcttggcgtttaagcaaggccatgaaaatcactgaagcctcatcgcttgctttacagattggcggaaccagcgacactagcgataagcgatactgtcgagtccaggcaacttatagattttttcgatggccagccatttctactaacaatattataggcaatcaactatgggtatctcagttggccagccattttactagatattgtaggacatcaaccagggatacctttaaatttcggttgcagttaataagccaaaaaacagacgataggaggcataacaaatatatggatattttaataatcttttaagaaacctatatatttagtgaagcaaaaacctatatatatttatatgtagttcatatatccggcaactgtaggtaatgttataattttttatccgtcatcaagagtcacatgactcacatcggggattttaattatttgtcacttttaggatgaagtttaacaatttgttatttatagtctatgacatgcgagccatcacgtgtctacgatgagtccagcaacgaatcattaaatgtcacatctaaaagtggtaaatagttaaatatctcgctcatatcaacttaattatttctatcccttggttgtgtaatctataattcaaattgtttcctttcatttctttctcccctgaagtcatgtcgttcaattctttttatttgaataaccgatctatattctatatttaatctaaattgtttatacaatttctaatgattgatcaaagcgttaattatatgaagtagataaaattttatgtcgcttagttagaaaacagattcatcttatactttatttctaccattattatacaatattttttagcaacttgtgggccgggttcctttcttcaattttcagtttaattaaaaattgataaaacttcaagagaaataaaactagcttaaaagcatgagcgcaataaatataaatccttcattataatctcaatgcaagaatatttatacaactataaatataaatatatgtaattaattactaagatgcaaggcatgagagtaagcaggatttatagagattcggcaaaataaatttaattaagcatgagttctaaagctcttctcggattggctacttttctcgtttactgtaagcatgttttcctaattgctaaacgttatattttaaaataattttatatagattttatcgacgtttgatgtcgcgattccggtatttgcatggtatggggatcgtcggtactaggatatacgcgagactgaggtaaaagagacggggacgaggatttttatacaggttcgggcccctgaattgtcaggtaataaccctacatcctgttggccgaagccagtattgctcttattcactataatcacaccagtacaatatttggggtagcctatctaactgttgtcgacatggcggtctgaaggtctgactcgtagtcgacaatagggtagtcttcctcctcgagttcgtgcccggcgagatcagagatagcgttttcgtctctcctaacagtatccggagacaccgtagaggactagccgtgcttatccctgaagttgatatccggcatcttgtcttggtgtatgttggcttgtatgttgtggcttctgttgttccatgtatgttgattgtccctcctctcctcctagagggccttgtatttatacccataggtgtctccttgtccaagtagaactagggaaaccaatatggatataatccgagtagtacttatcgtttctatgtagaactctggttgtctttccttatccggaactccctcgaggttagtttccatataagacatggtatgtggtgggtcctgccgagatttagtcaactattattaggtatgtggtatccataaccctgacagtagcccccgacttcaatgcaaatgaacggattcatattctcaactgcagaccatggagtaactgttatcgagctcacgtgaatgttctcggtgagttcagagataacgttagacttcctttatcagcctcatgcgggcacctaaagggtttgtctgagtcaatctccgacgtcgaccaagaaagtacagagcatacgactaattctcccgtcttgctgtaatcgagaatttggattgaagtcaagaaatttatctcggcgggtacaccatctcttcatttcgtattccttgtcgagatccaccaaccgttcttgagtaatcgagtaggcatagagtctgcgacggagccttgtcaacacttgtcgtactcgctttagtcgatcttggtatagaaccatagagacatggagtcttcgataatgtcgaatagaattttcctgaaatccatactcaaaaaagaatattagataaaaatagcccc

SEQ ID NO: 14991 - DNA, 5065 bp, Oryza sativa
acaccaatggaagtttgcgatgcgggagattgctacgtactggttcgagaaccagcgagcgagtagaatcatctctcgaacaacaatggagattgtggtacgggagattgctatgtactggttcgagaaccagcgagcgagtagaatcatctctcgaacaccaatggaggttgcggtgcgggagattgctacgtactggttcgagagccagcgagcgagtagaatcatctctcgaacaccaatggaggttgcggtgcgggagattgctacgtactggttcgagagccagcgagcgagtagaatcatctctcgagaaccaatggaagtgctagagttggtttattacatgtgcatctcatgtggccagcatgactcacacacccaacttgtagcatatccggatgtccgttcgcaatcatgtcgggtgatcaagccgataacgttcacgaggaattatccgttaacaaccttttcttgagtagtccagccatggccggtgctatgagataggttgtcggtcttcgttggtaggttgggcgcggactctgcatttgtcgagattgttctcgataatgcggtgtacttgaccacaacctactcgagtgctcaattgttcctgaataatattttctagaagacaagatatatagcagataatatcgagtatgtactaaaaaactacatgaatcttctagtattatcaggatataacgagcagattaaatatcagggcattatgtaaactgtaaacaagcatgatttatacagaagaagacagagcgagcctccagcgttagatcgcagtcgatttaacatcggggacacccgcgcaatagttattgtataaaaaacatactctaggcaaacataataaaatttggatctgacaatattatatagatcagaaaagtaggtacggtaaactgaatataaaatattgcatacctttatagatatatgccggatatatctacgaaattagtagatcaattaaattaattaatctactaattaccttgtaccaacaggaatatgcttgattgaaattggattaggcattaatctcgattagtatgcttcggataattatccatctcgatctcctggtttgctgcataatattcctcttcctttgtactgtacgcatgcatatgtgcaggcgttgactgagttgggcttcgtgtgtacatgcaatccggtaggcgtcggtgattaaactcgttaaccgtgtattggtcggcacacgtggtctagcaagtctcctgatcatggcaaacgatagttgtccgactcccacaatgcatgcgagctcacgtagacgtctaggattccaggagatgagtcgtccaattccatgggtgacggcggcgatgattctgatctggtcggaaaagacactccggttgagttagatctttccatagccgaagtcgtcgagtagttgctagagaatccatctcttgaacccatctcgtcgaaatcctgaagcaccaaaatccccctacctggtgcgccactgtcgacggtgggtacccgtagaccggatatagagggtattggggtacgctggtacgaggatctacgtggtacgacatcaagaaaacaagagacaaagattatactggttcagaccccttagtaggtaatagccctaatccagtggttttgggattatatggaaagaaccacaaattacaaagggaacagtagaactcggcgataccgacgagaccgtagtcgagttgattcgactagatcacccgacgacttgtctcctatagtctccgacttcgtaggctgtggttgtggtctaggctctgagatccgatcccttaggtcccctggggggtcccttttatatcgcagatcaggcggtctccaagtaggactcggagacatcggaccttgcacgatatagtaacgacccagtcctatacgggtaggaacctttccactggcagacttcgtgatggattcccttagcgtgttcagagggcgtccgtatatgcatcgatataccgcattgccgtgtagcatacatccaagggtagagggtataccttatccgtaaccctgacagatttttttaaaaaagacagataaatcaattttataagtttgtactcaattaatcatatactaatgtctcgtctcattttgtgtcactaaaaggctaagaaaaaagacgtgtctggtgtattactatactaaaacattggtagtaacaaaatcttgataaattttggtactgccaatgttttgttagggtagcattgaaaataaatgtgtttggattgatgccaattaggagccaaaatttatattatggtgaagaaagttctaaaatagtgccaaattgagcatgaacattatcaaacaagcttcaaaccaaaccaccacatttactattcaaactgaaaaatttgtagggcatatttgacattgatccaaacgtttgtgcatagctcttctttctttatattggtcgatcagtactgcttccaaattggagtaatcaaagacttatcttgagtagagagaattgagacaaatatttgacgcagaataagggaaaccgagccattttccatgcattgtgggtatatatatatatggatctccaccacatatttaccccttccgttgacataatagaccaaatggctagtttgtaacaagaccatggctccactttcttttatattataattgattgatacaattttgaatttagtttggttatcctttttgaataattttaggcagctcattttacatgtcttacagtactactccctccgtcccaatataagtgcagttttgcactattcacctccaacgtttgaccattcgttttatttaaattttttttatgattaatatttttattgttattagatgatagaacatgaatagtactttatgtgtgactaactttttttaaatttttcataaaattttcaaataagacggacggtcaaacgttggacacggatttttattgctgcacttattttgggacggatgtagtatcaatcataagggagttgggcactaaaagcaatgaagaaagggctaaaaactaatccataatattcaatcaacttaattatttatagatattattaaaagtttaactatatgatagcatttttactgagaaatctattaatttatcttcacatatcaaatctttttttttcatatgttattgatttaatatttttagatttattcccttaaaaaaagggatgttgaggttgaagtacgacatctatttgtgaacatagcaattaagtaattatcattgtagatgtaccagtggtttagtcttgctgccacttttgtagtagtttgtagcgtagtaatctatgatttgaaaataccatgtgttaattttttgacttggctacccgcatgcggacaaggagacttgctaatccatgttttgaagatgaagaaacaggaatgcgtcattgacagttgacaataaattattaactagtttgtccaaaccatttggaaactacataatcaataaataggagtaccactagctagtttgattttgtttgtctgattagtgacgatttggcatctgcccaggtgtctatcttttacagaaaagaagaagaagaagaaaaaccactcttccaacctctccccggccatgatctgtcgtaacaattgtcactttactttttaaagaaacatacgtctgaaaactgccacgtttaccataatttattcagctgaggccacgtcttcaccgacattgctgtaaggggtgaaaaaactaacatgtttggttggctatcaaatttaatttagttttgctaatcaaaagtgtgtcaagccatagattttgtggcttaatttcaaagtaagaagctgccaaaaattaaatgggctacctgcctcgagcggtagatatgtcatatgttaagttgcttgtggtcaaatagttgccaattggtgatgaagaagtttctgttgtggtttagttaccatctccaaaatgatcactgtaggtaatggcagaagcgtaaacaaggagcttttagaaaaagaaatattaagcgaagcaaaatgatgagatagaagaattctgatttcatctttggattgcattcaggacaaatgtgtcgttatggattgtcatttatcctatctttcatggaacgtatcatataaatgcgttgcttgtcaaatctattatctaccgtatgtgtatgtctaatcactgttgtatggatcataatcctctcctatatatctagcgttgattgggacgggcccgacccccgagcgaggagggggcagccgccactctaccccgggtgccaccccctcgaggaagtgccacgtgggtctgggggcagcctcctccctccaaactcggtgccctaagctgggaagggggggccgccgctccacccaggcgccgctctcctcaggggcgccacgtgggtttgcgggcagcctcctccctctaaacatgatacccctggacccatatcaccgacagtagccccccggagttagccttgaccaaaaccttccccagatggccagggttgacgccactctcctagtctaatgatatgtaggcccggttttctgtcctgtctttctgggagttgggcggttggagtttagccacgttcatacgttgccttaacttcccagttccttcccggtttccgaggcgctgtgggcacgggagcggaaccgatacacatgggttttttgctcaaaagaccccatcctctccatgattcgctcctaccgagccctagctcctctgcttttcctttttcgtcgccaccaatcttctcctttctttgctagcactagggcccatgcgcctttttcgcctcagcttgagggcgactctccagccgtaccttaggttgtgaacttattttctatatatatttagcaaacgttgttagattctctcaggcccacgacctcatgctgcacgcctcgcttgcccctgccttttgttaacctctgttcatgttctacttcatctactcaaacgattattttcacgtgtgag

SEQ ID NO: 14992 - DNA, 56811 bp, Oryza sativa
  unsure (1)..(56811): unsure at all n locations
atgtggaaacagcttttgttaatcatcatagtacgaaacaaccatcccaagctaagaaaaggaacatgcaactatatattattaaccagaagaacagaagcaggttaatccggtcttgagaaatttattatcctaacaaggcacggagaaatcccataattacactgctccacgtcccagtcgtttcccgggtctagcattcggggtattgactacacgctgaatttagtgagcaggtcatcccgtcaagagagccttgcggatgacaaatagcaaaagaacatagattatttcatccataatggtgccccagcagacatcatagctgattcagtgatagagcttgcccagatcatctttgaatttggtctttatctgctccctcttcagtttaagtgcagctgtcaccagcccagactctggagtccatggttcaggcagcaacacaatctttgctggtatttcaaacttctcaagcctcgctgcttttgcagcctgcaccgttaaaacacattgcgttagatatcatggagaatgatggtatgtaattaacatgagtataaaaatcatactagtattatcatttgcaggttaagatcgccttagattacaagtacattaatcagcaatctgaatgacatcaaagacgatggattgcttataggaatcatctgtcatctccatcgcgatgcttttttaagtactttgtcatgcaaacataaactgtattgcactcatgtgatagcaaaatcctctgaaatccacagtaggtcggtctccttacattagtcacaggtcatctaatcgccaggttagtaaagacatacccatttcgtgtcataaatctgtgatgagctttggctataatcaggataacacagcagaaagatcaatgtgctactagttgttttcagttatgaagatactacaggctccaaataatttgaagaatacaatatgttcttcagcataattatatcctagtagttctataaacaagtctactgcatccatcttatctgttgttgtactcactgatgagcttgtaaaatccatcagcttttgcacttcacctatgttctttcataatttatatctttcaaatgtaatccagaaaatggcattgtctaatccatgaaatgaacccatttcaaattaaagatgataaaagaatttttaagtgctcctttggatattgggaaatattcctgcttcttctgggaaatgaactactacaataaaattcctgcattttaaaggagccttgaaattttaaattactttaaaaatagaaatgaaaacagtggggatttattgaatttctatgacatataaaacggacgattgattagagttctagtgcaagagttactgataatttgaatttcattttgatttctgaaataaagatggacactcagtttcaatagatgctcagataatgaaaacaaaagaacgttaaattctagcaatagacagctgatagatcaagcagacaactctccaggagaaatgcaagatcatactgatgtaatggtacatagaagtgatcaactcaagtctaacctttgatagagattgctggacctccttaatggcttgatcattgtggcacagctcatcaaagtttttgtagttaatcccagaattttgagcccactgctctaaggcctggtgcgccggcactaccaacgccacacaataattatgaaatggatcagcataaaccattatgctgtccacataattgctagtagttagagctgattcaacctgtaaaggccagagagaacgagagagagagggggtttaatataattataatacaaaaagaatacccataatggttgaggcactattgtaaccaaaccttgccaagagacacatattctccatgctgaagttttactatatccttttttctatcaatgatctcgaggcacccatcaggatggaactggccaatatctccagtgtaaaaccagcgcattcccctctcatctacctggagtaatcagaaacaaaaattgaagtgaaaaatattgtatttgaccaccaaggatgattggcaaagatcctttaccttgtagacctcatttgtttttgcttcattgttgaaataaccttttgttatgctgtatccaccaactacaacctctcctcggggcattggagaatcagaaattttatagccaccttcttcccatgaaacgagctgaattcatttgatcagaaaaaagagaattagagatacatatacaacatgataagagaacagaaatatctcacaacagaatgaaatgcttgctaataaaccaaccaaaactattgtggtattgtaaaataattttacagactttctgtgtgccactttaagttttagaatggggatgttggtcattcttaaggtaacaaatttattgttgtctataggccatttttcctaacatcaagatgaacatacagcaactcacataatctttatttgggttgaaacaaaataattactataacttgaataaaagtgagagaaggggaaggggaagacttatgtattgtttgataaagaaagagagtctaatcatccaaaatagtgtagcttctgaacaataggatcaaatagtaagagcatctctagcagaagccctcattttaaagcccctaaaaaccaaatgagggctgcccccaattctctaggaccctacaaatgccttcaactccagcaacagcccccatttcttagaccatatttattattctctattatattaatatagactataggtttatgtctaatttaacatctcaataattaaaagataaatattttacaagatcatatcgatgtaaaagttaattatcaggtgcattatgcccgaacagcataaactatagagtatatatttaaccaaactactgaaatattatcctatatgatgtgtcaaagaaaaaaatgaatatataccactgtctctttccccaatcctgtatatctcgacccaatggaaaaataataatctttccactagaatcctctatgcctcagtaaaaaaaatgcaaagaaaaatctactccctgcattctgcgtgcagggacattgcaggggaaagcagacaggcagaagagggacaggcggggatgggctagtgggcaagcgctggccctccgggtggcagcgccgccagcgcgagcaggaggtggcgcgggttggcaggcaaaagagctaaaatcagtgcggtgattcgcagacgtgcgagcggatggcggacctttctggggtggtcttgccggaggtgaggggtcaacgacggtagccggaggagatacaaatgcatcgcagggtgttgtgggacagggaatgtgagatgagcgcgcgaagggaaaataacgtctgcaccagaaaaaacgtcgataggggccatcctgttgagcccccaggactgggggtttcgagggaggattcaggggcctcctcactttggggtctatagtagggtctctgctggacttgattttttcatgttaactctcataatttagttaggggctgggtttagggtccctgctggagatgctctaaggaagacgtattatcatggcaggccagctcatgcagatagcaataggtgtataatattatgtagtatgtcaaaactgataaaaaaactatatatgtatgaacggtatatcagaagagagaatccataggtgtatggaactatttccacattgttatttacagttacttttgactggttattaataattaagttgttgtctgttgttatatcctcatggaaatccccagggtgataaagccttgtgggagacatgggctggtagccttggtcggagaggtgtggggccgtgagacagtaatttctctctaggcatagtataaacagatttttaccattttatgtatcttaacgctattatgttcatttaattataaatttgcatacataaatatcacttatatctgttaattatatgcatatacatcagataagttgactgtccctagtaagtataagcaaataaatcagataagctgactctccctagtaaggcacagaccttgacatagcaacaaggaaggggtggaccaacacggcccacacttgtgtcatcccattcagaaaaggctgctccagcacaagtctctgtcaatccatagccttgacctactggtacactgcagcacaggtaattcaaaactgcataagaaccaaaaacaaatgcagcgacatacaataaaaggaagctcatcacattatagcatagtgcatgtactctagaaaggtcctctgtttaatatttcaactttcagcatttgattcactaaacgtgcaaatacaaatttcactataaagtgatttttgacaaactgtttgaattaaaaaaacatataagtagcacgcccaaattttatgagcttatccaacaaatgttttgttttctgtaaataaataaatccaaaggtttgatgagcgcactacctgcaaacgtacactctaacaatgtctaggacttgagtatggcattgaacttgaattttccatgaggtaagttcattaaaatcagtattttttttagtaacgtcttaaacaaacttaagatgtacaataagacaaaaaaaaaagttgactccttgtatgtttttggaattcatgtaattctagcctcatttttcgaagaaaaaaaagataattcaagtatccgagaaatgacactatgctctacgactggcacacaatcttcaacaaataaactcagtggaaatttttggaagaatacttcttcagttgacatctcactgattgcaaatggttaaatttaagataatccaaataggacaaaagaaattacccaagacatatattcataaatctttgtgtgtcactcgatagaggtgcaccaccacaaagaacaaatctaatgcgcccaccaagcatggaacgtattggtttaaaaatgaggttatcccatatcatcctctctggtgcccaggatccaaaccaacttccttcaatagctccaagatttcgtttataggcaatgtcaaacagctttttggtcagaccacccttctcaccaacctggaaacataatttaaatattaagttttgagatgagaagtatgtttaaaccatattttggtgcatgatcataaaatttgaccgttcaattctgcctgcatgatacatgccatttgatgcaatgcatttaaaatattaagtctacagaaactcattgtttcaaacatgtttccagccttcggtttcatcatctgcttgttggcttatcagccacaaccaatttgaatttgaaacttaattttagagttgaatttggggttttctcatcatagtctattctccagccttgtacctcccatttttaatatatgatgccgttaactttttgataaacgtttgatcattcgtcctattcaaaattttagagcgaatataaaaaaatttaagccatgcttaaagaacatttgacaataaatcaaatcataataaaataaatgataattacatattttttaataagaagaatggtcaaatgtatctcaaaatgtcaacagcgccatatgttaaaaaacggagggagtataacagtttaacccaaaaattattttcggttgcttcattttctatggcttatcagcctcagccgaagctcagacttgtatgctagacaagacatgaagcgtgctacggtatggtaggcattataatggctagggttgggaaataagagatgcagaccagagcagtgcaccaaaactgaaggttgtagtgttgtatgataccaaaaacatgcatgttatactatgctagaaatggctggggcctgcacttgactttgcccattgagctagccagaacatcaatttttttttttaagatatgcctggtgtaaggtacagaaaaatctacaagttgctaggctgctagatgtgcaaacgacaaccaaacagtgcatctatatcctaatcttaattccttaaaaatactgaattgggggtgatagtgtgctcttctataccccaccaagttgtgtggtcaggtataagtggtgacatataaactgtttgcagtatttaggttttagctgatcccatatggcatgtacatccattgaaatacgtgggcacattgctagcagtagcactcctttaaaaataaggttgtggtggttgtgaatccaccactcaccaactctgcactgcaatttttatgaattgctgccttcatttccttacattacaatacctcaatatcccatatgttgtttgttcttatttggccttctaaaaattagaagttgacatgaaaatgtccaagatggaccaatgtatatgtggcatgtgcgaatacagtcaaacattactaaaacgaaaaggaaattaagtacatggccatacagataacgcttaacataaaacaatattaggacctgtatggttcaaaacttttttctttagtttattcacaggcagatatttaaacatataaatgattaatgcatcaaaggcactctaaagacatgttgcagctgaatgcaaatggcatataaaagattgcagaactagtcaaagatggaaagataatggtgtaaactactgagatagatggtatgagaggagaatcttgaacctttttaaacacggcatctctgatgcggtctaaaattgcagggactgaaatcataagagtaggcttcagtgcagaaacatctccttttgtccccttctttattttatttgatgtatctgtcatagtcagagctgagccatatccaatggcagcaccagaagctaacatgacagtctggccaaacaaaacaacaatatgtcatagaaatattcacagttcttaataatggcatctctctcaattgcaaaagatgtcacctctgctgctagttcaaagacatgagccagcggaaggtatgccagataaacatcccctgtgccaagttttggtatgattgtcatgacagctgcagttgtggccaccatatttccatgtgtaatcattacaccctatgtcaaaggaaaccataaaactggattaaaagaggacacaagaactgcaaactcaaaagtggttgacattgtgataaatgaaagtacatagctgtggatccacaatggattgtaattcaagtttgcacaaaaaaatatgcattatgctgatcattttgtcaaaaagacgaacgttgtcacactcatgaacagttaattcatatattttatctatacctgtttttcctaatccgaggaattttgagttgtttgtgcaaaatgatgttctcgttatgaatttcaaatttgagcctttttcgcgtatcaaaatgcatatggtttctgaatttatttttttttttctctgaatactagagtcaacctagagatccagtggttatagagggtcttaattgtacattggaacagtccatggatctctacatgatggtgaggagtggatgaagcagtgatggatcagtttggttcatcctgttcccatccttgttatccttccacaataagcaaagtgggtaattgcacttgcaaaaataccaaggaaaaaccaactttcctttggggaagagaggaaaagagagtatatatcaggaaagtgaatttaatttgtagaaaggatttaatgtcctgctttatttctcatttgtaaattaaatgggcataactgcatattatcataactctcaatgttgcccttaattatggagagcatcagttcaaaaggaagttatgtgagtacgttgagaataggcccaagagattatcataatatctgtcaagctaatgggctaataggatcgtaattctctatatcatacatcacttaagctcttgttcagtgaaagtaacaggatggtaggctcatcatgtgtgtacaccttcagatgaagcaaaaagaaaaggaggaacaagaaagaatgacccctgcttttgtccttatttattttcatgaataaaaatagataacagcatatgacagaaaaaatcagaatatctttgagcacaagtgtaccttgggaagacccgtacttccacttgtatacataataactgcagtatcagtgcttgaaggtaatcttgcatctgtatgtgatgttttacccaattcttcaacttcaccaaaagaaaatgttgtccagtgcttcatttgattgagtacctcagcctcaacaggttcatcctcaatatagataacatgcttaacactctgcaacttggaactgattgcaggtagcttcttaagttgctttgaatcacatatcagagttgaaacctgtgtctgaaatttataacacacaaaaaaaatgagtttcccatctactaatggttgctgtcatttaactcttctaaagtgtaaccatctactaacggcaattcagcatggacatgtgtcaaaattcaagaagttgaactctgcctttataactctcttaccaaaacaggtggatgcttgtagagttaaagattttcgctccataagcctcattcacagttttgcgatgttggtttcaaagatcttggcaaaccgtcttgctccgctgcttcctagtatggtttctattaatcaaagtgcttttatcaaagggagaagtatccatgataatttcttccttgtgcagcaaatggccaagtgtttgcatgcaagaaaagaatcacatgttctgttgaagctggatatatctaaggcttttgactcagtttcttggccttctcttttggaggttctacaacagttggattttggtcgtttttggtgcaacctactttgtttgctgctgtctacctcttctactcgggttctaatcaatggggagcctgaggaggtgattctgcaccgccgcggccttcggcaaggtgatccattgtccccgatgctttttattctagtcatggatgttctcagctcactagttgattgggtggcccaagaaggatggttgcaacctcttgcttttcggcaaacgcagcagcgatgctccttttttgctgataatgtggtcttgttctctaggccaacagctgacgatctctcagttatcacacaggttcttgatatttttggtcatgcttcaggacttgtgactaacatgcagaaaagctcgataactcccattaggtgcaatgaggatgagttgaaagtgatttctaacatgctgccatgtgaggtcaaggattttccttgttcatatttgggcttgccgctgaacattaagaagccttctaaagccaagttgcaagctcctgttgataaggtagcagattacctcccaatgtggaaggcctccctcatgaacaaggccggtcgactcatcttggtgcgggtggtcctctccgcctgagttgggcactacgtatccgttggttatggctccagaagacagatagtgaccgtgcgtggcaaggcctacccatccaggttcctcgcatgtctcataatctcttcagtgtggctgttgaatcacgagttgggaatgggcagtctactttgttttggactgataggtggttactaggaaggaatatcttaaaaatggcccctaatctgtgtatgttggtcgctaagagggtggttaaacgttgtacagtggctcacgctctcaataacgggaaatggatcacggacataaaagggcccttgactgtgcaagtgattaatgagtatctccagatatgggactcagtttttggtatagggctgcaagaaggcgtcccggatcagcatgtttggaaactaacagactcagggtcctacacttccaagtctgcctacagggccttctttgttgggactgtccgttttgctccttggaaaaggatttggaatagttgggctcctcttaagtgtaagttttttgtgtggttggccatttacaacagatgttggacggcggatcgacttgcaaagcgaggcttgcctcaccgggacgcttgtccgctttatgatcaggccgacgagacgatacagcacatcttggtttcctgtgtgttcagtcgacaagtttggtccttggtcctgcaaaggcttggtttctcctccacacttccgaatcaggatacacgtaagttttcgagttggtggtcaaggacagtgaaaggcttacagaagaatgagaagaaggggctcaattcgctagtcatcttagccatctgggaaatttggaaacatataaatgattgtgttttcaatagagctacgcatagtgtgcctgtggcaatccaagccatagctaatgagggtgcactttggtgttttgtgggagcatcaaaactccaagagctatttgcgaaagcaatagctcctgtaccataggaggtcgaagcgcgtgcttgatgttttgtgtgtttttgtgaggtgttattgttttgtataaccttggtaggtgggtgctgaggtttgctaaatccttcaccgcttgcctctttattcttgcttaatgaaatgatacgcagatcccatgcgtattcggaaaaaaaaaatcttctcatagagttttttaagccttgggaaacaatttgcatggttattgcttgaatgttcatactggtaaagatttctctcaagaacaaccaactaatgaagatagtttaggcaagacaggtaataaactgattaaacaatgtaaaccaaacagacaaaaatagtatcatatcaacaacatgaactaccatacaagcttcggtattacatttcatccaccaaacagttcgcccaaaatcttaaaagttgctgacatataaggatgacccatacttcaataaaatgtgtaaaattacccatatataaagaaaaaaaagaaacggtaggaatgtactagtttcccaagtggataattataagaatgaacataaatactgcacaaaaaagccacatatgggttgtacctcattcagtgaatgcaccagtgcatcctcgccaagagatgcatagatagttacaactgttagattttgtcgaaagcatccctgacaaaataaaacaattattgtcatacaggttcataggttctcacaaatgtatacagaaagccacactatttattataatcacctgagcagcaatgatccactcagttcttgtatcagcaaatattgcagcacgactatctcgttggtgacccaacttgatgagaccagaagaaaaattacatgcacgactaaatgcttctgcgtaggtatcccattcatattcacctaaatgcaatttctcgaacttcctgccatcaggtgactccacaaattctctattgattagcttccttgtgccaagacacctgtgtcgagggtattttttgctagccatctcaaataaagctgccattgtggtggcaccctcccatggaacttcaactaacatggaaaatctactgtttcgcatggcaagtcctgcctcaccacccacatcagcttgtactgctcttttctttccctttttgttgaatatggaagaaagcatgataggaataactacagcaagtagaatggcaccaataattccaggcagaccatactctttcaccagtggaacatcacttgtggcaattctttgaagaattgacatgtttggattatcgccagtattttctcccatgattttaagatttcatcaactgaaagatttcacaaatttcgctacaagaaagtataaagtgttaataaccgtcatgttagtatgttgcaaataagtaataactaatttcttctcaattttataaataattgccttgaacagaagaaatgagtataactagattagtgcagcatggagaatgctttcgcactacagtagcattctatttaacattatgaatcatggaaaaatgaaaaatactagcaatgaacaatatttagaagcactggtactcttcttccaactaacaaaattaaaaatgatcgtatggtataaacagattcagcagctattagacagccttgttatgcagagcaaaaaactgtaaagtgcagtaaaacagtaaatacttggtagttttaatctctttgagtaaataacatatccgcatctccagtgaatgttaaatggtattgctcagagcaccgcacaaattattttatgatgacaacaaaattcccaaaggtcaacttaagttgctaaaaagtacaataatgaaattgcttgtgaatcctgcagttgcctacttctacagtgagaacgactcaacattacaagctgactcgtggaagcaacagcactatcacaacaggttagcagtcaagatgatatgtaagattcagcacgaagcaacgaagttgacagaaatattttgtaagtggagtaagtagattagcaggaatcttatgacaagttgaagacttgtagagaagataattcaataaaatatagcatccatctctggtttgctcaaagggccaatatcttatggcaaggtccttcgaagttgcaagcaattacaaagggacacggatttacatttgaagaaaaaaaaaagataacatgatctcacctaagaaacaaggagtaaagtaaacaaccactttgtgcaaattagcagcggtaggagaggaataattgaggcttgaggaagaaccattgaatagggacattaattaaacggttaaagttataattattccttactctgtacagcagcatagtctgtgcgtgggatcaaaggaaatcaggggcggatcaaacttgggacatgggggctcaaacttttgggggagcaaacaaattaagaaagatctagaatagaagctagggttaacgcgagcaaattccaggcaaaagtactcccggtgggagagagagatgaatcagaaagaggatgtggatgctcaccccgatcccctcccctcccctcccctgctctgctcgccagatggagatcggcgcacctcccctccgttgctctgctcgccagatggagatcggcgtccggcgtcccctcccctgttcacccgcgactcgtcttggcgcaaggagcggagacgacgagacgagagatttctgtttcttttacgccaagggaaggaagtggaagatgctcgagtgctccaccttttgtataaaaagctttcaggccgcgttcggcagttagctttcccatcttataatacgcatttcaaattgctagatggggttgtttttataattttatataaaaatattgttttaaaaaataatattaatatatttcttgagttagttttttaatacttaattaatcatacgctaatgagctgctccgtttttccaaagagaaaggtttccaactcagggcaccgaacgcaggctgcgaacatggaaaacggtattgcccatgagtgtttgattaattaagtattagcttaaaatatttaaataatagattaatatgatttttctaaagcaacttttctataaaaattttttttcaaaaaaacacatnncgtttagcagtttcagggagcaccacgntngtgaaaaacgagaggtanaagttggaaaangaacacnagcctgttgggcacccacccttgctagcatttggtgcggataagtccactttgactccctcaactatagctctactatgattcatatccctgaatcgtaataccaggtatctcaccccccctcaactataaaaactggtgcaatttaacttcctcgttttagtgggtgttttcgctgacgttgcactttgacttgttccaatccgctgagtcacctagtgggacccgtatgtcagtgccacatactctcttctcttccttccctttccctcctcactttcctctctcatggaaataacaacatacgatggtgattaggggaggtcatcgttgtgtcgccaacccctctttccccttcctctcgtctccgtcggggaggacgaagcacgagcgagaatgacagcggcagtgagaggggaggctgtcgtcgtgccgccgtctctcccgtcaccatctccgcctcccctctgctgccctttccactcgccgtcgtcgaggagcggaaagcacgagcgaggatgacaacgatggtgagaggggaggtcatcattgcatcgttgtccctcctgccaccgcctccgctgctccctttcgttcaccgccatcggggaggaggaagcacgagcgaggatggtggcggtggtgagaggggaggtcatcatcacgtcgccgtccctcccacccataaccttgcatggggaaagccgccgcacttactctgccaacaacgcgtcatcatcgctctgacggccaccacgctctgtctcatctagccgattccgctgagggaagagaagaccggagtggcacgacacgccgtcgtcacctcgatggccaccccggtatgtctcgtcctacaccgctcatcccttccgccaccgcctcttcctcacctttgttgtcgccaacatgtctgatttcgccgagagaagagaagactggagtggtgtggcgcctctgccctgccttcctgccagcaatgatgagagggaaaagataaacgtcattgataggtgggtcccacaaggtgacatagcaggttagaccaaatcaaagtgccacatcagcaaaacagtccttcaaaaccgtctgagggagttaatagtcgagatatccgatattgcagttcatggatatgaattagatttaaccactaaggagtcaaagtggacttattcccattggtgctcgactcactaaggcctgcgtgactgcacaattaagaatgtagcccagttactcctcccccactgctccatccatttcaaattacttaggtcccgttcgtgtccactagaaatagttgataaaattttgaatatttgtggcacgcttttcaaacggctaaacggtatgtttcgtgcggaaactttttctatatgaaagttgctctaaatatcaaattaatctatttttcaagtttgtaataattaaaactcaattaatcatacgttaatatcaccttgttttacgtaaaacacttaatcttaatcttaatcttaatctttatctttaggaaaaaagaattattctaatcaaacattttaatctttaaccgttaatttctatatataaaaattttaacatcataagaattacacttttgacactatgagaaatatttttataattaacaattcatatgtggttaaactgaacataattctaaaaactaatgttaaacatagggatgtttcacttaggacaaagcctataactttaagtaatttgaaattgggaaagtagttattagtagtatcaatagtaaaccaacatgcatattagcgatcaccagacccgttccttttacacccgcaacagtagaggcgtgagaagatataaaacacatgtgtccttccttttacaaaaacatagacaatgtacttcctccgtcccaatatataacaacttaggatgggattagaccaatcctagaactacggatctcactactacaaaagtgatttttctgtacgagagcccatgaattttgcaaacggaccattactagtggcgtctgcaaaaatcgagggtcattgtcccatacggctccttaagtggcccgtatggaaaaatcgattttcccctacgggcctcttaagatggccgtatgcaaaaatgagtttatttttgcatgtggctgtttgacgaccaaatttggtaaattatgaaccacgttcgacattgagatcgaggcggattcaacaaagaggttgattcgaagaacagagtatgcatcggctagaatctgcattggctgagatggatcggacagaggacagccgatacagccgatagaggtgatgcagccgatttcgatgatgacagtttcgaagatgtttctagaatcaatcaaggtgcttcatgaagattgctgtgatggagatagggctcttggataggcaattgtatctattaattaggatattttatgtaatttctttagagatatgtttgggcaaaagtctgctgcaaagacttatggtatcttaaagtttattagaggtaaatgtcgtgtccggcaaggacatatcttgtatctcgggtataaatagaacccgaacccatgtaatcaattaacaattgttcaatataatctcggcgcattgccattgtcagggttacgggttaggtataccctttacccttcgatatacgtcgcatatcggtatggcatacccacgcgcatacagataccctccgcatgcattaaggaaatccttcacggagtttacggatggaaagagtcctactcgaaccagactgggtcgtcaacgtatcgtgtgaggtttgatgtctctgagttctacttggaaaccgcctgacctgcgatataaaagggaccccccggggaggacctaaggcatcgaatctcagagccaacacaacccccacagcctacgaagtcggagcctgcaggagccaaatcgctggggatctagtcgaaccaacttgactacgatctcgccagatccatcgagttccattgttccctttgtaacctgtgttttccatcatataatcccacatcaactggattagggctattacctatcaaggggcctgaaccagtataatcttcgtcttttgtctgcttgatgtcgtactacatagacccttgtaccaacgtaccccaataccttctatatccggtctacgggtatcacccgtcgacagtggcgcgccaggcaggaggacttggtgctcaaggttctactactatgtcatccagcttcgtcgacaacagcgtcaacaccaactcaaccaagtatttcctgcttcaacaatgctggtgtggactcaagtcggcgaaatcgtcttcccggtttacaccacgatgccgatctcagccggtccatcaatgaccagaaacgagaacgcagtggctacaaaccaagacgactccatgtcaaaagatcctcccgccgaggcggagaacggaacctcgacgacatccgagctcgagaaggattctaatgcggccaaaccttgtcattccgacaagaaccacgagccgacgaggatgacttctgaagcgacaaggtcctggtgtcctatccacaaaaccaggaaacacactttgcaagcctgctgggtttttctcaacgtccgcgctgaaattcgcgcctgcaaagagcgtggaattcagcgtatttctccaactcgtgatgtctattgtcctattcacaagacaaagaatcatgacctctcaagctgcaaggtctttctcagcgccatgaaggcgccatctcctaaggtccaacagtcacacgtccccatcagggataaagacaaggaacgaggagcgacgccaacttcagatcaatttgttggggtaatcgacatcgatccccacgaaccgtcagtcttgcacctcctcgaagactatggatcatcgacaacgagcgcgccgcgggaggtattggctatcgatgatgtcggcacgtcagcgcgcaccaatgcagaagcagagaatcaaatcgccactccggcccagcacatcagagccgtcaacgctatactgagggaaaccccctacgatcccgttctgaacgacgatctcacgcattggacagaacgactatgggaataagtgaccaaccatagtaacgcgttcgaagaggccgctgccgcagcgcacccggagcagccaccaactagcgatgccaatggtgaaaaccctgaacagagggaatcgcctcatcgagccacccctccacctcgcggcactggcgatctccgagatcacctcaacggccgccgagaggcacgacgcacacgagacaacgagaaccgttcccggcgtcatgtctcttcacggcgccatgataacgaagatcgaggagaccgttcaaacgaagaccaagaccgtgataaccgccacgatcacaacgatcgcgaacggcgggtgccaagcgatactggtcgaggacgttgccataatgacgacgatgatggagaccggcgccgagacaacagcgggagacgacgacaggattctcgagagccaggccaacatcctcgtaatcatacgccggaaccaagcgacccatcgtcatcgtcatcatcctcgtcttcctcatcatcagatagacatccacgaaggacacacgatcgccgacaacccagcgctgggtgtagagctttcagtcgttccctgcgtgatgtccgatggcctgagagattccgacccggagcaatagaaaagtacgatgggagcaccgacccagaagagttccttcaagtctactccacagtactctacgctgccggagcagacgacaacgcattggcgaattatttgccaactgcgttaaaaggctctgcacgttcatggctgatgcatctcctgccttactcaatctcttcggggccagacctgtggcagcagttcgtcgccaacttccaaggaacctacaagcgccacgcgatcgaagacgacctacacgcgttaacacagaactcgggtgaatccttgagggaatatgttcggcgcttcaacgagtgcagaaatacaatccccgaaatcactgatgcttctgtaattcgcgccttcaagtccggtgtcagagatcgctatactacccaggagttggcaacaagaagcatcacaactactcggagattgttcgagattgttgagcgatgcgcccacgcagatgatgcgctaagacgcaagaatgataagccgaagaccgggggagagaagaaaccagccacggacgcacctgagtcaagcaagaagaaaaatcgcaaaaatgggaaaaggaaagctcaagcggaagtcctcgcaatagaatacgcgaaccctcccaaacgcccagacccacaaagtagcgacacaaagaaagcatggtgcctcatacacaagacggacagacattctttggaagattgccttgttttgaaaaaatcgctcgagaaacacattgcatttgaaaaaggcaagcgagtacgcgtggtcgaaaaggatgtggaggcggctccccaagaatcggattcagcatatccagtctctgacctccacgtttcacacatcttcagaggttccacaacgtactcctcaaagcgagaatacaagaaagtggaacgcgaaatctgttcgacatggcagggggctgcacccaagatgaagtggtctgaacagaagatagaattctcggaagaagaccaccccaagaccgccgtcatcccaggacgatatccgatcgtggtcgaaccctctattcggaacatcaaggtcgcacgggttctcatcgatggtggcagctcaatcaaccttcttttcgccagcactttggacgcaatgggaattccgcaaagcgagttgacaccaaccgatcaaccctttcatggaattactccccaatcctcgtccaggccattggacaagattacgttgcctgtgactttcggccaagctaacaacttccgaacagagcatatcacctttgatgtcgttgaattcgatatagcttacaacgccatcaacgggagaactgcacttgcgaagtttatggctgcatctcactacgcgtatcaagtgctcaagatgctgggaccgaagggaacaattactattcaagggaacgcaaagctggcgatgcaatgcgacaaacggagtttcgacatggtcgagcaaacacccagcccacctgccacgactgagccacccaagaaagtgagcaagacaaacaagaagccgaaaccggacggcgcaatcaagatcgttccactctccagtgccaaccccgacaagaccgtcaagatcggggcgacactaagcgagaaataggaactcgcgctcatcaccttcctccgtgacaatgctgacgtgttcgcttggcagccgtccgacatgccgggggtccccagggaggtgattgagcacaaactcatggtgcgacccgatgccaagccagtaaagcaaagactgcggagatttgcaccagaccgaaaataagtcatacgagaagagcttgacaaacttctcaaagctggcttcatcagagaagtacttcatccagagtggctagccaatccagtcatggtgcggaaggccaacggaaaatggagaatgtgcgtcgacttcaccgacctcaacaacgcgtgtcccaagaatcacttccctcttcctcgaatagatcaactggtggactcaacagccggctgtgagctgttgagctttctcgacgcttactctggctaccaccaaatcagcatggcaaaagaggacgaagagaagacagcattcatcacgccgttcggggtattttgctatgttaagatgccgtcggactgataaccgcagggaatactttccagcgtacggtccagggcgcacttagcgaccagctcggcaacaatgtcgaggcatacgtcgacgacatcgttgtcaggacaaagacaggcgactcattgattgacgatctgcgggaaaccttcgacaacctccgacgatatcgcctcatgctcaatccagagaagtgcacgttcggagtaccgtcgggcaagctgttcggtttccttgtctctagcagaggaatagaagcaaatcccgagaagatcaaggcaatcgagaacatgaagtcgcccacaagactcaaggaagtacaaaagctaaccggatgcatggcaacactgagcaggttcgtcgctaggatgggagaacgagggcaacctttcttcgctctgctgaagaaacaagacaaatttgtatggacacaggaagccgaagaggcattcgttgcactcaagcgctacctatcaaacccccctgtacttgttgctccccaacctaatgaagaattattcctctatattgccgccacgccatattccattagcaccgtcattgttgtcgagagagagaaagtacaacgaccagtctattacgtcagcgaagctctccacgacgcaaagacaagatatccacagatccaaaagctgctttacgcggtcatcatgacatcaaggaagctacgccactactttcaagcccacagagtcacagttgtctcctctttccccctcggtgaagttgtgagaaacaaagacgttgttggccgcattgcaaaatgggtagtcgagctgagccagtttgatgtccactttgtgccacgaacagccatcatgtcccaggtactcgccgacttcgtagccgattggactatgcctgataacaaatcagacaaccaagtcgacaacgaaacatggacaatggcgttcgatggtgcactcaacagccaaggagcaggggcaggatttatcttgacgtctccttccagagatcaattcaagcacgcaatccatctcaacttcagggcgaccaataacacagctgaatacgagggattactcgccgggataagagccacagccgcacttggggtcaagcgactaatcgtgaaaggggactccgagctagtcgcgaaccaggtgcacaaagattataaatgctctaaccccgagttatccaagtatatcgcagaagtcaggaagctagagaaaaggttcgatgggatcgaggtccgacacgtctaccgcaaggacaacatcgagccaaatgacctagcacgacgcgcgtccagacaagaaccgctcgagcccggcacttttctggacatcctgacgaagccattagtaaaagaggttagcggcgaagttagcccggccgcccccgacattagctcggaggccacaaaggcagaacgcgccgttgccgatattgagaccacagatgactggcgcatcccactaatcaaattcatcaacagcgaggatttgcccaaggacgatacagaggccgagaaaataacccgtaaagcaaaaatctactgtatggtcggcagcgatctatacaagaaagcgccaaacggggtacttctcaaatgcgtctcgtccgacgacggcagacacctcctccttgatatacatgaaggcatctgtgggtcacacgccgccggtcggacattggtcgggaaagcttttcgacaagggtttttctggccaaccgccctcaaagacgcatgcgacatggtccagtgatgtgaagcctatcaattccacagtaaacacacaaagctacctgcgcaagcgctccagactatccctcttacttggccgttctcgtgctggggctagatatactcgagccattcccatgaggacagggcggctacaggttcctattcgtggcgatcgacaaattcactaagtggatcgaagcagtacctacgggggaaatcaaggccaacaacgccatcaaattcatcaaggagatattttgcagatacgtactaccgcaccgcatcataaccgacaacggctcccagttcatcagcgccgatttccaggattactgcatcgggctgggagtcaagatatgcttcgcctcggtctctcaccctcaaagcaacggacaagtcgagaaggcaaacggcatagtactacaagggatcaaaacccgcatctacgacaggctcatgtcacatgacaaaaaatgggccgtacacaccacaccgacaacgtctaacaaggaaacacccttcttcctcgtgtacagctccggggccatgctcccagcaagctacgacatcagagtacacgagtacagaagcattccgacgaggaccaggaggagcagcgaaacgtcgacgtgaatctactcaaggaacatcgcgaacgagttgtcgtccgagcaggcagctatcaacaggccctccgccattaccacgagaagcgcatccgagcacgcatactttcgatcggtgactacgtcctccgacgggttcaaagccaagcagggcgaaacaagctctcacccaaatgggaaggaccttacacgatcacacaagtcttgcggccaggcgcattcaaaattgcaaatggtgatggtcgcgagttggcaaattcttggaacattgaccaactacgtaaattctatgtatgagtcaatatcatccataccagtaagacaccttacagtatcaataaagcctattcttaggcccatattataatcaaagtgttcctgcccgatgatcccttatcctgatgacacctagcgttgaaacctatcctcatgtccctttacgccgtcttgacaaggcctccgaggaacctaagggatcttcggctagggacgcctagagccgataaagacgaaagaccatgtaagatctggtcgtgtaagagttctcgtcgtgcgtattaaccaagccgcgaaatcggaaattaactttccaacttcacggctgggggcttaggactgagcttattcaaccaaggcaagtcaaagtccaagagccttatcctccgagaaaattcctccgacgacaaggctaggggctagggagagtgtacgactcaaacgacggactaaagtcgtgaactgagaacacactcttacacacgacatccggagtaagaaagatttgttaagatagatttcttttctatttcacaaaatactccttacaattttttacacaagtctaaaactatattacacttcttcctaagatatctatcacagggtacgaagactaccaagaaggccaacgccagtccatagactggaagaccttctccgccaacggcgccatcgacttcgccaggtggtctatctccgtctgagtcctccgagaacgagaaaaaccttcacggagaaaatcgaggtccaggcgcgggcgatgatctcgtaggcaagccaacacgtgccctccagcatattagctcgatcgacgacactcctgcttcaaggcctcgtcgatgcgtttgccgacgccatcgaactgagcacaggccccgttcagccacgagatgtatccggccgccgactccttgggatccccacggggtactcggagctctctacaaaccttggccatggatgtgcagcaactcttcaagtacgagttgaaccacacctcacgacctcggagcgtttccacagcctgctctttcttcactgcaagcatggttctctcgagttccactacttcaaactttgtcttccaatattggatacgacgatcttgaccagcaagagcaatctcgagatctgttcaatgtgggaacaactaagtcaagctgtactcctctttcgagaacatagctgatctagtcggaggagcaaaaagggatgaatggaccactaacctaaggaagtcgtcgccatccccgtccccgtagctaggatctggtctacattgtctggcgacgcatgtggttcaaacgcgagagccagaatgatcgccggtgactcaggttgcccacgctgctggacattctcgtcatcaacatctctacaagggacaaaaagtactcaaaatcaacatgcaagagtaagctaggataataactgcacgcacaaaggcggttgagatccatcaaagttttacacaacatgtctaaggagtacaagagatcctactcttcaaaaagagggagaacagattcccccagatcgccgacttcttccagcacccccttacgcgtgtcgctagccgccccctgatccaagatctcgcgcagatcgagttcaggatgcgccagcctcacacatgcaaggacgtggcacgccccggtgtagatcccgttggacgtctcctccccgatcctagccgcatgcttggaggggatctcctccatcgccgccgccagctccgcaaaagaagatgtcagcgagaactcatcgggattcgccgggatggtggaattaatgccgcactccccggcgagctggtgcagaccagtataggtgacccgcaacgagccacggatttccgacagattgttcccgagcttcgacatgcggtgctcgagcccctgtcgttgtcgctcgttgccggccaccaactccctcatcttcttgaggtcttcacgagcctccgccaactcgtgtgccagccggtcagcgcgctcggtcgccgatgccgccgccaaccttgcctcagcaatcttgcaaccaatgccgcgagcaccagcttcgaggagacgccccatctcgacctggagctcctcccaggtgaggacagcagccgatggaccacgaccagccgcgagatcgctggctgggccacttggtgtcgcctcgcggctcccggggcaagcacgacatccgtcgaggtcacagcgggagatgcgccgaaagtccctccggactcatcttgcaccgccttcgcccgcgccgccctatgagatagccatggttcagacaacgctcgaacaaaagcacgaacacttagattcatccacttacttctcgccatgtgtcacaagttgttgtcgtcgtggaggcgggggagacgcgtccgaggcctggagaacggttgatgcgaagtaaggcgaaattgttctggctgtaagatcagacaacaggatagcttactgagggggtagatgccttgcgacgatgtccgcttacagaggagaacttcctcccctttgtcggaacattgccaccacttgtagtagcagcagtagcagcagcagcatcggatgcctccttggcgactttctctttcaatgacgccgccacctgatggtccacgagcggcccgacgatgtcagtcagaggaagagcctacgcttcataaagtcacaaagtgatctcagaagaaaaacgcagaatgtctattgagtacacttacattgatggcagcgtcgtgttcggccgcccccttctcacaaaggggaacggggatgttactcgccgttgtcgggccactgatcatcacctggccgacacgacgtcccacggtttcattgttcagacctgtaaatcgagaaccaaatttcgataaatcaggaggaacgtgcacacgagcatgtcaagataaatgcaagaaagataccccgaggagaaacccgggtcgcgtcctccggtccggaatagtcaaaggctagatggactcgagcctggagcggctggatccgtctaccaacgaagtcagcagcgatttcatacctcgacaaacctcgtactcggagatcgtcgacaatatcgatgaacgattgaagagaaggggtcaaagggggctttgcggtccaagacaaaatcttgtccggttgttccttaggaacgatgaagacaggatccaaatcttcgatctgaagatagaaccacctcgtctaccatttgctgcaagaggaagggcactggaaggggatataacgcgacttcaggccatcccgaagtcggaacccgacgcatccagataccctgttggactccatccaacgcagctcatagtagaagcgaaagagatcaagaaagggctctaccccaatgtaggcctcacaaagatgtgaaaaaatactaaggaaggcgatagaattggggttcagatagagcaaagaaagaccatagaagttcaaaaccaagagaagaaattcggaaggcggagggagaaaaccgcagagaatgtagtcctcgatcgcaaccatgcgacctaagacgggctggggttcagtacctcctgcttccctttccatggttccacgactgggaagggcgccgtcctcctgaagcttctttagcgacgcgttggtggaggatgatttgccaagatccatcgccgatcggagatcgccggagaaagggctaaggtcgacgagctagggtttcttgtgggagcggagaagacgaagaacgcttgcaggcgggatgttttcttcacagtaggcggacttcaaaatggatccccaaaattcctttaaatagacgcactactgacggtgcgaattccaaggaaaggagagagatggccgccggaaatttctgggtccgttacgcgtggtagtttcttggacttcagtttaaattcactcgtgaccgttgggcttcacatggtgttctcgactacgtcctatctctacggtcctcacaccgggaacaacaacaatctcgacacaagaagtcgcaaatggttacacgagttcatttaagcagaagtcgggggctactatcagggttacgagttaggtataccctttaccctttgatatacgtcgcatatcggtatggcatacccacgcgcatacggataccctccgcatgcattaaggaaatccttcacggaatttacggatggaaagagtcctactcggaccagactgggtcgtcaacgtatcatgtgaggtttgatgtctccgagttctacttggaaaccgcctgacctgcgatataaaagggaccccccaaggaggacctaaggcatcgaatctcagagccaacacaacccccacagcctacaaagtcggagcctgcaggagccaaatcgccggggatttagtcgaaccaactcgactacgatctcgccagatccatcgagttccattgttccctttgtaacctgtgttttccatcatataatcccacatcaactggattagggctattacctatcaaggggcctgaaccagtataatcttcgtcttttgtctgcttgatgtcgtactacgtagacccttgtaccaacgtaccccaataccctctatatccggtctacgggtatcacccgtcgacagccacccttttactttcgtttatttctacgagttcttgctttcgggttgagctgcatcgattcgatcttcaactagaagtaaaacttgttatggcggcttgcgttatcgaggttaatgcttccatctctatgatactttaaccctgtttatgtaatccatcgagttatcatatacatgttgcaatctatgctagtggcgctatataacttgttatcggctggttcttatcgttaggaaacaatcggtagagttatgttttattattaatttagattgtatcatatatctaccatctcttgtagattttcatcatcctgcttagatctcatacttgtctttatgtttaatgctgcatcggttgagttcgatctattaagtagaattcataattgtgatatctagcttgttttatgatcatcgagagagatagtatcggggtttcagccgatcttacctgacttagctttatgttttatatgcttaactaatatgctaagtctgccctttatattaagattttatcgcaataaagtatatcagacttctgtttgatatattctatctgttttaatatcttaacgtagagtagtatcggagtactagccgatacatgctagatctatctgatcggctatgctataagcgtttataatcttcatgttaatgtgtattttgatctaagtgatttatactatctcggcatggcgaccgatctatcccaatcacttgatttaaatatacatcgacagaaagattatgtagcgttaatatctatagccgattgagtagatttagtcttactttgcttatttacaattgccgattgattcacatgtgacacatcggctcgagaataaataatatgtcggcggcggctggccaatcagctatcatttatggattcaaccacggtttttcttgtctctctttctggttgattgcaggatcaaatcaactggcacgctcacgatcctaaaggcaagattttggacctgcactgaagttaagcaaatcttctaggccaatgtatgtttttcgcatcaacagcggctcacttaagcgcccgtaggccacttaaggagccgtatgcgaaaaaaaatttgaaaaaattgaaactagtttatctcactcatatgaaatccaaattagatggttttttttcctaaatgtttctaaaatcatgctctatcatgttattgtgttcttacttctattatttgggtcatttttcttgtgactttatttaattatcaattaaaaatttgaatttcaaaacttcaaataatattttgaagcagtaaatgatttatgatgaaaaagtcatcaacaacaaagttgtctccctcatcaacatctatataacttctatcttggtcattttttcatccgacaaagtgatggtaacattttcacaaaatttatatatatatctctctatagtttataaaactatataagatatgtacattttgtgaacaatgttacaaataactttgtcgaatgaagaaatgaccaaaatagaagttatatatcttgatgagttatacaactttgttgttgatgactttttcagtttaaatcatttagtatttgaaattgttatattttgaaaaatcaaattcaaattgttcaaataaagtcatatagaacaatgaccaaaacaaaaagttgtagatcttgatgagttatacaactttgtttttaacacctttttcatatgagttcatctagtgctataaaaatcgatttgaaatttaaaaagccacgtataaaaaatcaatttttacatgcggacgcttaagtagcccgtatgaaaaaatggtccctcttccgcagttcaaaaaatttcacacttaaccctatcttatcctctcctctcactttatcctctttgctccatgtttccaacccctctccctcgtattccgtgggcacgcttttcaaactgctaaacggtgcattttttgtaaaaaaaaattcaaattaatccatttttggaaaaaaaattgttaatacttaattaatcacacgctaatggaccgctccgtttttcgtgcggaggagatgggttccaaaccagggcatgcgaacacagcctcagtcttctctctcactctatctcttctctctctcagaccgagagtggcgcagggcgtggcggcggcactggccaagtgcagagggagcggccgcgggctctggtgccaagggcggcggaggcatggatccggcggtggcggcgcaacctcgcgtcgatccggcgtcggcggcccgtctcggcgtggatccgatggcggcgcgacgacggcgtcgatctggcgtcggcggcccgtccccgcgcggatccgccgcctctacctccctctgttgtcgccgtcgatttccccgccctcctctgcggcgcgacgacggcttcgatccgccggcggcggcgcgacctcgtgtcgatccggcgtctgcggcccgtccctgcgcggatccggcgctgacgacgatggacgacggtgggagcggcggattggccgacgacggcgacgaatccggcggcgcggaggccggctggattgggcagcagtgggctagggttcagcttttttctttttttttatttcgctgaattcattttcgcatgcggctagtataggggaccgcatgcaaaaattggatttttacatgcggttgctctagccgtatgcaaagatgacgatctttgcaggcctagccgtatgcgaaaatcgttgccatccgtatgcaaagacgtattctgtagtagtgtctggacatagatttgtacagattaaaacacacagttgtacatattaattacatccagttagactgaaggacctttcaagaagccatataagtttgtacagattaaaacacacagttgtacatgtacggatgtacccctctcgatcaaaccggggttattaggtaacagcttattgctagattaattacggatcaccgcccatacatggaacatgctagatatgaaggtgacacgcacaacacaatatactatgattattccattgcagatttgatcatgtcactgtaattggatgttaggttgagcaagatctcaggattaggacagtttagcacttttgtgcctttcgtcgtaatgtcgtggttccatgtctctggtgacactatagtaattaacaagtacattcccatgcaatgcaaaaggccaggcaaagataagaactatagctatctagcttggtaaagtgcttacctcgagaaatctcgtgttaggtacttgcatgctaggagttaggcctaggttagttggttttcctacccacccattttttaactggcatatgtgcatcaaaacgtactaaggctgtgtttgttggtggggttaggaaccatctctcacgtacagaaaaccaagcggtccattagcacgtgattaattaagtattacttttttaaaaaaaaataaatcaatatgattttttaagcaacttatgtattgaaactttttaaaaaaacataccgtttagtaatttgaaaagcgtacgcgcgaaaaacgagagggggagttgggaataggctatagatatttatatataaccatcgtacgaataggctatagattgcctataaatgatttgaattagtagttggctatactattaaacttgctctaatggagtagcattaatctctggaagattaattacatgaccaataattaggaagattatgtgattgctacaattaacttcagaatgaggttattcctaacccaatgactagaatgatatccatagcattaaataagctgccatctaagataaaaaaatgatatgacaagtaaataaatgaggaaagagaaggaaaccatgtcttgcatgggatttggtttctacacaacatccaagtcatcatgtgaaataagaaatagtggtatttacattggaagagtagtatatagtactagtttcttgattatgagaagtttatgaaaattatatatagtgttttaggttgggaatggcttgagggaggctgtggtgttgttggtctcggcgtatttttttctcccataataattaaaagagaatggagggatattcgacatagaaatcacaataatggccacctgctgtatagttccacgaaatacggcgaattgtgtattgtacaccactcaaattgaattaactaattaccggaccgcacgggtccagcaacctacagcacggtgcacgtaccattcaatttgcagcacgttcgcgcacacaccgttatctccatgtgatgtgcgacgacgaaccagaggagttgccgtacgtacgtgtcacggcgccacacacccctcgtcctccctgcaacctaaaccgttccacgcacatccgcctcggtcgatgctgcctcctcctgcttgcgttcggccctcgtattccggctcgacgaaccaggaccaatataaaaagctatggcctcaagaaaaagtaaatgtcaattaggataaaaccataatgtgatattctttacctaatatgaagccgagcattgctaatttgctatacgttcgataaaacttcatatgatcagagtacgatatttcgtagcctctggtgtgtgctgcaaatatggggcataacatgtttccacccaatcaaaaatcatggatggtaggatcgtattaaaatcctacaaatatcatcgtacgcaaagcaatttccatatgaagccatagccacattatcttttctttatccatgtcaatcggttacttttgtattaaatcctcactttttttttctattcacacatgcaagtctaataaattaataatccacaccctgaaaatcatatataagaacccatcccttccctttcattctacctttccctcatttctccctgtaactcctctctcatgtcccacggcatcaccacctctcccctctctagtggcgattcttttcccctctctttcatcaacaaggccaccaaggagactagatcggagacagtgagggtggatatcaagacggcagggtgtggattgagggggcaaaggtgtaaatcggggtgccacagcgtggatcagggtggtgacgatggatctgcccaatgtggtggaaggagcggtcgaatagtaggtggcagtgtagatagaggcagcgatggcaggcagagcttcgaggcgacgtcttcccgcaatggagcatctcaccatcgtcctcaatgaaccgtcaggtaggccctttttgacctcatttgtgatggcgacgcgtagaagtttgtttgcagcaacggcacgggccgacggcatggggcgaggccgcttcctaacgcgtttcctcgcatgattctcgcctaccagcagaggcgtggctatgctgaggacacatggacctcctgcatggttcgcacacctctgtagggtgcagtttctttatagttggcgtgaatatttgtctcggatggggtaagacaacatgccagctaggaacgtttggcattgccttaggccatgtacaatgcatggtctccgacttgtggttccatcctccaactaggctaagatgccacagtggaggttcgagagtgtcttcatttgttctagaataacctatagatgtcacagtggtttgaggagaaaagcagtggttttgggagaaaaagaagtggtccaagcccctgatcggaagccatctgagaaagtgcaagagagagtgcacctcgtctcactgttaaggggactcccaccatcgccatcagcgactgcaaagctcgccgactgcgccggagtggggataggagaggtgggggcgtcaccatccaccagatgcgcggcgaacacctgggatcccatcacggtgaccaaggagggaaccttaatccgcgccaataacagtgaccgaaggagaggcggcagggagggagctcgatcgtcgtggcggcggagagggagctcgatcgtcacggaggcggggagggagcttgttgtcctcaacaagcagaggccggatccgacgaccttgcgtctagatccagtggtgaaggggagcttgccatcgtgctcccaccatgtcccttctcccccagtggcagacgatgctgcggttgatgggaaaggtagagatgcggagatggatgacgaaggcgtgggcatcggcggaggcagcaaacatcatcaaaggtgagggcaagaaaaggggataggtgtaggaaggagataagagagagattgtggggagggataaaaaatatatgatgggagaagatgacagtgggaccgtgtaaaggctaagggtacctacgtactctttttgttattagaagatccaaaatacaaatgttgataataaaatatattagaagtactgacacgtaaataagtagggactgaaacacaaatatactttacagtgctttccatagtgagtgttgtgatatttgtgtagttctatcctatatgacttgttgagactgctgataacagtggtcttcgttgtatgaatacataggagtacattacttttaatcttttttagttatacatatgtttttttgaaagatacgaaaatatacgtgtaccgtgatgtggaggcgcgcaaccggttcactggtgctgcgtggacgtgcgggaccgatggtcctgcggcttggccgcatggcaccgcgcggtggcgcggtccggtcgcgcgccaccgggtacacgaaggcagcgcacgcaggcatgcatacatgcatgcacgttagtcacatactcacattagtcggctgcactcggtggggcacggccaggccgcggtgttttcctagccgttggtcccacgcgtccacgctgcgccacataatttcgtaaatcttttaaaaagacatgtataaatgcaaaaaattaaaaatagtgtatatttttttcctttgtcgtacatacccatggggtgggggttatttagttggtgaagatgtagtcgcccgcggccggtgccagggatcaccccgccgcagggcagcactatcatgttttagtggggaaagcgacggtgtcgattgtaatttttgtacccgcatatatatatagaacaactcggcaagattagttcttttagaaataatatttttttaataaataaattgtaaaaatagatgttgattggctaaaatcgtaaatttaataccctgtcgagcaaccgcagtttgacatctatattaaaatctccacgtaaatcatttttttacctcctattagctctcacttagattcaagtatccaaataatagtatggcataactgtgtaaggacaaattaatgacttataactgatgatatgcaaatatgctatattatatattcaaattagttcatttaagattccaaaatatataaaatcaccatttaaaacaatattaaggataatatggatagtattgtaaagtttagggactggatgtccggtttgaaagtcttggatgctagacggatttccattcaaagtttagggagggggtacttggacttttttataaggccccatttagttcccaaaaagtttttcccaaaaacatcacatcgaagttttagatatatacatggaacattaaatatagatgaaaaaaactaattacacagttatgatggaaatcgcgagacgaatcttttgagcataattagtctatgattagtcataagtgctacagtaacacacatgtgctaataacggattaattaggctccaaagattcatcttgcggtttccaggcgagctatgaaattaattttttcattcgtgtccaaaaaccccttctgacttccgatcaaacgtccgctgtgacatcaagaaattttcatttcgcgaactaaacagggcctaaattgtaatcgttaaaatgatcaaaagaaaatttattttcctccaacttagtactcctttcgtcctaaaatataacaacttatagcatttaaaatttaacccaaaatataataacttcttcatccacgttgtattcttaaccaatcacaatcattgaacttcattttttttccacatacctccacttttcaaccaatcacacacctcctatcttattctactcaccttttaataatcgtgtttaatcctaaaacttttatattttaagacagagttagtaacattttgttaaaattatgggacatgcttatattttaaaatggatatttccttgataagaaaaacacttctagagttaaatgtgaatacgacgatttttttttttacggagtaccgacttgtaaaagaatcttggagaagacaaaactttttatctatcataaaaccattgtacccgaagaatcctgtccagtggagcccacccgacgaaatcagatctcctaaaccaacaaaaagaaaagaaaaaggaaaaacaaaattccttgtctctatcaggcttgaccgcgactcccccacgaaccggtggcgcctcctttcctcgccgcctcgtgggccagctcccaggggggcattcccgtcatttcacctcggccggcgtggcgggaattggcgcgaaagctggcctcacccccggagacgacgagacacgtcgggcgtttcccgcccaatccacacaccgcgccggaggtgggccccactacccgacgcccaggatcgcgccacgtggcgcgccgacgcgaccgaggcgcggggcccataaacccggggaaggcgcgagagtgggggagcgggtgcggtgcggaaacgtggcgaggttgccgctttgtcagctgtcgtctcctcgcttcgcttctcctgtttgcgttgtttttcttctcgtcgcagccgatgcgatgcgatgcgagctgtgacactgacacatgcacacaccgctgcctgtggccatgttcacttgatctggctctggctgctgcaagtactcggcttgtggaataataacctcttctgttcttcacgttctgacttttcttcgcacgttcttaaaacacaataattcgagacgtaatactgctagtgattagtaaagaaaacaaaatccacttgttcgaaagaaagctacggaagcgtggaagactgttgctcctcataggagattcatccaggagacgggacaaaagtagtagtaaatccggacatccattttccctcatcagattaaaaatcaccaaccacattaacaaacccccgttgctgtcaccggtcgtgactcgtgagacgaccagggtgtgtaattaacagctaatcacccgcatcagcagccactagtcacacccgattctttcactccaactgcggctgtgagcgctgacatggtctgaccactgcgcaccacgtgagacgagagacaacgccacaccaccatttaattactcctcccccactccactcccaacaaaagcaaaaaaaaaaaagaaagaaaaaataaatatctgccacgcaattacactgttccgtttccacgcgggagacgtgccattcaaggcagctcacgcacaaagcgagcgcccgccttgggccccacgccaccaccatttactactactgctcacttcactagggagtacaaactccgctgggtttttttttactgccacgaaataataataataaaattaatataatactagtagtaataacattgctgctggttgctgctgatgcgccgtctcccgccaacttttcccgccccgagagcgcgaaatgggtggaggggggcagcggcgtcatttcacgctgacggcgttgctcgccgtcagccccgccgtcacgaagtcctccccttcccaccacggcagccagtcgaactccgccgccttggtggaaggcggcggcgccgagaggtcgcccagctcgacgaggaggtgctcgaaggatggcgcggtcacctcgtccgctgccgcgtaccggagcacggaggtcggcgacgcgaacgggttgaacgagctgtcgttggcgcggtcctcctccggtggcgccggcgtcggatcggggacggaggccttggcggcggcggcggtggaagagcttggggtcttgtccggggtggtgtgtcggcgagggtggagcttcatctgcttggccttggcggagggggtgtcggagtcggaggggaagttggtgacggcgtgggagcccttgatgcggagcgcggcgtcgtcgtacacggcggcggcctcctcggcggtgtcgaaggtgccgagccacagccgcttctgcaggctcgggtcgcggatctccgccgagaacctgccccacggccgccgccgcacgccgcggaaccgccggctcgccgccatccccgcgcgccgccgggccagcgccgccgtcgccgtcggaaccagccgcctcgggtgcttcggcgccggcgccggcgaggcggccccgacgtcgatgtcgatgacctcccggacgcgcggcctggagcgctcgtccccggaggagtcggtgtccgtggcgtcggcgtccacgaagtagacgcggacacgcttgggccgaggcatgctagccccaacacggcggctcctgccggcggcgagggagtccgccggagacatcgccggaggacgcatatccaccgcccgctacgaggacgtcaccccaaatctcatccaagaaaacgcacgaaccaacccagcaaacaaactcacccgaattggaggtaaaacccaaacaaacaagacctcaaatttctccttcaaacttcccaaatcaacttcaaaaaaacacaaaagaaaatcccaaagatttctcagatctaagcactcccccagtgagtgaactatcactaccaccactagctcaccgctcactctccaagaaccgggtcaaacaagcaaaggcacccggaaaatcccaaacccccaaaacctcaaaaccagagagatccaagaactcctcaaccgaggcaaaagaaaacacgaaaccctccgtcgatctcaggataatccggggggttttaagaggggttttagctttgaggttaagggcgggaaagggagaggagggggatttgttggctgtgggaggagaaaggggtaagacgaggtggaggatatatttatggcacaggtggataccactaccactgtagtaccactgttcttgatcttatcacgcttggggaaattactgttttgcccacctgctaggtccagctggaccgcgctgagagtgaaaccgagtgcaggggacagtgtgggcttcggttcatgtgttcagtggaagtttacttctttgcccctccctgtctggttcatttattgttttttttttatttcccaaaagaaacgtgtgtggttttgaatttgaagttgcttgaattcaacttgatgatgtattgatgttcataaccatgatccttcatggtgtaataataaaatccacttcaatcaaggtgtacttgttagtactcctgtttaaaagacatgatcacggggaagtttcacatgtgctcgagggattttccgtgtgcttcacctcgttttttgatggcttgttcacatacaatggcttgaaacttttgtgttaggtaagtgactggattggcatgattggtgagtttacaataaaataattaagtgacagttgtttctttttttaaatactatcaatatcgtaggctgaaccggtaaatataattaacgaataggtgaaaaagttatatgtgtacagcaagtcaataatttcacgagtaaaatggccattagtgcaaccagaggcacaagaggcacaagacccaaatgtacttctactaagaccctgtttctttcagcttggtattattataatctagattattaagccagattactataagctatattgttataatctgtagtagaataagcgactagttgtttttttttctaaattattatagcctagattattgggtttgcaagtctaaagagtgagtggggtggcatggtgggtaatttttcaccaataatctggaaaaagcttacctaaatgagcttatcagattataataagctgggctccagattataataagctacttcaataagttgtgtgtttctttcagcttactcccaataatctggattataataatcccaagctgaaagaaacagggcctaaataattactccatttttcagttcttgatataacgtttgacttttcgtcttatttaaaaattttctatgattagtatttttattgttattagataattagataataaaatatgaatagtattttatgtgttactaattttttaaaaaaaaattatataagacggatggtgaaacgttggacataaaaaactaaaaatgaagtcagacggagggagtaactatcatcaaatataaattctttaagccccatcgttttgcttatccttatacttatccgcaccacttattagcaaattaaaaaaagagtagttttgtagcaaactgaaacatatgtcgctattgttgtagcaaaccgatagttttgtcactaaaattgtagttttctaaaaattactaaaaaaattgtaagtaaaactttcatacgtctccttagtggtataatagcaaatgttgtaaaataaacatgatgaaaaatcacaaaattaactttaaaatttacatttaaaatgtaaattttagcttataagtataagcataagcgaaataatgatggcctttctgactataatggtgaactgtcctcatataaaacttattttattttgttttcaaaacaagtataaacgcagaagctcatctgcacgtgtgcacacactgaaccttatgaaagcacaccctgtaaatttatagctatgaaagaggacataactgagaaaatattattcgctttgatttcaaacaaccaccatcgctgtctaatttttttaactttgaccataattaaattttaaattattatatcattatgtatgaaagttttcaggactggaatgcgacctatttcgttgacatgaaatatttttcagtatttatatattctcttcaataaaaaaaattcgagcagacaatggtcgaagacaaatgggagtcctatctaggagtagcaacaagtatttaaagacggacataccagtgagttaccacagagtatagtgctgccgttctaaacacaacaatatatgtgcactcaaacatgaaaaagaaaattaaaaaaaattgatatgtgcaacataatgccatgtaccatcattaaataaaatcaactcaaaattaaatttacatatatacaaagaaacacagattaatttcaggctcgaagcggtgcacaacacacaccacatattcatcccaaaggaaaaaaaacagcacatattactgttaataaaaacacatttttttttatttttaccagctacgttcaaaaatacttcatctctggttattcacctcacaagtgcttgtccatgtgcatattcatagaaatccttttagaaaaattggtaatatatcaataagttgtaacacgtcatataatggcatagttccaattttccctatccgtttcatgtatactaactttgggacaattatctatttgaccctactttgaagcttaactaccaatttgacatcgtttttcccagtttgcttatttgacctcgtttttcaaaattgaagttaccgtttcaccctgtttccaaaaaccgtcagggttccatttagaacaaattaaaaaaaataaatttacaagcctaaataactaaaatgcccttatttactcatttcttatgctctgtatcctctctcaccagagcacaaatggctggaggtgcgacggtcatcgcggctgcagctgcggcggctacgttggctccacggcggcggcacgatgaggaggaccgccagcggcagcggcggctgcagaggggcgacgagggctggcagaccatcggcagtggttgtgtcagctcggggggcagctgggctcgacggcagcggcgcgacgaggaggaccaccggcagcacgacggctacagaggggcgaggcgacgagggcaggaggaccaccggcggcggcgaccgcggcgacacgcggtgggagcagcggcggaggcgataaaccacggtgggagcgcgacggcagtgcgtagtgggaacagaggcggcctcggcgatggtggggagcgggagagacggcgtgagcggcgaaggggttgacccgcggtgggagcggcggcgacggcgtcggcgtgcggtttgagcagggacggccgtggcgacggcgggagctttggaggcgccgacccgcgatgggagcggcggtgacagcgccggcgcacggtgggagcatgggcggtcgtgtcggcgcacggcagtgaccgcgtggagcatggtgtgggagctcgttggcgcgcggaggccagatggttgccgacagcggtacatgcgagggcgggcggcggcgcgggagcttgtcggcccgaggaggctgggcggcggcacgagagctcgccagcgtgtggagggcagagcttggcggctcgggagcacgccggcgcgtgaaaaaaaaaatgttgaataaacaattttagaaactagggtcaaatgagcaagggtataaacgtctattttctccctgaagttaacactgttagcttgcccttcacataatacggttagatccgaccttcattttttaaaataagggtcaaatgagcaaacttgaaaaattagggttaaattggtagttacactccaaatcaggggcaaatacgcagcaaatacgcaattaccctaactaactttttatttttcatgtttgagtgcacttgatgtatatcggtgtagtagcacgcgcgtgagattctcaccgtcagacatgacgcacctcgactttggggctgttcaaattgatgacagtttcaaccataccattatttggtaaaattgataattatgtggttatatttagtttgttactaattattggcaatacatatagaattttggcaacactattgaactaatcctaccaaaattttgacaatgttattaatttgccaaaattttggcattactaaattttggtagcgttcattttggcacaaactgaacaaaccctttattttaagagcaagggttttgtcgaatgtttatttaaatcaagattgttcttaaggggtgtttagatcccaccccaaaattgtacgctatgtcacatcgaacgtttgaacacctgcatgaaatattaaatataggctaaaaaataactaattgcacaaattgtgactaatttgcgagacgaatcttttaagcctaatagctccatgatttgataatatggtgctacagtaaatatttgctaatgatggattaattatgcttaataaattcgtctcgcgatttactggcagattctgtaatcagtttttttattagtgcctgaacaccctatgcgacaccctatataataaccgatgtgacacgccaaaactttacacccctggctctaaacaccccctaaatgcaactagtgcatgtgcattcatgcataaatatcacccgtaccacaggcgaagccgacaatgaaactcgccaatatcatagggtgctaatgccaccatctcaaaataagcaaacttttatatattatcagattcatacataaaaactagttaaaatcaatccacaaatcttatcgattttggatcactaaatgtgctttacgatccgtgctctagacccttctcctctatatctgatgacctcatcttcttctccagtgtcagtaacgtcccaaactctcacggaggaacagattaagatcctaagttggaataggggtgaaaggggatgggaggaggaggagttcaccagctttaaaggatgaccatgagagacgctgtacgatggtggacgcgcggcagaacgggccggtagttagacggcgacatcactgttgaagttgtaggggtcgatggtggatgttgggatggtgtttgcgacggggataaagtggggcgaaaaggttaggagacaatgacccatggtggcgaatttggtagcggggagtcatcggagacgaaaacgatgagatgcgggtatatcgcgggcgtcagctcgaggaggatgagaggtggggaatgagaagaaaggagagggaaagggaggccttaccggcacggcttgcacctttccggcgttggcgaggaggagaagggatcacgaaaacggtgttgcatagtcggtggtgttatgcaagggaagtgtgacacacgctacaaatctcaagacaacttcaacagttaaaaattatataatttaaattaggattttctgtcatgtcatataggtactcatagtataaagtgaacatcgtgatgaactggatcgagaaattaggaattctgaaagaacgaaaacattttcggataatcgagatcgttaattcgttatccactagaggggacgtacgtgcatgtaaacgtggaagcgcactaggcccgtcgtacaggagaagcacggaagctacggaagctggagcagtgcattaacacgctccaattacttctcgtgtgggtactaattaaatacggatcagtactccaatattaatagggatcgatcaaagatcacacggcacgtacgcgcgtaccctgcactgcatctgtaccgtctggcttgggatgccctcgatccatgcatccatcgatcgatcgggtccggccggtccggactgcctgcttgtacctgcacaggatatatgagcagtgactgtaactgtattggctacaaatgacctggccggtttcattaaccctcccatcacatgtgaatcagtaagtgcgtattaattgtgcagtagtaaaatcgaactgtactgttagaagcctaaaaaaaagcttgattttaaatcatcttaactacattttcggcacatgtcctgaatgcatatatattatattgatatatatcatgttaagatgtactggtacgtgctttcaagcctaattaacaatgatacgataaaaacaggtgtaagacctctttacctactccctccatacctaggaaagcttataattaatattataagaatttgctggttggtaacccgtttttataatctaaagaagtttgattttttagttttctttaagtttattttctgtattctacaactataagtgtttatattaatacttaatttccattccgaattacttacatagaaccattatatcaatttttaagatgaaatatggagttgtgataaattatggagctgcccctattaattacaacattagtacgcctttgagctggaggagtggattacaataaaaaagcagatgcattgataaggcgcagagagagaagatattagccaaatgttttgaaacatgggaatgagaggtattttgaaaaaaaaaaggaatgtaatttgagaccgacggagtagcatttcacaattcctttttactaatttcacatatatgtattcatttgggctaaaaaaaattaataatttgccactagttcacatcaccataattttttgggcaaacacgattaattctcatggtggagttataggcatataactctattcatcaggattgaaatcctaatatctaaaaataaattgcgtgtatttttagttggtgcacgtattgaaagtgatactccatatatatatatatatatatatatatatctatttatttgcacggtcttcaataatatattttgacaattaatttatttcatgttatatccccacaaatatgaaattaccatcacatgaaagtaatttaaaatataaatctaatgatataataagtataatactgttagtatgattattagttaaaagttattgagtttataatttaggacggaaggagtattgtcattattaataaaaaaccgaaaaaaagattgaggacacaaagcactaggatagccagcaggtcggccatgtttgagaggactctcgcggtgcatgttttcatggattgggggattagagacggtctgttatagcaagtataataggggctgaagagccggcgataacaaattcaaaggctgagttggcaaaaagctgatgagagagaggaccagccggcgactaagagcaaggataataataaagcccactttttactattagcctatcttaaagtcaacatatataatagattagctataaggttggctataattttcttctcctctctctatctctcacttacacatttaatgcatttgtcttgaagcttgtgataagctaactcttgcataagagccaacatccttaatttttcactacctctctcctccacctaagcttatagtacgtttatagctcactattatacttgctcttcttgctctaagagcaaggataatagtagagcttacttcctactattagcccattttaaagccaacatatataatggattagctataaggttggctataattttctcctcccctctctatctctcacctatacatttaatgtatttacccaggagtttgtgttaagctaactcttgcatgagagccaacattcttgatttttttgttatctctctcctccacataagcttatatagtaggcttatagctcactattatacttgctctaattaagcgctagcgtcacactctccaaaaaactctccaaaataaaatgtgggacccgttgcatgctttctacaccatacagaatgaagatgtgatgtagaatgagagagaagatagaataaataaataatagactattgcaactaaaaaaagatggatagactacttgttgtatgtattaactttttaccatggctatagcagacgtggaaattactggagtaagcagcgagcgcttctattaaccttgctcttagatcaggtacaatagcaggctataagccagctgcaaacatattttaataagataaaagatgagagagaagagcagcgggctacaaatctgtagccagctgcagcacggactccaagacgcaatgtgtgtatgacagtgggaccatatgctaatagtatagtaagcaactattgtataaattggctattaaattggctatagatgaattagagttagtagttggctatactattaaccttgctcttagcatcagtatagaagcccactgtttccacagatcgctgctcgacaaagttactgctattagcactagtatatagaacagagtaggggtgacatcttttaaaaaggaaaaaaaagggcacaatttgccactggatatatgtaattagttggaagacaaaaaaaaaaaagtgacactgccaatggacattataaaattttataatttgtgtaattagctgtagtacacccgagacaatattttatcatttccggtaaaaaagaggagagagaaatttcaaaaggacagaaatgccctcggcctcattaacatgtactcgaagctgagccccacggcaccgtcgccgccgccgcaggccgcggtctgcaggttcaaggccatggcgatgttgtcgcccctgccgtagctgctaggctgagcacgtagaagaagcaacaaaggccgacagtgaccaccatggcgagcgggctccgggtcctgttctccaccgacccgtcgccatggatccacctcaaacctgcacacacatcaacaagaaaccaatcaacggcaacaaatcgatcaaatgcaatgcacaaatcacaatggcgatggacgccgtcgtgacgagttgctcgttgccgttggaacttggaacgccggatccatctgttgaggtggaggcggacgccgccgtgacgagttgcccgccgccgcgataggtggtcgacttcctgctggttttgtgccgacttggcgcgtcctcctccgcatggcgccccgtaggtgagtgcagaacgatgcccaacaacaacagctagcagcagcaacgccgtgaagccggagatggcaccgaggccgacgatgccctacgaccaccaccacccgctgctgcagccgctctgcaatgccgccggcgccgccacggcgtagtgctcggccaagtccgcgccaccgacaccgcagccgcactagcagctgcccgccgccgccgcgcacctgtctgccacggtgcacctgtccgtcacgctgtgcgtatggtggccgccgcgcctcgccgtcgccgacggtgagaccctggcggagcgccgccgctttttccgccgcgcgccgagccgtcccgactcgggccgtcgcgccggccgcgcaccgtttctccgctccgccgcgtgcgtgaggaagaagaggataggagagagatgtggaccccactatgattagcaaatagtaatcaccctactaattacgaataaattaatccatgacgcgtgggcccaggtggttaaaaacctattaaaaattagattaaacatacactgtccatgacacgtggaacccaccgaagtttaaagaaggaaagagaaggggcaatctggtcatttagataaatatctcactcttttgacccgaaaataataaaataatgatacttgtgttctacggctaattacatttttttagtcttcatcagccgtgtcacgttttcgcggtctctcagtcaattacacgatttttgcatgccgtgtggtaaattttgccaaaaaaaaaaaaactacagaaacagaagctttggtagccttgacaggagaatagaagaaactactactactccaaaagagctattgttcggacaagtgcaccattaggtggcttatattattattattattatgctttccatttcaaattactaatagagtatcattatagcaattttctgataaaatatgaaggaaaaagataaaatatggagttctgataaatcactgagctacccctattaattacaatagtattacgccgtgtttagttccaaaggattttttcaaacttcgaacttttccattacatcaaaactttcctacacacataaactttcaactttatcgttacatcgttccaattttaaccaaacttccaattttagtgtgaactaaacacaaccttagtaccactttgggatgaaggtgggggtggagtattgatgaggggcaaagcataaaatatgctttgaaatgtgagagtgatatatatttttaataaaaatttgaatgctaatgacaaataatttgagacgaatgaaatagcatttcatagttttttattactaattttcacatatatgtgttcattcgggctaaaaaaaacttacaacttccttcattttaaaatacattgttttaatctcctattaggttattatatttttagtgcggatggagtacatattaatttgctactagctcacatcagtagaaaaaaaatatttgggaggaacacaattaaacatggtggcagccatggacgtatatacggagtagctctttccatacgggtaaagttcctaatatacaaaaaaaactagtatatgtgtatttttagttggtgcaaatatcaaaagtaatactcattacagtattaattaaactaagggtgcgttcgatccatggaaaatgagtgagatagcacatctttttccgcgcgcacgcttcccaaactactaaacggtgcgttttttgcaaaaattttctataggaaagttgctttaaaaaatcatattaatccatttttgcaatttaaaatagttaatactcaattaatcatatgctaatggctcacctcgttttacgtattttcccaatcttctcaatcccctattcctcaaactcaccctaagagaatgtgttggaagtttatgcacaaagtactaggacagccagcaggttggcgatgtttgagggaaagacagccaactgcgctgccacagtgccactctcgcagtgcatgttttcttggattgggggattagacacggtccgttaacatcagtatacaactagaagcccgctgtttccacagattgctgctcgacaaagtcactgcaattagcactagtacacaaaacagagtatgagtaacatcttttaaaaaaggaaaaaagagctacacaaacagatgctttggtagccttgacacgagagaatagaaggaaccactcctattccaaaatccctgctctcgatctcccaaagcaaaatcaccgatcgatcaggatcaaaacgtacgtacgtacggtctcgatctcccccctttctttttttttttgctcagctctcgacccaaacctttctgcttttcttttcccccttctctcctctctttgtgatgctgatgatgcatactgctacggtccaagacgtcctttggccgtctgcctgtctgtgttcaaaagaacgaaaaagcacgagcctgcctggctgcctgcccggcgtccgtcctggggcgccgtatgtcacgctctgcggcgcagtaccagtgcggtgcatgcatggcacggcacgcgacgaccaacgctacgctgcgcagcggctcgatcgccgagcgagcgagaccgtgattggaatcaccacccaaccgcgtgccgctgcccgctgcggctgctgccccccctactactcctagcccttgatgtccgaagaggatttggattggattggaccggtcgtcgccccaggggtggggggcccacgcctcgcactctcgctgacctggcctaaccgaatcgctgtgccgacgtcacccgtgctgctgctctgctctgctggggtgtgagggtagatgggtcatttcgccgcggtgggacccgtgggacgtgggaccacctgggcccctcttgctaccaggtttgcgcccacgagacttttctgttgttttctttctcgcgtactctgtcccatgaaaaccattcattgttagaggttatttgggagctagtgactaaataacatcggatattttgacactaatttaaagtattaaatatagattaactataaaacccattccataatcttggactaattcgtgagacgaatctattgagcctaattaatccatgatttgataatatagtgctacagtaaacatttgctaattatggattaattatgcttaaaaattcgtctcgtggattagttctcatttatgaaattagtttttttattagtctatatttaatactccaaattagtttctgcacatccgatatgacatgtactaaaaagttttagccccatctaaacacctccttagtattaaacgtggatatatcctaatagtacaaatatagatgttttttaattaaatttatagtactagcatattcaatatctaatactagatttttttttcttatgaagggtgtacggggttacggtcaatctttcacatatttcacgaggggttacaatgttgggaatttgactctcagattataataagaaagcagctacaatgctaggccatgttttcgttggttattgttgacggtcgttaacgatcagtttcgcccgtcaataataccaaaatagaggagaactagttatggttgcaatgcatatccatgttagaataataatattccactagtatttggatcactaaccttttgcagagaataaccataaaatggagaggaatcggcatcaaaccagacgataaatcaatcggacgatgtcgaggatcagacttatgtatgaatgagccaagaactcagaaatgacatgaccaattaggctaaaattcacaagcctgcagagaggagaagtctaggaggacgctagccgaaaatgggctggattggactagtccatggtttggccgaaccagggggttcggccgaacccccatctgctccgttggacatagggtttggcgtggacgtctaggattgctccccaatgacggttagagggcatttccgaccattccaactgccatgatcgtcattgggaggctataaaaggacttcacttcctcactcttttcacacacctcaaacaagagttctctcatattctctcaagttagtttagtgttctcaagctagtggaataggaatagagtagaaatcggagtccggaagccttcggaagagtttgggtatggctctagtagctcttctcttctcttttgtaagctttgtactttttattagaatactcttctttatacatttatggtattggaatactttccgagtatatgaatgccaactttaccctatgttcatgttatactgagtatactgctagcttatctgggagatgatttggtacgggtatagtgtttgattatgcaattactctatgtcatgatgatgatattagagtagtatctggtagtttaggagtggtttctagattacgggatatcattatttagggttatatgctgcggatgagaggtgggccgctgatggtgacagatcagtaagggtattccttcgcgcgtgtatatagtcctaagttaatttccaggggagggtactcctccgtatttagccccggttgtatggtcatgatgggctgtcgtaaggaactcgacagtcaggggtggcttctcgaagtaccaggagggcatcggatagagggtattagctagtatgtcagataactaggatgtatgtatactatgtatactagaagtatatgaatagatcctctttctctttttctttccacttggcttagatattttagtatgagaacgagtagcttcctgcttgtgtgtcactctacctttggatttatcttaacccctgcttagactatgattattacaagtaacatataaataattagtcaggttctctctactatgatctttccacaggattaaataaatacgatacccttggaatactctcgggtgaaatgctacaatagtatatccgtgcgcttgcggatgaactctgtaaccaaaatataccaggagtatttctgcgccattactaggaattatatttctggtaatgtcgttaagaaataccaacagttatcatttttaaccttaaacaatactttcatttcatattatgaaacaatttaacttctttctaatcaaagttatttaagcttggttaagtttttagaaaaatagccacatttaaaacacaagattacatttattaaatctaaaattaattttgttttgatagtatgtttgttttctcttaaaaatgttgctatgtttttttatcaatttaatcaaacttgtgtcaaaccgtcttaatataaaatggagggagtattaacatataataaaatttggtagttccatgcacctctatttgtaaaattagttaaaaaaacaactagcttattcccacgctccaaaataccaataagtagtaaaacatatccctagttaaaatccaatcacaaattccaagctggatgctttttacctctcaaccaaacaaacattttgcatcggtaaacttacaccattatggtcttatcttatgttatgttaatccaatcaataagggggaaaaaatgatggctagtccacatgtcatgcacttctctcattttctttctccgcataaattaattcaaattgcaagatccacgcaaagctactcaagttcttttaagatcattctttgttcatgcatctcttcctgtccccgactatttaagatcctattggggagcttttgagagctgatgtcgctatcagaatctctttcttgtctatatatatttatatttaagattctctctcaagatattactcactccatctcagaatatagtaacttgggattggattgaaagttttgtagcagtacgaatctaggattgtacaaatccttatatagatttatagtactagatgtgttcaatttagtcttgggttaaaatttttaaacagaggtactaagatttggtagctagaaaatacagaaaataaactgtggctataagtttgaatgcttaacagttagctggcataagtccattttacacctgatcacagctcttgcctttgtctaaaatttactcttcaactctaaaatcaggcatctaacacctctaactattaaaaccgttccatttatcccccagaccaaactaaagtggtttttcatgggcgtgcttacgtggtgtctacatgtcaatcttagtcagcataactattaaaagtaataatggcctcacatgttaagggacatctctctccctatcttttctctcatccactggtccccccctcccccgcttcttgctagccttcagcggcaatgaccgccaccaacgtccgcatctatctcctggacctacctctaacaacgagcacctcttggccataaaatcggtgttggcgagctcaaactctgcctctccaagagcctcttccatgcactggcggcctcgagctttgactaaccgcctcctcctcaatgtgccggtgagctcgagatcaacctcctccccactctcccacccctctgtatcaaggtccaacttagccactacgtctgttgagcttgctgccctggtcttggtgacgggtcgcttaaacaggaggaggtggcagtggagaaggagctatgacaatgcatcgaagggaaaaagcagtgtcgcctgactgcgtaggtgcagcatggggaaggaggtgaaacaagctgctgcggcaagcattgatgcaacctacactatcctccatttctaggagaagatggtcagctgcaaaggtagaggagacggggaggaggtagccaacaacggaggagatggtcggcatcaagatccaatgccagcttgcccaacattatcgtaagccggagtggaacgagctcaccggccaataggtgagatataaattgaagaggagacgatgcgcagagtcacctccatcgagctcatcatggaccctcatgtcaggggcagcaggacagagaggggggagggagatgagaggaacaagaagatatggtggcaatgataggtgtgacccctctctctcctcgctgaggtggactattgtgtacatgtgcattgatatcctacgtggcatccaatattgtataataccactacatagattttttttccaaacgagaacccctataggttgctggtggaccataatcgctctcgcctgcaaaaattgttttcagggggaggttaaggggcttcttaagactctttaagagatccgtctacgaaaatatacttattttcctaggcgagactcttaaacagctgtgtgcgaaaatgtattttcgcaaacaggcctattaaaggcccacctacaagtctaacttcctcttcctcttagcacttcaaaaattttcaaagtcatcatccttataatctcctcatcttctctctcacctcctctcctcctcatattatctctcactcctctctctctctctcagtctctctctctctctctctcatttctcacctcctctctctcgcacgagttctcctcccgagtggcagcgacgggtggctggctagtggcgggctcgagcgggaccgggaagcagcgggcttagcggtgatgacggcaactgcggcaccaggatgggctgatccgcgcggccgctaccattggggtgaggaggggcagtggtggagatgcatggaggggcgacagcagcctcggcgacgatgacggcgatggactgcggactgcggcgacgacgtcattgacggatgggagtttgctagggttttgagttttgattcttttttctttggaatttttattttttcggatatttatttttgcatgtgtatgacataagcacccgcatgcgaaaatctgatttttgcatgcgatgcgccacctgcatggaaaaacaactatttttgcagacacttttgggcagacggatggctcaaccgcatgcaaaatttggttttggccacatgcaaaaatacttgttgcagtagtgaaaccgcttcacaagagttcagaggcgtaaaatggaccttttacctatcaattactacttaaaatctcccgttaagaccttatttttgggagcttataacaactatacctataattttgggagcttataacaactatacctatagactctagttcctatgctgtcaaattcttacttaagattctgagacacactaattataaaatcaagaaataagtatattagtcattaaggcctccatacgacggtccttatcgcttcgcctcaaaagctctagcgaaaggcgatatctcaggggaaaaaaaatcttcgactcccagccccttttcttccttctccaatggccatacggttgtcagcatgggattaggggagggtctggctcctttattcactagtagagataggtttagatttagtcgggtctctctcgttctcgggttctacctgttctttgtgtagctcaagagggtcgccgacattcgactcttcttgtctcagcttgatagacatggcagacctcgtcggtgttcttgtcgttgtcgtcttcctgctcggtgaatcctaagctcatctcaaacgctttcagttgggagttttgctattttgcttttgggttgaaggattgttctctagcccgtcgaacagaaggagtgcaccggctttttgctccatcttcggtgtgtcccgcacctatggtggtcatctccaacatcagttctgtaaaaggcggccgatgatttctcctatgggctaaggtgtcttcaacctctgttgagaggccccatttgggtatgctttttggctctacccattgcagttaaccattgttcttttgctccttccgtcgccgtgcgtgaggatctgatcatcattgatgtagtcgttgcaaggacctgattgcttttttctatattttcgcgtatgttacgtttgaagtgtaatttgctcatcactcatgggcttttatacaaaactagttgttctttcagccttaccccattggggaatgtaactcatgtactttgtccttaattataaaacacatgagttttaaaaatacatacattagtcagatgcattctgtcatggtataaggcatacctcctatcctacgacttatggaatgtacgagactggcataccatcgttcatatgatatatttccgtatgtggtaaggaagtatacaagatattatgggaagtatcctcatgggctggtgattaacagagtcccactcgggaggattgggttgattctatatcatgcgggattcattgtctctgagttatatttggagactaaggcaactcttgatataaaaggcacactccctaaggggttcagatcatcgaatcatagcaccaacacactcaccatagtttacgaagccggaggatgtaaagccaaattcgccgggagatcttgtcgact

SEQ ID NO: 14993 - DNA, 713 bp, Oryza sativa
ttcatctttgaaggatccgataatgccttatccgctctaggcgtccccagccgaagttcccttaggttcctcagaggccttatcaagacggcgtaaagggacattaggataggtttcaacgctaggtgtcttttgtggtaagggatctctgggtaaaacacttggcattattgtgtacctgatatcaactttgttgaagtagaggtaatgggagaatcgctacacctctggtcaagaaccaggtagtagtcgtaactcaaccactagaagtaaatgtacgagagatcgctacaattgactggttgagaaccagtgagtaggtgtctctcgatcatttgaagtcgtggtacgaggaccgctgtattattgctgtagtcgtacctcgactatctgaggttgcggtgcgagagattgctacgttctggttcgagaaccagcgagcgagtagaataatctctcgaacacccatggaggttgcggtgtgagagattgctacgtactggttcgagaaccagcgagcaagtagaatcatctctcgaacaccaatggaagtttgcgatgcgggagattgctacgtactggttcgagaaccagcgagcgagtagaatcatctctcgaacaacaatggagattgtggtacgggagattgctatgtactggttcgagaaccagcgagcgagtagaatcatctctcgaacaccaatggaggttgc

SEQ ID NO: 14994 - DNA, 602 bp, Oryza sativa
tcactggcgctttctacaatagtgctggcacataataaaaaagaaaattgtggatgtttttgcaagctttcacaacctcacaggggggaactttggaagcataaacagggccatgataacactgttgccgaagaaagactcgccacgctcggtgaatgatttcagacccattagtctgatccactctgtggcgaagcttatatccaaaactttggcaatgagactggcagcatggcttggtgatttggtctcgcatgcccaaagtgctttcatcaagaagagatgcatacaagatttacttcctctatgtgcgcaacatgatccggtccttgcacatgcaacggaaaccatccctcttcttcaagttggatataacaaaggcatttgattcgatatcttgggaataccttgtcgaaatgctgcagtggagaggctttagtcagcgctggagaaattggattgtgcttctcctatcgactgcatcatctagaatcttactcaatgggatagtgggagaaccaactacacacaggtgaggcctttggcagggtgatcccctctcgccctacctcttcatcctagcaattgacccgattcaacga

SEQ ID NO: 14995 - DNA, 523 bp, Oryza sativa
agggtttctagagtttgaactctcttgctctccagctctttgtaactccttcatacacagatccaccagaacacaggagtagggtattacgcttctcagcggcccgaacctgtctacatcgcccgtgtcttgcgcatttgctctctcgcgaaacattccacagatcgagtgcttagaacctcacctagcgcccccggccgaaccggcaaggggggcccgcgcggtctctcggtgaggagccccacgctccgtcaccggcgatcacgtacccgagcgcaaggtattcctccatcgcttggacagacaggccgcccctaatatctgcaatctaggagttgttgcagagagcggcagccactgtgatgtcactcagcttgacgaaggagaaaagaattgggaatctgtactgcactgatcctccgtctggcaacaagctatcgcaccaaaacgaggtagaggctccgttccccagcagtactttgctactagcggcaaagcagtgcagtgactttctgtcagctag

SEQ ID NO: 14996 - DNA, 1425 bp, Oryza sativa
cttcacactaaggacttcatgatcaatgatctgttccactttgtgtacttctactgactatttgcgtttaggtggcagacattgatcaagagcttgcaactgcaattttaacatctgaaatgagggaaaaacagctttctcctggtaattgctttgttttagataaaccactataccagtgtgccttttatggcttatccatggcagatcaacacaatttccagttttttttctccttttgacttatgaatgtgtatataacatagtgtggatggtagtaggcatatgtaatcatggatcgatgggctctctttctcctattttagaactaacaatattttcactatatcagcctatattgcatccagaaaattgtgtttgctacttagggctgctaggaaacttttttgggtgtaactaacatgcgttaacatttattctggatgattgttattctacagaaaaggttgttgctgccattgatccagagaaggttggcattcaccaaaggtacatataatgaatcgacaaaatcattacaagttagaactcaagattccatgatgatcctccaatgatccttgttaaaaaaatgttaaatagtaacagagtgaattatgggtatacgttgtgcaagtttgttcattatacaattgcatgatcataaacaatgaactaatagcagtttgtcaggcttcttactaattacttggtatcttgggatccatcaccactgtagagtgacctgaacattgatacgattgattgatgatcttgtctttccatgccagattattcgagtaaatgctgacaataatagttgtaaccaaggggggcctgtttggatcaattccattcctagtgttaccaatttttttgggcaatgacaagatttgtctattgccaaaaattttggcaagaatgagtgggttctaatttgtatgggcataagagtgatgccaaataatttggcaatggcagttctttaggttgcaaaccaaatgggtgacaaatttcttggtgttgccaattatttggcatggttgaattggggtataaatcaaacaggacctaagcgtattctaaatatatacgaaggaaacataatgaggctcaatgaaataacatattatgacttgaagctactgtatcatatgcgtattatattaggtagttcttaatcaaatatagttaccatttgcatgtttctttgaaagctctatgtgttctatgccttttgtactcttgctgaataaattcctcagcttttatgaaatctgaatatgctaagttttgcagatatttgcaatggttgattgaggaacaggaatgtgatgagcctcactatcacacgtcatatgcattgtccctctccagatctgccatggacgcagtccgtttgggatccaacaatgaagagagaaa

SEQ ID NO: 14997 - DNA, 2011 bp, Oryza sativa
  unsure (1)..(2011): unsure at all n locations
tttaacaccacgccggattgtatagcggaggtgtacccctatgttgttgttgccggggactccaaggtagatgtctacagaagaaagcccggcgcacatttgcaggctattcgtttcgcatggcctggtacaggtggactaattgtagcgagcgaggatgccggaattggcagcgacgtagttgtgattgctacggcttataaggtaacgtaggtatgtcaactcatccatcggtgcaacttgactcaaaatttccaatctgctctaccggattgcttagctactgagctgcgttctgtgtttgttagtaatactcaataattacaatttccaatgacaagacaatgattttgtatgctcaagtgaaaccctgacaatggattctctcataaatgtgcagcgccattttatcatgtcgattttgtatcacacactgtacttatggacacatttattggcttggccaggtattttgctaccgtaaagtatcagcggtggaacagatcaaggcactactacgaagaaagagttatgcagaagctatttctttgttacaagagttcgaggccgatggggaaatctcaaatgacatgatttcctttgtgcatgcacaacttggattcttgttgtttttcgacttgcgtttcgaggatgctgtaaatcatttcttgctctcggaaactatgcaaccagcagaaatatttccattcatcatgcgggaccctaatcgttggtcagatctggtatgcctcattaccacatgttaattgtaatgctgtatctcctcgttgatttctataaggcatattttgatttaaaaagtcaaacgttgtagattttgaccaaaaactagacaagttacaaataccagttcaaaatgttttcacacaattttggttctatttagaatatattttatgacaaaaaaaatccatgctcaaggtttaacactgtagactctttgaaatcaaaatacgccttgtaaaatccactggccactgggtataaataagacaactgttttaacacattccttgttttatgttttatcctgtaatgtgctcgaggagctgactaactgcacaacctttctcatgatactctcttaaccttttcttctgtatgtgaaaagttcatgttgaatgctgcaacttcttttatctctttaatgtggttttcaatggataagactttataatttcttgatatatgaacccgttcctcttgagtatcaacatgagctggttccttcaaatttgagcgtanagcttatattggtaggcacatctgttaagttttgatctgctagattaatttgtcaacatatttttgtaattgtcaaatggaatctgtagttttcatcacctaacatactgattaagttctcaagacaaactgctcatcttccactatgactggctgccttttgtattcagcagttttttatctgattgtgaactttgtaaattttaggtgccaagaaagcgttattggggcttgcatgctcccccaaagcctcttgaagaagttattgatgatgggctagtaacacttcaacaggcattgtttctcaaaaaggcaggtgtggacacagttgtggatgatgatttcctttcaaatccaccaagcagagctgatctgctggaagtagcaatcagaaatattatcaggtttgctcattcacgacattttttattcattacgaattgcaaataagctgctccatccagctgatgtctgaatgctatatgaaactaggtacctgtgtgcatcccgagagaaggatttatcttcttcagagatggaaggggttgatactcttctgatgtatctttatagagctctcaatcttgttgatgacatggagaagcttgcatcatctcagaatagctgtgttgtggtatgtaaatcctttaaacatctgcaaccttgaagcgtttaagactgttacacacctacgatacttaaatcgacattaactcttcatttgagaacagtacataactacata

SEQ ID NO: 14998 - DNA, 1200 bp, Oryza sativa
  unsure (1)..(1200): unsure at all n locations
cacctattgtgggggcctttggaatgggtggctgttaccattggccatatttgcgatgcattattatgcccaccatcaacgatgaatagatgatgcatggtgcctctgtcctttcaactttggttgccttttcaccagttatattgcacaatttggttcagtgattgtttcttgccctgtgattgtcccacatggcctgattagctgactgaaatagtttatttcacaacccgcccttttgacataggtgcacatgaaatttccttgttcccttgtgatcgtctgatctcttctttgtagttgcctcctctttgtgtaaagggggaaaaacacttgttttcagtattttgcatcctctggtatcaatatagtactggccacatttttccaatattgccatattggtatagactttttttggtgactatgtgtttccctgtggtgggcttctgtattttgattcagcaacgtagatctgcattcaagttgtacaaacatcatagctaatcagttattgagcctgataacattatttgttcacttttcatgctatgccttaatacaatatgggtacggtttgcactgttaattcctgccgtttgggagttgacatggtttaatttgtgtctgctggatataggtaatgcacatggtttgggagttgaagccttgcgaatgctcatgcaaatggtcctcaccaatgaggaagagcttaaactgaaatatttcaaagatgatctatccaccaaactttgccctgtggaagcttttctaaaggcagtgctggatattccatttgcgttcaagagaatggatgctatgctctatgttgccaacttctatttggaggtcaatcagctcagaatgtcatatgctactcttgaggtatagttgagcccttggttgaatatttttgacaaattgttttgcaccctttgttgaaagaagcaaaacataactttcatatgcaattgggtattatgcatatcaatatttacacanatgatttgaatctgtgaacggaatagaccctcacttacttgttccttgtttatagtattactcatctctgagggtttcttatcgtttttcatacaggcagcttgccaggagctgaaaaacagcaggttgttccacaaggtccttgaggctgttttgaactttggcaacttgatgagtatcgatacaggatctccgaat

SEQ ID NO: 14999 - DNA, 550 bp, Oryza sativa
agctgacctgcctcttcgtcggtcatggccgcgttgtgacggcgccggcggccggaggacgggacgaagctacgcgcgctgcggcggcggcggcgatcgactgctggtgttgatcaggattcaagggagagaaagatagattgttcatgggggagccaaaccagaggaggttgtaccaagtctggcagggaagcaacgtacgacacgatacgatcatctcgcctctctcttccttccattacttctctttgaaaatcttcttgcaacctgcaatttttgttgcgataatccttgtgaaattcagatcaatattttttttgtttacactttgagatgacagacagctttgctttctccatttttttctttttcagaaatttctctgcggcggacgcctgattttcggtccggatgcgggttctctgttcctgtccaccgcgctcatagtggctcctctggtaggcctatgctgcccatgcatcacaaagatgaactcgatcaggtcagagaaacaagatcttggccttccctgtcgtcattgccaccatcg

SEQ ID NO: 15000 - DNA, 555 bp, Oryza sativa
ggtctgcacccattgcataatgaaattgttttaatattcagcaattcttctgaaacagtctggactacagtaaagtagggcacataattaattttgtaaacaagaaaaggaagttgattttcttacctcaattatcacatgcatgtcgaattctttggtgtccagaccaatcccttcatagaatgtagtacgttggcaatcatttaggtacatggtcacatacacctgcaaaggatcacacacaaaaactgttagaagaggagcacagtaacaatcttcagtgtgaactgttggtccatgccaaccacggaatagcttggaagataaccgaaaggcataagaaccgtgaccagagcttggccttccagtcgttgaggaactgcggctgcgccttgatcagcgcggagaagaaatcaccgtgacggttctcatcctggcaccagttctcaaagtacttgaagatggggtacacctggtactccgggttcgccttgaggtgcctgaagatgtgatgtacctcagtaccctaatcttctccgacaggtaggtcgcgta

SEQ ID NO: 15001 - DNA, 886 bp, Oryza sativa
ctatagggcgaattcgagctcggtacccttttcaaattgctaaacaatatgtttttgcagcaactttctatatgaaagttgcttaaaaaaattaaattaatctatttttttaaaaaagttaactaatacttaattaatcatgtgttaatgaactgttccgttttccgtgcggagggaaagagtttccatccatgatctccaaacaatactgccggtgcttacgtactcaccggacagcaaggagaggacgttggcgacgctctcgttggccaccggcgccggcgacgcgccgacggtggcgaccgggcacaccgccactaagctgatgccgttctcctccgccagcttgctcgcttccttctccgagagaaccttggcgatcgcgtaagcctgcagcgcaaacaccaccgctgtgctctcacgcaagcgactgtactatcaactctgactgaacatgtaaaattttgtaagtttgtgtgtacctgagcaggagatatcccgttggttgatctgaggtagtcgaggtcggaccaggacgactcgtccaggacatggctgctgccgttgccgtctccttgcagcggctggccggagacggcggccgccgacgatgtgaggatcacgcgcttaaccgtgccggctttcacgcacgacctcagaacgttcagagtgccttggacgccggcttccaacagttctttctgccattaccaaataatactctagatcgttatttcagctggttattatggagaggatttactagacaaaccaagtaaattaatcgtgacgatacaagtaaaagtactctcccgtttcaaataaaacaacatagtattggattggacacgtacataataaagttgtttattattattattattat

SEQ ID NO: 15002 - DNA, 2471 bp, Oryza sativa
caagtgcctgcacatgagacggcgcgaggggtgatttaaacagctccaggtaccgcaagaggtcctgctcttcaaccttgttctcgttgtcgacgacgccgagtcttttcatcacgacgcgttgcgcccatggcggtgtgtagggagctgggcgagagcggtgtcttggctgccgaggcctcttcccaaggatggatgtcgccggcggagtcggcctcagacatggcggcggcaactgaagcactgagtggctggccaggctgcaaagctgggccactcgagggtgaagtgcgctcctccagcccagacccagacggctgaagcgggaaaggtcgtgggccttgaagttctctccggcggcagtagactcggtttgggccgaagaagcgccaatccggcccatcttgagattcctgggggacgtcgtcgaagtaaacaagcagatagaagagaggaagcacgcacacacttgtgagttgtgagtcttccactaacgagttcaagtcaaagcggttggcgccaaaactgcatactcgatccatctgactatatatacttactacacgtaccaacaaccaactcaggatataaattaactcagcaaggaaaggaaagattaagattatattggatggaaatggcgcgcgccgtcgtcctgctcctgctggcggtggcggcgttgagctgcactagtgcggcggcgtcggggccgagctgccacgccgacgacagcgccgctctgctggccgtgaaggcggccttcaacaacgcctccttcgagtactggacgcccgaattcccctgctgcgactggtacggcgtcgactgcggcgacgactacctcccctccgacgaccgcgtcatcaacctcgccatcacacgcgacgacaacatcaccggcaccatccccggcgacgccatcgccggcctcacccgcctccggtacatcaccttcttcaaggtcccaggcatcacgggccccatccccgccgcgctcgccaacatctccggcctcagggtgctcaccatctcccacaccgccgtctccggccccatcccgtccttcatcggcgacaagttcaccgacctcggaatcctcgatctctccttcaactcgctcaccggcgccatcccggcgagcctcgccaagcccccgaagctgaactccatcgacctcagccgcaaccgcctcaccgggagcatcccgcggctgctgctgagcaaggccgggcagcaagcgttcctgacgatgtcccacaacaacctgacggggaggatcccggcggagttcggcgccgtcaacttcgtgcagatcgacctgtcgcgcaaccagctcaccggcgacgcgtcgatgctgttcgggtcggggaagaaggagctcgtcagcgcgtacctgtcgcgcaacgcgctgagcttcaacatgtcgcagctgcagctgccggaagagctgaatttcctggacgtgagccacaactccatctacggcagcatcccggcgcagatggccaacatgacggacatgcagctgctcaacgtcagctacaacaggctctgcggcgtggtgcccaccggcggcaacatgcccagcttcgatgcctactgcttccagcacaacaagtgcctctgcggcgcgccgctttctcactgcacccattgatatactcctatatgatatgaggaccataatcatccacctacaattaatgcagtcttaatttgctgcttgcaattagtaatcgaataatcctagcaaagcaaagcaagctaggagtagtatataaataagaaccttcgatcggttcaggttcatgcgtgatgtaatgttttgttcgtgcttgatatggagtacctatctcaggccaccaacacatagtatgtacaccattcgtttcaaaaataaatcaattcctagctacaaatttagacgtagtgttatccagattaattcatagataggatttgattctttttataacggagggagtatgttttaaaggttgggatcaggttttgctttttcgaattaaccgatttgatcggaagtcactgatataccaaaattttgaacaaaatttagttaaatttgaacaaatattaccaaaattcacaaaaaactaaaaattttcagccgaaataatatcgtattagaggggttcaaaatgaccgaaattttggaaattttagtccgaaattttcagccctggttgagatgcctgcgggaaataatgtctgattcatactaagagtatgaagctacgtttatatggacatctttggcatagatttggatcccaagatttgtcaaagctgggtattcttaggttcaaaaactatggatgcagatcgacgtttacgttgataacgtttaatatatcattttattttcattttagatgagtttatttttaaaaagttaaatcactataatttagcgtaaaaactttaaatatatcgtgatttgagatctgaaa

SEQ ID NO: 15003 - DNA, 560 bp, Oryza sativa
tgtttttactactaaagaaaaggccttaattaattattgcgcaataaaaccccagggctgacgtcatcaagggagggggcgcggcgccggcaagcgggccccgcctgtcagcggcacgaggcggctggtccaccatggaccgggaccacgcgggtggtccaccgccggtccacgggaccgactgtccagatcggccgggaggccgatcggacggcgcgggcggtggcttggcatggctcggctcggcacaaaaccgaccggccggccttggggagcggcggcggcgagcggccgccggcgacggcaagcggcgccgcgggaggcggcggcaaccggcgcaaaagcggcggcgcacggccgaagacgacgacgcacgcgcggatcacagcggtgctcatgggagagaaagaggaaaggaaggaggagagcgggattcctcactggcgagaacggcggccggcgcgaaggaagaaggcggcggcgacaaccggcgatgcggaggcgcggacgggcggcggtggcaccctaggagggagcagagatgggttaggggtggggta

SEQ ID NO: 15004 - DNA, 619 bp, Oryza sativa
agcaaatccttttctcgatgcttttatacccttgccgtcgctgggcctggctcctcgtttctcgcgcccactatctcgctccctcgtatctcgctatctcgctccctcgtttctcgtgcccacgtttccactaatcccattcgcccgcttacggcgcgtgaagtggatatgcggttgtggcaatcgaaatggattgtatcgtgcgcgcgttaattacgctcgccgaccgaagcggcgttaccgtatctccgggcgagacagatctgctcacccagattcgcgcgctgctcaagtggtgtggcagtcttgaatagaccgcccattatggacaaccaaagttatcaataccaatgtgcatggattgagaccgttgggtattttgcccagctacggaaaccggtcccacctgtcaccaggctttaggggtggcgtcacacctgaccgcttcccttgggaagggaaattgctctggcataacgccgggggctactgtcggtgatatgggaccgggagtatcatggccagaggcttgaggcagacgcaatcgcccacgtggcctggcaccttcggggacgtcgggcccgagggtgaggtgtccgccctcctcctgatctccccc

SEQ ID NO: 15005 - DNA, 1922 bp, Oryza sativa
agccattattgtacaaaaccaagtgtcatcggttcagtatagagggctagaggcggacatggagccaattctaaaccatgttcttaggatcaaaaccaagtgtcatcagttcagtatagaggcggacatggagccaattctaaaccctgttcttaggatcccgcggtggatgagttcccagcatcatttttcttcatgtcttcaaacttatcaatggcgacctgcagctcatctgtgcctcccaccgctctcatggtgtagtaatacacgccgaggacgaaagcagacagtcctccagccaccacaaagttcttggtcttgggtgccaggctgccgaatcccgccatctttagtttgcaccggttgttgcagaaactgaagaagagaatgttacagaaacaggaagaagtggtgccacactgatgccagttgacctttagccaaggcacagagctatatgggatatatgaatttaaactgaagatagatatggtttgctgatgtagcctcaagactaagaccctgtttagatgcgactaaaacttttaagtccctatcacatcggatgtttggacactaattataaatattaaacgtagactattaataaaacccatccataatcttggactaattcacgagacgaatctattgagcctaattaatccataattagcctatgtgatgctacagtaaacattctctaattatgaattaattaggcttaaaaaatttgtctcgcaaattagcatttatttatgtaattagttttgtaagtagtctatatttaatactttaaattagtgtctaaatacagagactaaagttaagtccctggatccaaacaccacctaaactagtgtttgtctttaaatcacagtataactaaaagtgggaatttgtaatacaagttccgattatactagaaaacactcgagctagtcagtgctagaatatcaatcctggacagaacccatctgctacaagtgcagctggcaatggcaagttcgagagcataacattagcttacttagcagtggggaggggattgaaccataccagaacatagcctagattgatttggacatggaaaaggaaaagacttacctcacagcagtaaattttgagagattaataattttagaccaaagaaagattagagatttaaactaggtttgatggttggagtttggctagactagtaatttcgggtgtttactgtttagggagagtatttgatctccctaaaataaaaaataagctatcatattcagagtgaagggccttagtattagagcgtagaaactcatcatcacctgtttcagctactgatgatgttagtacactaaaatcataaatatctcagagctccttttatactggatttatagtggtacccaaaaaccaaaggcagtaattgtgtagaaagcaaagattttcatattatcggcacagacaggtctctgtattgtttttttttgttcagattcagagttggtttgtaaaaagactccctcgctctaatatactcctaggcagagtaggaaattgactaggaaaggatgtaagcaaacatcagatccatcgcaataaactttggcctacaccatgcatgagaatgagatgaagaaatccccaaaagatagataaggatgagcaagtctccagatgagagatccggctaagttttttttttacctttggcgaggagggagggagggctgttgggggttggtgaggatgcggcggcggaggaggagagagtggggtggaggaaggcggcgccaggcgagcgagagagagaggtcttcgtcttcgaggatgaggaggtcggtttcctgttcctcccactcccagtgggccaatgggccttgctgggctgggctaaactgcaagccggcccgatgagatgaacttcaccg

SEQ ID NO: 15006 - DNA, 2164 bp, Oryza sativa
caaatgcgtttgagcttgttcagaaaggaaaagaagatcgagtgtcattaggtgagcactagctgagtcaggctcaggcatgcaagaagcatttaattttttactagtttagtttgctagttgagctcagcatgaaattatatatattcattcattgtgtgtccgttatcaataaatgtaaaaataaataaataaagacgagcgatggtactgctgcctattgtgacaggagtatatatgctatatagacaggagtccgtccttaattccgggtaatcagcaaaatgatgactttgacgaccaaagtaatcgctgcaagtgcaggatgaaatcaatcaacgagatatataagcagataatacatacacatatagtaataatactatagattaatagatgggatgtgaatagagaagtagtatagtaagtaacagcagtagatggttgctgcgagtattatgtggagaaagaggaaacggtagcaatgagtcgcaagcagcatgtgcaacagaaagcgaagccgcaccaaccgcatacaaccggtacagaaagaaatatggaatggcaatgaaagcatgatcaacaagtgcagttgcagttgcagtgtagagcaggcaccggtcgaattcgagcctaataacttgcgcttctcttctcttctctgctgtgctttccatccatccactcccacgaaccgcacctcaccttctttctctttcattctctctgtactgtacgtacgttgccaatactagtacagtgagtgagtcatttgcatctgcataccctaccttacctgctcctactactgctcgcctcgcttacttactaccctcctgctcctaacaacaacaacaacaacaacaacaacaacaaggaagctctatcgggaaagaaataggaggaagaaggattaaggaaggaaagcaaagcaagcattaattaaaggaaattaggaaggatgtcagactgggggccggtggtgatcgcggtggtgctgttcgtgctgctctcgccggggctgctcatccagctccccgggaggcaccacttcgtcgagttcggcaacctgcacaccagcgccatgtccatcgtcgtccactccatcatctacttcgccctcatcaccctctttgtcatcgtcatcggagtacacatcaccaccgattaatttttacttcttctttagtttcttcatttctgcagttcgtctgccctgccctctgtaatctctatcttcttctttcttgctcatcctgtcttctcccctcctccatatatatcctacctcatattaattctactatctacatggtgcttccttgatgttcagcacatcaaaccatgcataaaccaagactgttttaaattattactgttttctactagtattatatatgcatgggcagttggcactgctatcaaattcagatctcatagctagcttaattgagcagtttggcacatatattctcccaaattttcagcctctactcttattactcatgttattattatcatctcctgtataaatgtaatcattggatggcctgttctcgatctgattcaattagctagttgtacagtttaaaggcgtgtgctcagaatcatccatgaaatggatcaacgcgatcagtattcggtggtgtaagtgtaaaaatatatgcatgtatgtatgtatgtatgtatgtatgtatgtatgtatgtatgtatgtatgtatgtatgtatgacaggcaaacaaattaacacaggcgttgcaacaacatttagttataataatggataaccacatcaagcataaagtcgttgaagcgtagaatcagagagtccatcaggacagggaaattgcaaggcgccagtgccatcaactttacgttgacactgcaagtgctaatgcgtagtacgtctctcatcactgctcatgatccatccatccatccaaccactccatctgcgtgtgtgtatatgtgtactactctactttatacgctacctgtttgtactcccagctgaactgaagttttataccattctgttttcccaactgaagcttcaagctgaggttttgtacatatgcaatgcaccacaggctttacctagaggatgaagctgacaagcacaacaagtaactaatctcttgacagataccatactatcagatag

SEQ ID NO: 15007 - DNA, 547 bp, Oryza sativa
ggccccctgccgccggcgctcttcagcaagctcaacaccacgcagcagggcggcgcctacctgaggctgtcgcggaacaacctcaccggcggcatcccggccgagtacggcggcgtggcgttcgaggtgatggacctgtcgcgcaacgcgctgagcttcgacatgaccgggctgcggctgcaggaaggggtgagctcgctggacctcagccacaacatgctgtacggcggcgtgccggcgcaggtggccgggctgagcagcctgcaggacttcaacgtcagctacaaccgcctctgcggcgagctgcccgccggcgccgcgaggttcgatcagtactccttcttccacaacaagtgcctctgcggaccgccgctccctactccctgcaattaagctcccattacttaattactagctatgtggtgaaattatacatcagcaatgcaagcaaaataaataaataaatatatatatatatatatatatatatatatatatttgtataatgattttaataagtcaaaaacagattgatgcatttggaagg

SEQ ID NO: 15008 - DNA, 686 bp, Oryza sativa
tcacaatgacgaaaagcaacggcgagagtggatccccttgcctgagtccccgagctagcttgatcctttgagtgtctctaccattgatggtgacggtggttgacgaagtgaaaagcaaagcagaaacacagtcacgccatcgagcgccgaagcccaaatgtcgaagcagctccaaaaggaattcccaagataccgtatcaaaagcttttgcgatgtcaatcttcaacagcatggcaggcgttttggaccgatgcaactttttaactacaccatgaacgtagaggaagttctcttgtattcttctgcgcctaataaaggctgactgtgcaggcccgatcaattcatccattctcggggcgagacgaagtgctagaattttggtcaggatcttggcgaaactgtgaatcaaactaattgggcaaaagtcagttagttgattcgggtcctctttcttgggcaggaggatgatggaagctgtgttgacgagatgtaggtgctgggaattcgctctccacgcgtccccaaaatattgaggaaatagttgtatgcagcctgtagcttatcttcttcagtggtagcatagacaccatcatgacagagggtaggaattgctttctttcttcgacgtgcattgatcttaaggcgaaaaaattgtgccgttgtgccgctatgcttgaggaataaca

SEQ ID NO: 15009 - DNA, 772 bp, Oryza sativa
aaaaaaaaacatgagctttctactcacctgggtgtattccagactcacaagctttgattcctgcatgatacaagatacaaaaaatgtacacgagtaatattcagtaaataaggtagaaatctggatattcagtaaataaggtagaatctgttccggtacgaggcacataccagactccgaactacaaggttaactgattgtaaatcctcttggaaagcactcagatccccatggatgactgtgacctacaagtcagtcatgaaatgccattaggtcgccgaaaatgcatcaaaaactataaaagtaaacacaaaaaataaaaggaaaaacagttccaacctcatcccttgtcccttcaataatttcttgtgtttcatctaaactgatatccacacgatcaatccttccagcgagatgtttccttgcagactgaatagtgaaaatcaaaggccagtaagatgttttggttggaacaatgaaaacatggaatcacaagtaacacatttgagttcagcgttgctgaaagaagttaaaaacttacagtgacatcatctgaaaccttgtccaattggctgccaactacattgcaagcatcagataagccacgcttcgtgacaaacatcaaatcagaaagtttccagccctgcaaatctatgtaactttagaaactagctagaacagtgaaacaagaaatggcaagcagataggattgtaataatatgcacttgcgtccatgatctagaatgacggacagaacaataaacatcaagat

SEQ ID NO: 15010 - DNA, 883 bp, Oryza sativa
ggagagaaggcactgcccctatttaagctcctcaaacgctccgggccgtttacctggacggaggaggctgagcgggccctcactcagttgaaggcgtacctcagttctcccccagtcctggtcgccccggagccagatgagccgttgctactctacctggcggcaaccccgcatggggtcagcgcggcgttggtcgtggagcgcaacgaggacaaccctcactccgtgcatccccaccctgcgtcgactcgacccgggagagagcaggcaggagaggcccccgagccgaatggcggcccgaggcccccgacggccggagctggccctccgcctgcttgtccgacggtgccaggcgcccccgacccccaggatggccccggggccactgcgggaaggccgcgcctgtcgccctctgaccccgaggtcgtcggcacagaagccgagtgcgccccgcgtggcctctcggacgaagaacgccctggagatgcggcccctggcgaagaggatcggccccgccgaaaggtgcagcggcccgtctacttcgttagtgaggccctccgggacaccaagacccgataccctcaggcccagaagatgctttacgctattctgatggcttcgaggaagttgcgccattatttccaggcgcatcgggtcacggtggtcacgtcttaccccctcggccaaatcttgcataaccgagagggtactggacgggtggtgaaatgggcaatcgaactctctgaattcgatttgcgctttgaaccacgccacgcgatcaagagccaggccctcgccgactttgtggcggagtggaccccagcccctgagcccatctccgtccccgaggccagctcgggcccctcgcagctgcctcacaccg

SEQ ID NO: 15011 - DNA, 2059 bp, Oryza sativa
gagtccgtacttctggagtcgagagaaatcccggctgtcggtgacatgggaccgggggtatcttgactagaggtttggggcagctgcagtcacccacgtggcctgaccccctcgggggggtcgggcccgagggtgatgtggccgcccctccctttgtctccccgaggggtcaggccgctcccgtttcggccccgagggctggggcgccccgaccccctgtgggtttggcgccacgtgtgtgggttaggtgagcacagcggggctcacctaaccgcatttattgtgggttggacgagcgccccacgccctatttaatgcagcgcaacacactcgttcggtccgtgacaggtcacagtgtgtgaccggtcatagaccggtcagatagagggttaggtggtaacaggcggccttttccacgcctagccccgttcccgttgaatgatgagagcctatatgcactcgtccctagccggagcccgcgtgctgactcctggagttagcacgtcagtcccggctagattcataccaggcttcatcgcaaccattacaaggaagtcattttatgaagaagggttgacgtgtggcatgctaaactgacgcgtggtagacaagaatgaccggtttgtgactggtctgacgccggtcacgtcatcggcagacaaccgtgctcccacgttgcgcctgcttccggcggagtggaggtaggtatggcccatcccatcagagggtcattcggacaacagccatggcaaatctccgcccattaatgagggagtaacagggagatccccggtgtcaggcgagtgatgacgctgggcctcactcaaagacaagctgtgatttagcttccaggcgaaggcgcaagctagttttttcttttttgggaagatagggtgagtccccacccaaaagaagagtaggtagaagtggtgcaggtgggatccccttgagatataaaaggaggaccttgcccacttaagaacgggggagctggggaaagaggggggagaagacctgagctcgtagaggagagaaagaggaagagggtttctagagtttgaactctcttgctctccagctctttgtaactccttcatacacagatccaccagaacacaggagtagggtattacgcttctcagcggcccgaacctgtctacatcgcccgtgtcttgcgcatttgctctctcacgaaacattccatagatcgagtgcttagaacctcacctagcgcccccggccgaaccggcaaaggggggcccgcgcggtctcccggtgaggagccccacgctccgtcatctggcgcgccaggtagggggcgcgtgtgtttttctaagccctcgtcctctttcgtgtgcgccaagcttctcccgctcagcccaatggccgaacgggcagtggcgcacaacctctctccgagcgctagcggtgacgacggggagcagaacccgcgccgtcgagctcgtactccaccgcccccctctcgccgaagtcttaggcgggaggaggcgctcgagggggtcgaaagatccgcgacttcgccgcccacgagcgatgaagaaggacggcgagacggggagcgtcgcctcctcgtctacggcgatggcagcacgccccagggcacgctccaagctgcgggcgcgctcttgcgtcacccgcccgtcgtccccgatccagagactccagcccgacgttggctggatgacgtggccgacttggtcatgacggcgcagcagcgcctaggcgccggtgggcggtcctccgccgccaaggcctctggcgctgctaccgccggctccgtgtcgtcgaggggcgccattccctcgtcaacgcctccgacccaagaagatgtgcgtagggggccggatgcccgcctcagtatcgagcgccggcgcaatggtcgtcgtgctgcccacgcaacggaaggcgcttcctcgtccggagcgccacttcggttcgggcgcgggggccagccccccgtgcccccgcttggtggtgtcggctgtcgagcctttgtggcgagcattcggaacgtccgttggcccccaaggttccggcc

SEQ ID NO: 15012 - DNA, 56453 bp, Oryza sativa
  unsure (1)..(56453): unsure at all n locations
atttgtaatgcattcggatatggccgatttaggatttgaggatttgaggataatttatttgggattttgggatggggatggagtgataacaatatattaaaaacacaatgaagaaaagaaaataataatagagcaactggatctagctagtctagctctatctttagtcccggttggtaacaccaaccgggactaaaaaggctctatctttagtctttttactcccggttttttcatccgggactaaagatcgctatgtttagtcccagattcgtagtcccggttaaaaaaccgggactataggggggttacgaaccgggagtaaaaaccccttcttcaccagtggttactttcggctaatttgtctatatacagtatatgtgtttttaacaggatatgtgcgtataaattgtactaagatagtgtttgaatcttctgaagatgaagatgaagataaaaattaagtatttcacgcaaaaacgatgtggtaataatgtgtgattaattgagttttaattattacaaacttaaaaaataaattaattgatcaaatattttagagcaacttttatatagaaagttttcgtacgaaatgcatcatttagccgtttaaaaaatatgccatgagtatccaaaatttcatccaactcttgttggagaaacgtacacaacctaagtcatattgattctcttccgcttaatttaacagttggctttactggattgattttgtactacgaacgattataatctctcgatcctttgaatatcttagctaaccatgtcgtcggctacggctagcccccattttctgatttatatgattccgtgtccattttacttagcgtattggtgcgacgtacgtacggtccattttacactagatttcacctaatttagattcatgcttgatagtacgttcttacttagggcattcccaacccaagataatagacgtagttttcataaactccacatcattaaaaaactagtactagacaatactcttctaatgcaaacactactattccatacttaaatttaatgctacttatctcatcttggatgttgtgtagaaaccttgtctcatacaagacatggtttccttctatttcctcatttattcgcttgccacatcatttttcatcctaggtggcagtttatttaatgctatggacaccatcctagtcattggatcgagaatgccccttagcatatgctccgtactccaatacaattattttctacttttacgaactctgattcaatgattatataaaatgaacttattttcgataaatgagcggaacaaaaataaatttattatgggatagaggaagtactacctccgtcccaaaatatagctatttttagcacagtactttgtcccaaaatgaagctatttttctacctaccttctcctctcaaccaatcacaaccattctttttcaactactttctcttttcaaccaatcacacgccttcttaaatcattctcatatactttcttaatacccgtgccaacttaaaaaatgcttatattttgggacggatgaagtagctagcagtaaaatgcacgtgcatacgcacgctcgtcctagcaattaatttgggtgtagctttactactgtagtttaggtttagactgttcaattcaacaatggctgcggtaggccgtaacgtccggatcgatcgatcgatgtcgtcgtcgtcgtcgtcgtcgtctagtacataaacacacagtgtcgttgtgtctctgctcgatcaatccgtgtaccgttagatccaaatcgatcacatctgcaaacgaaaacaaacacacatctactgcacatatactatgctaatacatggaggaggagaatcacaaactagccactacattaatttttccccgatttgtagtatagccatattatacttaggtgaacatcaattcaatattcatgcacatgtacgtcgtggtatgcgtgcaggcatacgattagttaaactaagtgtttccccgctctttgctgcggaaatttctatgtaacttttaatatgttttagtaatcgggctaaaagtaaaaattatattagttattaacaacaaataatgtcaaactatatttagatagaaatacatttaatagactctgtatgagattataggtgaaatatgatatcccgtactttgattatatggatgaatatatgttaaggattataaaaatgatggatatatatacatgttatttattgtgaaaaataatgtgaaggaagatgattggatgttgatttgtagaattcaatgaattatagatgatgttgcatgcttgcataagttttgcatgtaattattgctagtggatgatgatgatgaggacatcctccactattacccgctggcagagacgtaaaagtcgggcggcgaccatgtgagcctctggtaatcccaccttgcttagcttgggaggaggaagccatcttaaaagggagagccacccttctcctgttgtcttttagggagattgggcctttcctcaagtgggtgtgcctaagaactgttggggtccggacaaccttaagttattgggcctcggccgaccccacctaggctggattgttatcatttggtatcagagcttgggcccttgttaagaggttgggaatgatgaggacatcctccactattacctgctggcagagacgcaaaagtcgggctgcgaccgtgtgagcctctgataatcccaccttgcttagcttgggaggaggaagccaccttaaaagggagagccacccttcccctattggactagtcttttagggatattgggcctttccccgagtgggtgtgcctaagaactgttgggtccgggcaaccttaagttattgggcctcggccgaccccacctgggccggattgttatcatttgaggtggcatgtttgcatgttgagctttagaattagtgggttataactttatactagtaagagcaagtataatagtgagctataagcctactataagcttatgtgcctactataagcttatgtggaggagagatgtgacaaaaagttaagagtgttggctctcgtgcaagagccagcttagcacaagcttctagacaaatacaattaatgtataagtgacaaatagagagaggagaagaaaattgtagtcaaccttatagctaatctattatatgtgttggctttaagattggctaatagtagaaagtgagctttgttattatccttgctctaagataggattagtagtaggtgatgatgcattaaactcctgctcttttatgattaagatgcatattcagatattctacctcgatcagctaaatggtgcataacatacggaagctattaatataaagttgctctaaaaatcaaataaactcctttcaaatttatagtaatgattatattttaattaatcattatcttacttaatccttttttttcaggtttgaaccagggccctgtttggttccatgggctaattattagcctgaccttttagccataaattagtccccaaggatccaaacttgtgggctaatttgaggctaaagtgaattaacctctctcaaaacattagcccctccaagaggttctaatgtgactaattttgtatggggaccataaaaaagcagctctctctccccctctctcctctttttctactctcttttcaccttttagccttgaattagtcaatgaatccaaacatgccacctaggtctatgggtgcgctcgttcccgcgggcaactactcccgccacctcgtttttcgcgcgcatgcttcctaagctgttaaacgttgtgttttttaaaaaagtttatatataaaagttacttaaaaaattcatattgatccattttttttaaaaaaaattagttaatacttaattaatcacgtgctaatggcctgcttcgttttatgtgtcggagggattattccccgcccctcactctcgatcgggcctatatatacatgcccggacacatacgtggttgatccaccccagttccctctcgtgttagcccaactcgtatgccatcgaggctcctccttgtattgttgtatgtagtggtggtaatgtgtcataaactctttcacatacctgtttagatccctgacaaaaattttcatcctgtcacatcaaatatttaaatatatgcacagggtattaaatataaacgagaagaataactaattacacaaattgcatgtaatttgcgagacgaatcttttcagcccaattgctccatgatctgacaatgtggtgcgctgctaaaaaacatttgctaatgacggattaattaggcttaataaattcacctcgtagttaacaggcggattatataatttgttttgttattagtttacgtttaatacttcaaacacagcctaaatatttttagctgaaaaatgcactaatttttaatccaactccttttttgacaaaaagttagatctatttttgtactccctccatcccaaaataagtgcagccatagttttccgcgcccaactttgaccattcgtcttatttgaattttttttgaaaaaaattaaaaacataagtcgcgagtaaagtattattcatgttttatcatcttataacaacaaaaaagctaattataaaaaaatttcaaataaaacggacgatcaaagttggacgcggaaactcatggctgcacttactacctccgtcccaaaataagtgcagccgtggatatccgtacccaacgtttgaccgtttatcttatttgaaaaatttatgaaaaatttaaaaatatttagtcacacataaagtactattcatattttatcatctcatagcaataaaaatactaatcataaaaaaatttcaaataagacgaacggtcaaacgttgaacgtgaatagtgcaaaactgtactccctccgtactcgtaaagaaagtcgtttaagacagcgacacggtctctaaaatacaactttgtcttcttgtttctataaaaatatttattaaaaagtgatatatttatacttttatgaaaatatttttcaagacaaatctattcatataacttttacattttcaaactcaacaacttaagagttattgataatttatattcccaaggtttgacttaaacattgtcctaaacgactttctttacgagtatagagggagtacttattttgggacggagggagtacaacgtaggaggatgaggagcaggattgcaacaagtggaccggcaggacaagcaaccccgttgaaaaagaggagcaaagaaaaccactcagtcagtgccaggtggggcccacagcccaacaggtgacccgacccgacccgatcgaatcctgcaaacccgatctttattcctctcctccccgagagagacgagacgggcccgcatcacggccgtccacgtcccgtcggccccgtccagtctgggccgtccacgtggccccaccaccccacccccccacacgtgtggcctcgtaacccccgcacagcacacaccgacgcgacgggtccgcgcctttcctttcccgccatgctacgcgacaacaagataacggcgccgtttagagtggagtactggttcactgtacagtaaagcataggagaggcggagatttacgttgacggcgttaggtgggggtggtgtgtgcgtggcagctcggtcggaaaaagctggcgcctgagcgtgtgtgcgtgcgcggggtcttgtcagtctgtgggacccacacaccttttgtcgcctttcgccgggtcgtctcggtcggtgcccgtaacggtcgccccctctccgttcctggagactgtagactgtactgtacactggagttgtatttgagtcacagtaatgattattttaatcttcacaagatcttttactactccaaggagaaaagaagaaaacacaagagaaaaacggctggattttttaaaattttttggtattttcaaaaatttattttataaataggcattcaaaaaatttattccataaataaaccctttttcatggtgtcaaacgtgacagcgccaaccacgtcaaccacgttaacattgttcccctattctctcagtggaaactaaatcactagtatgaaagtggtcagtatcaataacttcaacatgaatgaccttttttttttcagaaacatgaagaacgtatttataatattttctagaaagagtctatttacaataatcaaaagccactacactaataacgctggtgtcgtcaaaataatccacaatttaaataagtttttttttgagatctactccctttgccaaaaaaaaaaacttaattctggatttaaacctggacacacgattagatttttttttaacgaagagagtactatttataaaataagttttttttagaaaatatataatgtaaaaaagtgcagagaggcaataaatgagggcaagaagaggggagagaagaaaaggatcccatcggatggcctaattagccaaggaaaaagctaaattttaaattttcaaacttaattttgagatattttcaacgtattttcttttataattttggcttttaagtcaccaaaaaatatttataaaagtttcatttacaaattcatttttattttctaataagccgttttggcttattaggaaataagccaaacaataggaccaaagagagggcaaagagaggggaggggggaaaacagttgaggggaaaggagggagcaagttgctttgctgtctccctgacacccgcaataatagagatactcctactgctactaggggccagtggcgtgttgcagcgcaggaacctaacctctgcccatttagccctgtcaaatctttaaccaaaagtactgtacactggcctagctagccaccaccacccacgcccctgctgtaggtgtacacacatccatcttctcatctcatctatccatgccacatagtactactggtaggggtaacaaccacccatcacaccagcatgactgtatacgtgacataaattgttccttgtgttgtgccatttttctctcctctccctttctttttctttctacttttttctttctaaagtatataaacctaatattccatacaaaacatcggtatcatgaatctatacgagaggcatctactcctatgagaaacatattatccctccgtttcaaaatgtttgcaccgttgactttttagcacatgtttgaccgttcatcttattcaaaaaaaaattatgaaatatgtaaaactatatgtgtaaatgaaagtatatttaacaatgaatcaaatgacatgaaaagaataaataattacttaaattttttgaataagacgaatagtcaaacacgtactaaaaagtcaatagtgtcaaacattttaaagggagggagtattatcgtgaatatgaacatgagtattatgatatgttacgctctatactagtagagtatatctagggacggagggaatactcctacttcctctgtctaaaaaaaaccttaatctaggaagagagatgactcactcagtcactcgtattaagggatatgactctcgtattattttgattagttgtactatgagagatcatattctcgtatgggttaagattttttttgatagagggcgtaggccgagtttagttctaaattttttcttcaaacttctaactttttcatcacatcaaaactttcctacactcatcaactttcaacttttccgttatatcattctaattttaaccaaacttttaattttcacgtaaactaaacacacctgtactctcttctctttacctgccaaaagactgctcctccttgctttcttcatcacacatggagtgataccagtacacttttgctcctctttaattacttctgtcttttgcgatcgccggccatgaataccggggatttggtcctgaaattgaatactcccacttcttcatctcttgtattctgtgattgggtgtgccatgcatgcatgcgaatgcatggtatgggtacggtgaaataatgtagaccaatcacaactgtggtacaagaggagattgtgttgtgtgttagcctgcaccttttccctgaccccaaagctactggttgctgtatatggaaacgctctctcatggtatcttgcttgtttttgcgcgtcccttcccctcacttgcactggtgttagcacaaccaccgcaacttgttgctctctctctctctctctactcatttgacatgtactactaattccaaatgttttctaattaaagccgagtttagttctaaattttttcttcaaactttcaacttttccatcacatcaaaactttcctacacacacaaacttccaatttttccgtcatatcgttccaatttcaaccatgaagttgcatttatccttctagtgggttttggtgattaatgatgaataaggttaagggactaatgtgtttattgagatactcaggtaattagtcccgaggtgatcttaggtgatcaagaaatgcttggagaccccccctacaaacttcatttatgcggatttgaagctcgaaggtcaataagatagtttattttttgaaatcgagttttaggaaaatccgtactattaagaggggttccaagtggggttctgagatataaaaagtgatcttagtgggttcctaatgatagaatatttttgggagccatttttgcaaatgggtccagaccggacagagaaggctggctggaagttccgttctctggacctggaacttccggaccctgcactggatgaattttgcctaagtgttggccggaagttccgagggtcaggaacttccggacttcctccagttcaaaaatgtgagtaacggcgaggtgacgtcacctagccgttatatatatccagatcgcacccagctcaccttttggctattccactttagttttttcatcccctacggttgttctagcctctcccaagatcccttggctttctccactcaaaatttagagcatttcttgtgagattgtgagaatagatgagagtgtaggagtgatttggagaagctttgaagactaggtgtggttgagcactttggatatcttgtgggctatcacttggggcttattactcttggagatcttctcctagatggataggtgtcgcccgcgagcttctaaaatcttgtggatgtcccgggaaagtttgtgaaggttttcctcacctccacaaggaaacgaggtaagtgattaaggattcttgtgctgagtttttagaggttctcctagttagagcaacttgcacttgtggtcttttctagaaggatttgtgagttggatcttggtgatcactcaaattctagaaaatgacctaggagtgttgaattgaaagccttggacttcttctgggttctttgcacaagtaaggcaaggggttaattgagatccggctctttggagcacctcaatggagagtaggatttcaagatctgaacttcggtaaaaaatagcccttgtcttttctgtgataattctgtgcacgatgctgtgattgtgtatctgctctgttttcctatagtttatttcgtgcaatttagtttaagtgtctgctagggttacaggtttttttgttgctcggaagttccgatgtttagaacttcggaagttccggacagtctgagcagatcggaagttccggtgttccacacccggaagttctggtcctgctgaattttatcgctgcgatttgtttgtgaatttcaggaaagcctattcacccccctctaggctacatctttgcgcgttcaaaccaaacttccaattttggtgtgaactaaacacagcctaaacacaagcccctgttggatttagattatttaagtaaattattatcatgattatctacttgactttagggataaattgaatattctttttttttaaaaaataaatagattaaaataactaataagtggttcaagtaatacaataaaaacaacattgtgagaaaatgtattttctgaagcgcagagaatccatttcaataatccaatgaataatttaagagaacattttataaaactatggatactttaactaaactattaaaaaaatagatttaagatgttgtatcaaaagactatagatttaacatcagtttatcattaaattatagatttatagctaagtatcataaaactacagatttaatgttgaagttatcacaaaactatagttttttttagtttaaatctcttgtagtaccgttatattgaagtataaacgttatagttttgtgattaaattaacattaaatatatagttttatgataaatttggtattcaatttgtagttttgtggcacttaatcataaataagtaattttgtgataaaaatggcgttaattctgtagtttcatgatggaacatattaaatctataattttgttatagtttgattgaaatatatgtactcttaatgaaaagaacgagacttaaggctgtgttcggcctgttcccaactcatctccctcgtgttcgcactctttttaaattactgaacggtgtgttttttttaaaaagtttatacacgaaagttgcttaaaaatcatattgatctatttttttaaaaaatagctaatatttaattaatcacgtataaaagactgttccgttttctgtacgtagagatgtgtttccaacctacaacaacgaacacagatatagtaactagtacacttttaccgtttagaagttaattttaaactttttcttaaaacttcacgctgatttagcacaagaaaacaaattctacactgcatctacacatctagtacactcagtgacagagggttggtttagtttgtggtctaaataggccttactaaattttgtcagtgccaaattttggcaagttttggcatgactaattttggtaaggtaaagttgtgtttggattgaagtcaaaatagcctaagttcactattgaaatgacctattttcttaggtatgccaaaatttgccttcaaaccaaataaacactaaacagtattaaaattaccaaatattggtaagtctaatttaggcatcaaaccaaaccagcccacagttttggtgatgcttcattgaagggggccaggccgccaggtactccagtacacagtcgcacaaagggcggccatgggcgtttcggggattccagatggagatgacaggagaaaggaaaaaatcactccacttcagccagccaggatatcatcaactgtttagataaaattacgtggaggagaggtaaaaaaaaatcaaaggtgttagctctcacgcaaaagctaacttaacacaagctccaagacaaaaataataaatgtataagtgagagatagagataggagaagaaaaattgtagccaaacttataactaatctattatatgtgttagctttaagatgggctaatactccctccgtttcaaaatgtttgacaccattaactttttagcacatgtttgaccgttcgtcttattcaaaaacttttgtgagatatgtaaaattatatgcctacataaaaatatatttaacaatgaatcaaatgataggaaaagaattaataattaattaaattttttgaataagacgaaaagttaaacatgtgataaaaagtcaatagcgtcaaacgttttaaaacggagggagcagttgatagtgacctctactattatccttgctcttactggagttccttgaaatcttttactactactccagctatgctagtactctcagggtgagtttgaggagagggggattgagaagattgggaaatacgcaaaacgagatgagccattagcacataattaattgagtattaactattttaaattttaaaaatagattaatataattttttaaagcaactttcctatagaaaatttttgcaaaaaatacaccgtttagtagtttgggaagcgtgcgcgtggaatacgatgtccttttctcacccaatcccccagaaactcatcacaacgaacgcagccctagtctcctactagggacgccagccagagggctattgctagctccatgcaagatgatgattgctacctacaatggctacaaccccaaattcacccaaaaggatatcgttgccgatgaagcacttgtggtaaacaaacaccaatggatcgatgcgtgtggaaatatatatatattttaaaaaaaatcagattatgctgcggcatcataacggtcagtagtagtaggaggaggaggaggaggaggagtagggcctattcactttgatgccattttcaaccatatcatttttagtaagttgctaaaaaaatatctatgtttagtttgttgtcaaatttggtcaatacataagaaatcttgctaaaattttaacaatattgctatcttgctaaaaatttagcattgccaaaacttggtaaagtttattttgactacaatctgaacaggcccgtagtatcatgtggacttgaataaaatgaaagaggcaaacatggcaataatactcccttcaattagaaatatttggtattcaagaagaaaattcgggtaaactattgcaactttgatcataccttatataccataagtaaatttaaaaaattatacgtagtatgaggcaataatactatctcttgacactgttgtagtgcacctagcgacacgaaacgttaattattgaatgtaagtgttgttgtaaatgctttcaagggaaatctatgtatactctttttctagtatggccttgagatctgcctctctgtcgattgggcagtgagtggcgggaaaataagcaattctttttctccaatacctttcctctgctcccctccatctttggtagccaccacctacacgacgtgggggtgggggggtgtgtttttgcggaattattatgttatcattgggtttgtcttattgtatgctgactttatcccgtacgagtagttattttctttatagatcaaatgaaatgctaacgtccgtcttctttgtcctgatgctacctttcatgtccatattaagctttgaatcagcgggaccttgcttcaccttatcttgtctggatgattgctgtgggttcttcggctcttcgctattgttaatgtgcaagatctaccctatgatgtgaggttttctcccttcacaatgacaaggtggtgatgaccatccatatccacttcggcgagtttgctgtttctaacttggtgcctttttttcctttgacggagcatcttcaaggttaaactgacatttctcttttcatcaggtcagcttcaacctccacttttgagaatcccctgttgggggtttgtggttaggtactaccttctctagtgaacctcactttcaccatcgtcaccgtcggctttatcatcttggtcaacggatcataagaagagaatcatattaggggttggattgcctcttcattttattttggaaccctttctaacttatcttaaggatctcaatgtaatttgccattctctgaggccggtcctattgtagattatgctgaatgtctacattctttcctactctggccaacattaggctctctcgttttttttgggtgaaagcggcaaggctctcttttttttttctcaccagaattgtgttcattaacttcctgtattggataaatacatgggtcttaatttttttcaaaagtttaactgagttttttaactttaaatatttataacgggaggaaatactactagctagtgtagaacgattatcaattgcaggattagaaaggtatactaaaagtacagacagaatgtgaaatccatcatcaaacctaacagaatcccacatccatttctaggaaagagagtatcagaacctgtaaaaatcaccaccgataaaaaaagaaaaaaaaatatgccgattggatttgtaaaatagcaacggaatggaatcatttagatcgcaggaaagagaaagagacacaccaatgaacggagtgccagggagcaagtggggacatttgggcacgatttaggcagacatttttgacccccgaaaaggcaaaagatgcccccaaaaaggttaatgcgaattttaatgacgttttaagcaccgattattacatcgcccagagaaagagagatggtgtacgtggcgccgcacatgtccaaaatctccaacattaaggaccggtttggtttgaaacctaaattggacttaccaatatttggcaatttcaacagtgtttagtgtctatttggtttgaaaccaaattttgacatgcctaagaaaatagaccatttcaatagttaacttgggctattttggtttcaatccaaacacaactttgccttgccaaaattagctatgccaaaacttgccaaaatttggcatcgacaaaaaatggtaaggccaatttaggtcacaaactaaaccagccctaaattttcaaaaaggctccaattaattttcagtattccaatgttgaggtataaaaaagatgacaccaacaacattgcgtatagttaaatctcaaaatcttttatcattaataaagtaaagaattattatgatttaatatatgaaaatgacattagtagatttataaactttataactgtataattaaaaaataataatgcattggagattatgtcaatattcaaaacaacaactaaatattccctccgtttcaaaatgtttgacaccgttgactttttagtacgtgtttgaccattcgtcttattcaaaaaatttaagtaattatttattctttttatatcatttgattcattgttaaatatacttttatgtatacatatagttttacatatttcacaaattttttttgaataagacgaatggtcaaacatgtgttaaaaagtcaacggtgtcaaatattttgaaacggatggagtaagaattaaaatacttcctcagtttcataatataatttcagaatttcttcacctcgttcatctcaacaaattacaacacctcgtttcttacacacatacggtctcatttcaaccattctctaattatttccatctagttacttaaatcacagcgtaaatccccatttcgagacagaggtggttagtatacataaaaaaatattgtaaaaggacgaacctttgctaggaacaaatacaaaagggacgaactgtactgctatacaaaagggagtaggcggtgtatttgaagtttgcgccatttgaatctccaatagcagaaacaaccataatttgaaaacaccaaaaatctgttgctcagtgcaagacagctcttctctttcaagtttcaaggcagtaccctgaccacggatggttaatcacttaattagtctctgtctgttcccctgtattgaatactacaagtatcctcaattagtagcactactactgtgttgtttgcttattggcttatgagctgtatccaaaatatggatactcatctcgacttttttttttaaccatcttcaatttttcagtcttagattttaaactgctaaaggtaggaatataaaaatcctactctaacattacctcgtttatttttctagaccaattaatatgaaaaacaatccccagctgtttcccatcagagtcatcagcttttaattttgcacctgccgtttaagcagcagcattcaggattgagctaagctaaaccgtcgtcgtggtggagacgtttttgtgaggaatcaaagcggcatgcatgcagcatcatccctggcagcatgacacaggagaaataaagagactttgatgtcattagttgactgtcgttatcaacaaaacaaaacaaaacacaaacacaaccttgaatgcttttctttgctcctttttccctttctctctctgatttgtactacatgtacatgtactactactactacaagtactacttcaagacgttgaactgaacaaacaagccaaaacaaacagcaggagacagcaccggccagccagattcactctcttaagtctctcatgtacttgtgccagtgtgccactgctcattgccccatcgtttagcatatcggacgaaaaaaaattaaacgacatatttacacacaaaaaataatttatgaataaaactttaatatacatgttcttaatgatataaaagcaaaggttaaaaaataaactatgatgaatttttttttaaaaataaactctaaatttaaggtttaaaatttaaattttagctaataaacattagcatatataaaccaaaagatgaggctgtgacattgtagcagcagtaataaagggaagaggagtagttgtattgtatgcagagaacataaagctggccagtggaactgagcaagtgtggaagatgcaggcagagatatctccagatctcttcattatttatttttctcttgttttgatatcttcttctactcggaccaaaattatgaggaggcaggcgaagaaatagtgtattagcctggatgagatgatgatgctgaactaagtcactgtttagattttaacttttttcttcaaactttcaactttttcgtcgcatcgttccaattttttcaaacttctaattttgatgtggaactaaatgctgttgagattatagacatataatgatttaatctattccataaataaatcatgacattacagatgaaaactagcatgaacgcatcattagatctacacatgtaaactacacagtataacatgaacagatcaaatatgcgcaatatattgaacacgtaccgaggtgacgaaaagaccggctgcttggtcgaaacttttcgcaggtgtctacgaaggcacgaaacacgcgagcgaagaggaaggcgagccgtcgcgaacgaacagggagcagtcgcgcgaagcgcttcccaaaaaccttattgccgccttctcccggtgcaggacgtcaaagacagaggttctggagacctgctctcccgatcgctggtgcacgccggcgagcgggatggagtagtctacgagcgacggcgcagtacagagtaggaggcaaaccctagattgatttttcgtgtgctgcgtgaagacggcaggtcggtttatatagagaagggtcgcttgatcagggcgcccgcacgatctctactgcgcgtaaccgaaccggataagtcgcgcgtaacttatccggactccacgccgtttgcacgcaccggatttttcggaacgtttccaaaacaaaaacgaatccgaatttgcagcaaaacaaaactgtaaaaggaggctgcatctgcgcaagggtgaggagccaatttttcggaccattcgacgcgtacgtcgtgcacgcgcgccgcctgccctgccctgccaggcgaggcgaggcgaggcgagcgagcgcgcgcgtgtgtttcccctcttctctccaccacacatgcttcaagtgactaggagggcatcctcccttttaataaggtccccctctcctagaataagcaaggtggtactaaactccacatgcatgccatcccatgaggtgggcttttgtgattttccaaagaattaatcttcgagtgggctaaggcccattcattaattccaacaatcccccaccaaatctcaaaatcccactgagatttgccttttccaatgtattgtttatataccagcggttcgatggagaccaattaaggttgaacatccacctagaattccaagctacacttactcacaacttgaacaatggactacgccttgaattgcaagtcttgtgcaagcaagtttcactcaaagtcttatctggtactagaccgtctgtagactacccctcgggtggagcgtataagtcatactcctaggtctttagtaagcttcctagaagattcacccaaaatcttcatagactgcgaccaacagtcaagctcacaaaggtgagttctttcaagaatgctatgcaggacaacatctttgctaattaaagtcaacagaactcattaaggcatagccaacctgccttgcagctcacgagagtacatgcatcttcacttggagagggtatatatattgatactctcctctagtttactaatggtttgttcttcccaggatctaattcacgggatctccgatcacatagactgggttaccaccatagtataactcatatgggtctcaaacccatctccttcgatgcattgtctatcacatttcgtgatagtcccttcgtgaagggatctgccaggtttctcgctgtttggatgtaatccaacgttataactccggagtttcttaatttcctgacagacttcaatcgtcttttcacatgtctagacgatttcatattatccttagaactattcactttgacaattaccgtttgattgtcacagttcataaggatagccggcaccggtttttcaacaacaggcagatccattaatagatcacgcagccattctgcctcaacagtagcagtatccagtgccgttagctctgcttccatggttgacctcgtcaaaatggtctgtttgcaagacctccatgaaacagcaccaccacccagtgtgaaaacatatccactagtggctttgatctcatccacatcagagatccagttagaatcactataaccctccagtaccgcaggatacccagtatagtgaagccccaattccacagtacctttcagatagcgcattactcgctcaagcgcacgccagtgatcatctcccggattagaggtaaatcggctcaacttgctcacagcaaaggagatatcaggcctagttgcactagccaggtacatcaacgagccaatgatttgggagtattccagttgattcctagcaattctcttgttcttgcgaagcaacaagctaggatcataaggtgttggagaaggcttactatcaatgtagccaaagcgattcaagatcttctccacataatgggactgcaagagtgtaatcccattctcacctctaattagcttaatgtttaagataacatcagctactcccaaatccttcatatcaaaattttgagacaagaatgatttaacctcatttatcacctcaaggtttgtcccaaatatcagtatgtcgtcaacatacaagcacaaaataactccctcacccccaccatggcgatagtacacacatttatctgcctcattgactgcaaagcctgcagatgtcaatgttttgtcaaatttctcatgccattgcttaggagcttgttttagaccatacaaagacttcaacaatttgcacactttgcgttcttgaccttcaactacaaacccatcaggttgatccatatagatctcctcatccagctctccattaagaaaagctgtcttaacgtccatttgatgaacgagaagaccatgtgaggctgctagggaaagtagcacacgaattgtggtcaatctagcaacaggtgagtaagtgtcaaagaaatcttcgccttctttctgagtatagcccttagcaacaagccgagccttgtacttttcaatagtaccgtcaggcctaagcttcttcttgaacacccacttgcaccccacaggtttacacccatagggtcgctctatcacctcccaagtcccgttagcgataatggaatccatttcactacggacagcctccttccagtagtctgcatcaggagatgcatatgcttctgaaattgacttaggagtgtcatccacgaggtacacagtgaaatcatcaccaaaagacttagccgtcctttgtctcttactccttcgaggagcttcactgacatcctcctcagagacaagttcatgtgtatgttcagtttgttctggtggtgtgattgaactgggaattatttcaaatggttggttcgaaccactatgtgtatccttcattgggaaaaagctctcaaagaagatagcatcacgagactccataattgtaccaacatgcatgtccggtacctcggatttaactattaaaaatctataggcaatgctatgatgagcatatcccagaaaaacacagtccacagtcttaggtccaagtttgcgcttcttcgttattggtacattgactttcgccaagcacccccatgtgcgcaaataagaaagtgatggttttctaccaatccatatctcatatggtgttttgtccttatttctgttaggaactctgtttaacacatgatttgaggtcaacaatgcctccccccaccatgccttaggcagtcccgcggtgtccaacatggcattcaccaagtcagtcagtgtgcgattcttcctttcagcaatcccattagactcgggagaatagggaggcgtcatctcatatatgatgccatgttcctcacagaataagtcaaactcgttcgagaaaaactctccaccacgatcagacctaagcctttttatctttctgtcaagttgattttcaacttctgccttataaattttaaaatagtctagagcctcgtctttcgttttcaacaagtacacatagcaaaatctagtagcatcatcaatgaatgtcatgaaatatcgttttccacccttcgtcaacaccccattcatttcacaaagatctgaatgtaggagttctagtggtgccaagtttctctcctcggcagccttgtgaggcttgcgaggttgctttgattgcacacaactatggcacttagaacctttgacaatggaaaacttaggaattaaacacatgctggaaagccgagacatcaagccaaaattaatatgacataaacgtgaatgccaaacattagcctcatcatccacactgccacaaatatggttcacagacttattgcagaaatcagaaagggaaaagcggaacagtcctccgcactcataacctttaccaataaaatatccatgtttagacacgactactttattagactcaaaaaccaacttaaatccgtctctagtcagacgggagccactaacaagattcctgtcgatagaagggacatgctgcacgttcttcagctgcacgatctttcccgaagtaaacttcagatctaccgtgccaacaccatgaacagaagcatgtgacccattccccattaggacggtggaaccccgtgcgacctgataagaagaaaacaatgagatgtcagcacaaacatgtacattggccccagtatcaacccaccaattagtagattgattaactgaaaaaacagtaggtaaattaccatacccgcttccatctccagtgttgccaatggtcacattagcagacttagaagtttgccctgcaggtgccttcatccccttgcgctgtggacacttcctagccagatgaccaacttggccacacacaaagcaagtcctctcatcctgattaggattgttgttgttcttcttctgcttcttgaagttggtggtctgctgagctttgtatttccccttgctcttgttctgggccttgtgcacaacattggcactggactgcccaccatcgcccttagacgcggcatctttttcccgagctttctcctcaacatcaagagacgcaatcaacccctcaacggagtattcctgtctcttgtgtttgagtgcagtaccgaaactcctccaagatggaggtagttttgcaataatgcacccggccacaaatttgtcgggtaagacacacttaaggagttcgagttccttagccatggtttgtatctcatgagcctgttcgactacagaacggttgtcagccattttgtagtcatgaaactgctccatgatatacagatcattgctaccatcagtagcaccgaatttagtattcagtgcatcccacaactccttagcgtcggtcatatgcatatacacctcgaccagacgattgccaagaacgctaagaatgcatcccacaaagagagtagtggcttcctcgaattgcttctgctgttcagcagtaagaactccttcaggtttgccagtactcacccagaagcatttcatagctgtcagccacagagtgaccctgatctgccatctcttaaaatgcacaccggtgaatttatccggcctcagtgcatcggcaaaactagccatagtaaaatcacagtgcctataataaggtttttggattgttgagattatagacatataatgatttaatctattccataaataaatcatgacattacagatgaaaactagcatgaacgcatcattagatctacacatgtaaactacacagtataacatgaacagatcaaatatgcgcaacatattgaacacgtaccgaggtgacgaaaagaccggctgcttggtcgaaacttttcgcaggtgtctacgaaggcacgaaacacgcgagcgaagaggaaggcgagccgtcgcgaacgaacagggagcagtcgcgcgaagcgcttcccaaaaaccttattgccgccttctcccggtgcaggacgtcaaagacagaggttccggagacctgctctcccgatcgctggtgcacgccggcgagcgggatggagtagtctacgagcgacggcgcagtacagagtaggaggcaaaccctagattgatttttcgtgtgctgcgtgaagacggcaggtcgggactccacgccgtttgcacgcaccggatttttcggaacgttgggatggagtagtctacgagcgacggcgcaatacagagtaggaggcaaaccctagattgatttttcgtgtgctgggtgaagacggcaggtcgggactccacgccgtttgcacgccacgggatttttcggaacgtttccaaaacaaaaacgaatccgaatttgcagcaaaacaaaactgcaaaaggaggttgcatctgtgctagggtgaggagccattttttcggaccattcgacgcgtacgttgtgcacgcgcgccgcctgccctgccaggcgaggcgagcgagcgcgcacgtgtgtttcccttcttctctccaccacacatgcttcaagtgactagaaaggcatcctcccttttaataaggtccccatctcctagaataagcaaggtggtactaaactccacatgcatgccatcccatgaggtgggcttttgtgattttccaaagaattaatcttcgagtgggctaaggcccattcattaattccaacaaatgcagcctaactttaaatgtgaagggtagtacagcgtagtcaaaactctgcaatttttctcccaacctttttgtcagtgattagttgatccatgtggactgctcgtacacacgcgttgcttgactgtttcgatcaaaagcaagaaaaactaaaaaaaaaaaaatctaccgcataggagtagtgcttgagtcttgatgaccttcagagttcagaactgtggaaagtgattaatttgtcattcgtggcagtagtaagtttcagggttcctgaatcctgaatcctgaatcctgaatggccatggcacgaggcgataaaaggaaggagacgagcagatgagatgcgagcaatgcaagcattgcaaatgcagtgatacaaatgccatttatactactattgttcttgttccagtttcatccagctaagtactagctatatcatctgctcgacctatctgctcacgcatcatgtagcagcagcagcagaagaagatgcagaagcagcaagcaaccaaacagttgttgtttgtgatggcactgtactcctcctgctgctgcaaaccggcctaatttctgaatcatcctgtagtaggagtagtatggtttcaggggggccaaagattgggttttccggcagggcacgaactcagggagaatttcccaaatctgtttccgctagctgcgcatatacagatacagtagtacatgacaagccaccggtttggctacatcggttgtattcatttttggtttgcacatgaaatgtttttggttgagttgcattgcatcatgggcaagtaagccggcttcatccatttggtgtggagatgctttgtaacagtactccactatgcaaaatttgcgactccatgggggtaaaaatagtcatccttactatacgtttaacggcggtgtatgagaattataagatggaaagagaaaactggacagacggttaaaacaattatttcggttgcgctaaccaatacccttcgctctaacaataattaacctatgaggatgaatccagacaagtacttatctagtttcgtcgtaaaaacttgagacggagggaattgagtttaggactcgtttagaacggagaaattttgtacgactcaaaaaggttaaacaggttatttgtaaaagtcatgtgaaattcccatgtttgaaagaaactaaatttgaattttcttggcaataaagtgtgtcgataaacggggggcaatgtgatcaatgtgatcatggtttgtgcctagaggaggggaatcaacgaaaaggacagcagtcacagcagtgagagccagggaagagggagcggccaccggctgatataagacaaaagtattttttggcgaataaagatggggagttattactccactaaaaagttactagtcgtagtaaccgcaattttgaccggagaaaaagatgaaaaaaaaaagaaagaaaaggctatgtactccgtaccaaatgtgtgccgcttttagaaacagcaccctactattttcctttattatttttatgtttttgaccatcttttcttcaagcagtaagtacatgtccacttcatgatctcacttttcctttttttttctccctttaattcaacagagatggccgttacactaaattacaatttacagtaccagtaccagattggtttgttacagtaagaatcttttactttacactgaggtagtagcagcagatattttcagaactattttcatgcatgcccttcaattatatacttttattacttatactgatataatgtagtacttgtttttacatggaaaagtgaaactagattgggtagcccacagcaaaaggcactgtaaacatttgcataaatctgtctggtcggattggaccctccatccatgcatccgggttttaccatccgggggtaaaagggttaaaactagaacaaaaagtttggggggcaggggtgctatggtaaaaaaaaaacacagaaaagctgtgcggtttcctttgcaaattcttgctccgaccttcgtcacgtcactgcaaaaaatacctcttttgacaatttcatccatcacccctttctcttcttttttcacttgtctattctgttccctcgctcgcattttaaatggaaaaaaaataagaaagacaacattttcttatcttgataagggctcctttagatcgaaggattttcggagcacacagatattattttttatattgttggtttttagatcgcgggtaagcatgatctgatgaatatgtgcatttttttttcacaagtgagatgtgagatgaaaagatggtagaaaaattgttgttctgatagtttttttggggagaatatagcttagatgaaaagatggtacacgtaaggtttgaagtagaagttaggagatgtttacattttcttcttggggatagaacataatatttcttaaagaattaaatggagcatgaccctaaggtcttgccaatatatgtagtctttggaattccctattgtgtgtttcttaaggtgcacgtgttatttgaatgttggtgtactgtttggtttaaaacataatctatgttcgttaaggaagtagtatttctggctatgcacctagacgagtgttgtccacgtgcatagctagaaatacactatttagaacaaaggcagtatgaagaaaataaacaattaaaatatattttccaatcgtgttgtgtcaattatttgtacatgtcgttggccttttgtgagtgattactaaatcgataagaaaacaagtgaataataaataggccacgactattaccgtgttattgttttgattacatatctgccacatgaccatcctttgctagccctggtacaaaattggtattccatcgatgaattatccaactactcataacaattaaggaaaacatttagttacagttccaacctttacgagtagaacatgtccgatcaatacgctgactactctagttatttaaaatatattatccgctaggagacattaatatcttctttgtacgtacttgatgctgaccttcgggtatatgttaccgaatccactaaaagcctagtgaacgacaaatcacatccgttaccatattattgtttggatcatataattgtcgcacgattatcctttttggctctagtgcaaatttggtattatatagaccgtttcacctatctaacggcttacaatatttaagggacacatttagttacaatcgaaacccctacgagttatttaaagtatattatctgctcaagagcattaatgtcttgtttgttcgtactcgacgctaacctttgggggtacgttacagaatcgactaaaagccaagtaaacgacaaagccgcagccattaccgtattattgtttggatcacataaccgtcacacgattatccttgactggctctggtactaaattggcattatatggactgtttcacctatctaactaatcataatatcaagaaacatatttagtggcaattctaacctatacgagttgtttaaagtatattatccactcaagggcattaatgtctttgtttgtacgtattcaacgctgaccttcagggctacattacaaaatcgattgaaagcctatgaaacgacaaagccacgacagttaccgtattattgtttagatcacgtaaccgtcgtacgattatccttggctagatccggcacaaaattggcattaatatcgaccgtttcacttatccaaatagaaaagaaaacatttaagaaacacatgcagatatttttccaacctttccaactacaaccaatatgatcaacgagcggtgacactctctccaaacaaaaaccagcgacacttttgctcaaccggttagccctaaccaaagcgcataagtggtccccggtcctcgcgctagttttacccgtacaaatcttgactatacaaatcttctttgatcttcaaactaagattcatggccacatagagatgctaacaacaagatgaggaggagtgatggatggagttggaatgatgatagatgcaatgtggtctagtgtggtcacaatgaggaaaatgttgggtgtgaggatggtgtggggggtgcacatagggacaagggagttctggtgggtttgtcaaggctgcaagggacagagttccacccctgatagtggttgggttggagtcccaaacccacacgagcggcctctgaaacccaaaaaaaaaaaaagattcataaaaacaccccaagagaagaacagagatagaaatgaaaagaacacaagacaggaacaacaccatctctcttttccaacccttttgccatcgtcctcaaagtaagtgaaacccctccccacacaaaaaccaaatcctctcacatgaagataaaaaagaagaaccaccctaaccaaaccaaaacaattcagttcagagagagagagataagcacaatacagatagacataaatagagatatacacaaagattgttttttctttcaacaataaaaaaaactctacttttcttttaaggaggcctgtggcatttatgcatttctgttttgtttttgttggttgggagagtcgaagccaaagcccccctctcctctcttattcctatattagccccccctaccccattttgccgttcgctgcagaagcaacaacaccaacaaagctatagctgtctctttccttgcatctcctctcctcttctcttctcttatataggccaccgcgaggtcggtctccatccatccatccattccagcatttcttgaagcttgctgtggatcagagaggatggctcacgagatgatgggtggcttcttcggccatccgccgccgccgcctgcgacggcggcggtgggtgaggaggaggacgaggtggtggaggagacggaggagggtggccatggcggaggagttcaggggaagctttgcgcgaggggacactggcggccggcggaggacgccaagctcaaggacctcgtcgcgcagtacggcccccagaactggaacctcatcgccgagaagctcgacggcagatcaggtaagagctcctccatggcggtgggtgcaatgcccaagaacgacgcgcattgaaggtgtttgtgatgggatggcatggcagggaagagctgcaggctgaggtggttcaaccagctggacccgaggattaaccggagggcgttcacggaggaggaggaggagcggctcatggcggcgcaccgggcgtacggcaacaagtgggcgctcatcgcccgcctcttccccggccgcaccgacaacgccgtcaagaaccactggcacgtcctcatggcgcgccgccaccgcgagcagtccggcgccttccgccgccgcaagccttcctcctcctccgcctcccccgcccccgcccccgcgccgccgccgccgccgcagcccgtcgtcgcgctccaccaccaccaccaccggtactcgcagcagtacagcgggtacagcggcgccgccgagtccgacgagtcggcctccacctgcaccaccgacctctccctcagctccggcagcgccgcggccgccgccgccgccgccgcggcggcgaacatcccctgctgcttctaccagagcacgccgcgcgcctcttcctcttccaccgccgcgtgccgcgcgcctcgcgtcgcggcggcggctgacacggtggcgttcttccccggtgcaggctacgacttcgccgccgccccgcacgccatggctcccgcggcggcgtccacgttcgcgccgagcgcgcgctccgccttctccgccccggcgggccgcggcgagccccccggcgccgtcgaccagcgcggcggcgcccaagccaccaccgacagccacaccatccccttcttcgacttcctcggcgtcggcgcgacatgattaccggcgacgtcctccggtggtggtggtgtacaggaaggaaggaaggaaggaagcagccaagatcaagcgatcaaaaccaagctaaggttagagttagccaagaacaagactaggacgaggaggaggaggaggaacaagacgtgctcgaagctcatcaatggcgttctcaaccaaacaagttttttctgctgctgctgctgctgcaagctagcttagattattcagatgaagaacaataagaagaagatgtagtactagtaaactagtaatggtgtgtgcgtttggaaatcaacaagcttccatgccatgccatgcctcctctgttcatcgatttcttttttttatctctctcctctgtatgaacaagtagaagaagaagaagaacaaattaatccattgctctcgcagatggatcagcaacatcaagcattgccgcattgtctctctctttgtgttcattgtccatgacgccaaagagaaaagaagaaaaattttcattgctctgttcttgaaatcgatcgatctctcttgttgcagtgatcatcaacaagaatagctcttgttttggcatcgaatcggctcatgtcatgttcatcgtccatctatctacctaggaagattggtcatttagtcacctaaaaacaagatatgtcattttcctctctccttaaaccttctcttgatagccacaagaagaaacccatgaagaaaaaaaaaacaaaaaaaaagaagcaatcaatttttttcttttcacatctctatctctctatgatggtttatcttgtcctcttccaagctactatcaaacgaaactgctgttgcgaaacgccgcgactttgctttgctgcttttgctccaggttagttaagtcactgaactttttttgtgtgtgtgtgtgtgtttgtgcgagctctgatgatgttgatgatgatgacgatgtttgttactattccagcttgatttgctgcatttggggtctccttcgccgaccattctctgtagcaaaaaaatgttcagagctactccttgctcagtggtcactggtcgtgatatgcagtagtaaaccattgtctgaatctgaatgaacagcagcagggattgccaagaagcgaccgtgctgcaggctcgcattgatcagtttcatcagatgtaggaaaaacaaaataaactggtccagtttgactggagtgcttgctgttgagaatctacagaatgtgtcagcatatgtgaacatatgttaatcctgaaaattgggctgctgatagattcagattagcagcctgatggtctgcttgagttagtcgtgttcaagttcaatcagcgagtaagttggggactgggtcagggtccaaggtaacaggccccagtttttattatgcctgagttagctgactctgcatatgactgatctgaagataagtttgggtttttctgttaactgaacttactatgtgtgtagaacagtaattaaatccgttttgtccgattgggattaatctgatgaactgggtcatattcaacggccatgtcaaagatggttactgtcagcaaaactaacagcatgtaaatgtttcattcatatcctgatttatgatgttttcacctacctgtactctgtttttcaacaatagaactcccaccgtcctacagatttaggtggaatgtaacatatcctaatactatgaatctggacatgaagcttatccagatttatagtactaaaatgtatcacatccaaccaaaatcccttatattttgggacggagtgagtactacaaaggtgtttacctgaagagaagaattattagagcttaaaacagaactataattagttagggcttgcttgtttcatcggacacagtagttgtactgatttttgtttgtttggttaaatagggtaggcatcattctggcatcaggagttatgccatgctatatgtgtgctgcttggaacagagtagcctctgcttttgctttaacttttttttatagttttgcttacgtgagttaaataggtgcctggaggtttatctttctgataagaaagacatcaagttgttaagagaaaaaggctacaaataggttctggaataaaatcctgcagagaacttataattacatagtaggaaattatgacccttttgaataacacagctcttgattactgtaaccagttgttgtaatcaagttaggctacagccagttattacaggacttgcaatatcgtgaggttacctctttggttacactgtaaccctctcgatttttatcggtaacctctccgttttaatttatgtggttaccattataaccgtgacatcactggctagcgatgaccccctcctgaaacagtaagagaaaccctacttaaccaattgcttctaataatatgttgctcttcttgtttagttatattagaaaaaaacagtcatatatttgggaagggggatggggtggggttaatatttatttggataagacaaacagaaacggaagggtaaaaaagtgactatacaaatgtccaactaagacaaaattggttatatagcaacaaaagtttatgttttttggctaaaggactcatgtttatagaatcaaagaagaaaacggtagctaacctaacttaaatttagtaaaaagttgcgaacgctaaaataatttgcatttagagagtataacggtgacaacccgatagatgtttttaaccagtcaatctcaattaattaatcgcattagcacttcatggcaccactaacatttaactactatctaatcaagcttccactacaattttggcacatgcacctaaaaatcacatgtccaaatattgcatgaatcactgcacattagttaaagaagtaaaaaaaaaataaaatcttgtttcaccccctccaaatttcaacattctctctttggtgtaacaaaaatttcaatcttcaacaaacgaataaaatcatacaaatggatgcctctccacacaaggaatatctccttacctaatgcaaatcttttaccttgtttcttgctacaaggaaaaacaaaaacaagagagattacaacaggttaaaaatgtgacgtcaatgtcaggaaattttaaatttttttttggagcaatgcgtccacctccccgtgcagagtgcaccgacgacggaaattagctgtggactatgatgtttcgatgtatgcacgcgtggacaacttggcagtgctgacatcgcctcgtttgatctcttctctcagcttgcaataaatttgtactaccatttgggctttggctagctgccatgtcatttgatcgattttctctgctagatcggtgatagttacatatatggtttatatatttgctttggttcgtcggtagcagacaatcgataggagatgcacttgatagtgcattgacaagggatgtacaattttaatcttaaaggtactgtgttcaattcccactacgctcacaatttcttctgaaaaaaaatgtttggatggatgtttctctattcaaatctcgtttttttaaggagataatcgacagtgatactgatatgtatttttaggttaattgtccatgaaatttacgctataaccagtatatgtatttttttccgccgtaatgaaatgaagagagggtagcttgggggtttccccgaaagtggttatttcagttgtggactggctcaactttgattaattaatctaaggttaatatatataagtagttttaaaagctgacagaagaatcttgcaatttatattctatcgaggtagttgggaactgtcacatggaacgcatgtagcaacaagtgtgctgctactttgttgctatacggcagctgatgagtcattcgacatatgcaaacattgttaattaattccattcaaagtacagatattctctcttcaaagcacacgcacaggattaaaaaaattaaaagattgagatttaattaatcccaagcatagttaacgttttctaggtttctcaacatgatcgatcagtccatttcatggtagttgttgaaagatttggttgacttgaattaatcgtcggcacctgcaattcttcaagtactatatattatgcaaagcacaggcatattttggcagttgaaatgatggaattgaagcatcatttctatctattctggtatatatatacgacaaggtctaatccacacgtacgcaacgagttagttagcagttggtgacgcgtgttgtgctgatcaattcatggattaattaatattatgaccggatgaggattatggtgatcaagagagggttggttaagaaaaagaataattgtcataggttgttttcatatgtttgcatgcattgatcgggtttatatcaatcactcaattcgtggcgcgatgctgtgcttcaacgaacttaatttgtagtaatcaattgataatagacctaggattgaagttaatcaacctaattgttttaaggtgagtgtggacgatggatgaaactaaatttatgacaactatctgaggttcgaatgaataaattaaatgttagaaaattgagaaaaccgaatttacgccaagtaagtttgtaccttctccattattgtaaaaagctcaaacacaaaacaaaagtcaaattgtagtatcaaagatatgctctatccctccgttcataaatataaatatctgtacgtacgttatttagcaaagattaaggggatatattcccttccaataatcacatcagtgatcacattttgaattacatatggattcccctcctaagcacttcatcggttgaaaatgctttccatccccatgcaataaaaatttgtgtatcagaaatacttatatattatatgtacaccgatgattatatctagaaatgaagatattaattatattggcccattccctaaaaaccctaacagccgtgttcgtcgttgctgcttgcagggaacaacaagaacaacgtaccgtgcgtgtacgtgacaaggaaacaattagaacaataacaatgacatcgtcgacggttaggggatcggatcctcacgcgtatggcgcccggggagcgagatgcatgccagcaaatgcgaggcagccaggctgtgtgggggagaggggagcagctaactagctactacctccgtttccaaaataagcttatttttcactcgtcccacatatacatatgacactacatattactccctccattccaaattgatctacatatagtttttttttgaggttatttctaaatgatctacatatttgtgttcattcattaagtctattcgttatttgtgcatttgagtaaatggacattgatgcatgcatccatgcacacaagtatttataacccacatgcaatatcttgatttgctattggctaggagatagtggggatggtgcatgcatcgagtttgttgctagagtaaatatagtatgagagagttattagcttttcttggtcttgctgtacctatgaaatatgtagatcaatttagaatggagagagtaatattaatacaaaactaaaaaaagctatatactctaattttatcaaatctaaatgtaattattaatttctctcttcatctgctttccctatatatatcctctactttaataaaccccgatacaataattgtttaaaaatatataaatttattttgagataaacagaaagaggtaaaaatataataataaacttattatgggatgaagaactaactaagggtcttatttttttttcttatacttatcagccaaaatttaaattttcaatcttaaatttggagttgattttaaggttttttcatcgaagtttatttttcagcttttgcttttatatcgctaaaaacacgcatataaaagttttatttataaattatttttcgtttgtaaatatgccgttttggctccgtataggcttgttagctgtcgtccggatggacgcatggatgggcatgacgcaggcgtatcgtcctcccccatgtcacgcgatccacacaacggccggccttgctgcttgcaacaattcctcctcctgggaagcaacaacaacaaaccaaacaaacaaattaacaaaccatccttgcgtgtgtgtgtgtgtgatgggggagaagaaacagaaggatgaggattcgatcccttcatgtcctgaaggtcccttttgatttgagaaaaaaaaatctccaatataactatttgcaacaaaggattgcatttttttcctatataattttttttaattcttgataggtaccaaaagatactatatttttagtataattttcgtaccttctattactgaaggtatcaagagatactagattttacaataagaaatatggtacgacgaccttccatacgaccatacctccttaagaactgtaaaaccacttaatttctaatgtcttaatatatataggttttggaggatttttaacatgaggttcaatctcatgtaaagctttctatgagtttatctctctcatccaattcctacggtctaattaaatggtcattcctgtatatttttttctatatgttttactattctctattttatactttaatttctatcaaaattctatgcctctattttttcaatcctacgtttcagagaaaaccaaaacgatatatggatggatggattattggttagttgggtttgatacaaatctctcaccccgggtggggagccaaaacaagcacaaaaccgtactaccaccccaagcagcaacaaacagagtgtgatgcgtgtgtgtgtgcgtgtttgttgcgttcatctatcaatccatgcatgcactttgcatcggattctcttctatgtggtcttgtcacacggcatggtaacttagctatagctagtggttggttggccccggttcttctttgtttggaaaacagaaagcgtgcgttgctgacatgagctaggctatagctcaatataattgtgaggcaatagtagcatttttagttttcattggtttttttttcttagttgagtggagagggacccttggtttgcatgcatgaagagagtcactactacagaaaacatcatcaatgtccaaagtgacataaactgattgttatcaatactccatccattctaaaatatatataaggcacaaccacccttaacccaaagaccaagaaataattattattatattgtagtttgaatcatcctaataaatactataatgcatacatccaatgtgattagataacatgagagtggatgatttaaaaaaaagtaataatttaatagagaagatgtcataattaattgcatgcttgcatacacgccttatattatagaatatctaagaaaaatggttgtgacttatattataaaatagagggagtaatatatttctatagatggtttattttaggaaaccttgtcgagattcaatgttactagtgattgtttttgataagttttcttttctgttactattttttcaataatgtttaatactatctcttataaaatattataggagggtatcaatagacctacttgagggttgtctagatggggccttttatggtaacgatcgagagcacatccaaactagtagacccaaatgcaagcatatctctatgcaaagctagccatgcattaaagccagaaagataggggtattccaagagctctatagctaaactgctaaaggttactcctagctagcattctcaagattctcctccaccaactgaccatccatgctcacatttggcatcaatgaaagaaaaagccactgctagatgtgtcgcaacctaattaggcgccatggcatgcaccacacgtctacacatacaccacacaaccctagctagctatctactgtactactccctctgtcccataatataagagattttgagtttttacttgcaacgtttgaccactcgtcttattcaaatttttttaaaattattaattattttatttatgacttaatttattatctacagtactttaagcataacttttcggtttttatatttgcaaaaaaaaattaaataatacgagtggtcaaaagttgtaagcaaaaactaaaaatcccttatatcgtgggacggagggagtatctatctctacctaacctgcttgctggatgctgcctctctgtagctatagcttaacatcaaataacatgtagtaggagtagtaactattggttgcaaagtgtaccatacgcagagtcatgcagtgaatagtgagaaaaaaaccactgttcacggtcactacactgtgccacggatgttgttcacttcactctcactcactcggtcacctgtaccatgctggaagatatatggctcttgctagctaaagatagctagctgtcaactggtgacttggcagaaaataagctgggaaaatgacaggcgtgcatgcatgcacggccctgatggccaagtgtctttgcatatagctgacactgacaaagctaaggatgagtctataccttctccaaactccaagagtgatctatgagcttatttcatctggattctactcactgttccaaaatttaaaatctactacgagatcgattagacattttataattatacaaaatgtggacaggaatcatatgtttagattcgtaatactatgaaatatctaatttgatagtactaggtgtttacatttggggattaaaggagtagtagattatttagcagaatttaaggttagttgttttgatgtccctaaggtttacttattaagaaagatcacgtataacaatgcaactagcaataaatatagtagttttttttagagctcttcactttgagtacaagatatagtatctgaacatacgtacaaacgcactccaccacacacacactccacacacacctctacacgcatgctagacctatcaactatacacacacctgctaatgagatacacgaagccacctaagcaaacacctgctaatgagatacacgaagccacctaagcaataaatatagtagttggatggattgactaaaaaattagtactccaaaattacttatattttatagataaattttaaacttaaaatctctatatttgtagatgaagggagtatatccctgtgttcagaactaaagtattccctctatatcaaaataacttcagttttagtctagggtgtgttcaaaacaaggtgaatgaaaaaaagaacaaagtatcatcattaatactctctttggcccaatataaattatcttttatatacgaatttgaatataggctattccagaatcaagataaaaagttgatttatttaaaacagagggagcaggtcgatagtaggtaagagtattaaaggaataaaatcgatcaatttacaaaccaagagaggtaagaagatagagttaaatttattatattactccctctgtctattctaaaataagttaacttttatgcatgattcaagtttactgagggagcggtacgtacttttcgccagcgtacgtttgttgcatgaatgttgctgccaaacaaacgcatgagtcatatgtatatggctatgtgcagctcaatttatttatcgtccttccctttatgaaggttgtattgcacgaaaataatgaggacaaccaaggagaaacttggttattagataatttacagaaatagtgagcatgttgagaactgaatacataattttggggttaaaaccaaacccccctaccactacactatcatatatgtagtacatctgtgaaccctacattgcattggtagctagcaatactatagatgtgatagtactgtagtgttaatttgtgtatgtcccggggtgcagtagcgttcgtatgtatgttcttcttcccggggttatatataggatccgggtaaattattcaattctaactgaattatttcatgttaactagcatattagttagttaataattaaataataagtatatatataggacagcggtaatttttgttgtcggctcgtcgttgaagccggcagctgtgtggtacgtgtgtccttgcagggtttggcatgcatgcattcgtgcgtgcgtgcagtaaatgtgagagattctgagtcacattcatgtgagccatagcagcacagggacagctagccataatgcagaagtactgtgtacggctgatgcagtgtgcgtggtgtaccacaaaccaaaacagctttattttacatcaacttccacatatcaaaactgatctgatcttgcagtgatttttatcatcgcacgatcgctttcccttctctcgttcgttctgatcgatatctgtgtgtgaccgtgtgcacatgattcgtggcacatgtaatacagacacacacacgtgtgaatgtatagcagtaaacgtgtgggcataagagcaagtttaatagtatagcccactattaacttcaaatcttctatagccaatgtaatagccaattcatataatagttgcttactatactagtaatatctgatcccacctgtcatacacacattacatcttgaagcccgtgctgcagctggctacagatctatagcatgctgctcttctctctcttcctttatctctttaaaatatgtttatagctggcttataggctgctattgtacctgctctaaatagagtatcaaacctacggattatatatactccctccgtcccaaaaaaacaaaccctgggtttccgtgtccaacgtttgaccgtctgtcttatttgaaaaattatgaaaaaaatttaaaagacaagtcacgcataaaatattaatcatgttttatcatctaacaataataaaaatactaattataaaaaaattcatataagacggacagtcaaatgttggacacgaaaacccatggtttgtcttttttacgagacagaggtagtatatatatagctcttgactgctggttaattgatttggaacctgtactgctgtacacactgtttgtgtcctgtgtatgtttgctacatgtgctgtacaaaccagaaacttcagtgaaaaatggaaggatatggatgcatggatgggcttcaattgaaggaattgagatcacctgcagttgttagtatgactgcaactttagcagtcatacaaccattgttggatcaaataataagagctcagatcacacagaagtactgttcatcagattactgtagcagacgaatcctgtagcgcacactgtagcaagtgataacaaacagtcctgctactaaatcctagccattgaaatctttgatctgatggttgtgaagacctaagactgttaaacttgcagtccctattcaaactgcatgggatccctgtaggatcgaatagcaagaactaagccaaccagaggagggggggggggtgaatggttggtatacctaaaaaccgaaaacttttagcggaaatacaagttaccctcgaattcgacggagatcggtctgaccgagattgatctgcaggtcggaccgagtggatgccgccggtctgaccggtatagatcgtctgaccgccgatgtcgcctgccgcgcctgtcgccgacgccggtctgaccgtcgtgctcccgccggttggaccgccgcgatgccgccggtctaaccgccggtaagtcgccggttggaccgccgaaacccggtgaaacacaaatcgaagaactcttaaagtagatgacgactttattacttctctctgtgtttacaaagtgcatcaacagcactccttacaaaaatttcgactaaactcgaaaccctaactaaaaactcaactcaattgctctcaaaagcgataccgggaagcctcacgctccccctctatttatacccgggtaggcagcctaaagccacgaaccaaactcatgctaggagtcctaaacaccttaggaaaccctctagtacaagaaagaaactttacataaccaatcgtaccaaatttggactccttccaaattcgactccgcatcccatacgcacataataactccatcgtatgccatatggaatctccatcaaccacgtgcatcaactctaacttaagtatcccgcatgatctctgaccaccacggacgtcgtcttatcaccaagccgactcttggtccatcaccgcaaatactctcccgagacatcgagtcatctacacatggaattacaaacaaagaaaccatattccgagaccaagctatctccaacttgactcattagtagcaaacaatagtattacatacgtatagtatccatctagaagtcataatcatgaaataatcatggatatccaaacaaacaacccgaaaccgaaaccgacacagcgtcggccggtcagaccgcgggctgcgccggtctgaccgcgcatatactatcggtctgaccggctaccagagcccggtctaacgggccacataaaatgacagtacctgtgattcacctgtaaatccaatcatctccaaaaccacttcgtgaataaattccaaataacaaaaccaataatctccgatgccaattgttcatcacagaataataataaaaacacctttgattttacaatcccaatcccaattgaagtaggagtagtaattaaggccaatagtgtaatgtactctgagtacattattattaatctaagtcagccaaagtactccgtcagactgtgtccggccgtccatttcgacaagtcaaaagactggaacttttatctaattgaaacagtactgctcgcaattacagaaccgcatgcagtatatatatagtactcttcagacgatgggtcagaaatcaattcacaagtgcatgcaacagtacagaaacaaattaaaattccaatcgacgaattgatgaaaaaaaaggggtctaattaatgtttggcaagctatagcttgctactaggtggccaagcaaatcaaggatatactccatccgtcctactccctatacatttatcaaatcaagtaaaagactagaagatctttattttatcaaatcccaatataattatctatctctttataaactccctatacatttatccactacatttacaaactccaatacaatgactactcacaaataaattattttgtaaaagtcatacataaggatccaaaataatattattttaggacgaaagaatcgagaaagtaacagaaagcgattgcaatttgagggcgtagtacgtctcacaagcagatcatgatgtacgatatcgatcaggccgaccggccgcgtacactgcatgcatgatggttatgtatgtacaagatgtatataatcgatccgtatctttgtgtaatgtgtgccccgagccaggggagcatccagagatcaaagtaagctacgacatatgggtccgatatcaatagttgaccaacgatttatgttttaaggatgacggtaaaggggagggggaggagttggggagagtggaaggtgagggtttccttgggtttagagggatgaccttaggcagtggctggctagaccagcgggcaacgtggttgtgggaccgccattgaagttatggagatggagacaaagcggggttggtggtggggggcaatgaaggtcgtggggttaggaggcggggattgacggccacgaatctaatggagtgggggagaggttgagagggaggtgggggaggaggccagtctggctggcctcgccggtgccgttgatggtttgtaagcatggtttttcgagtagtggtagtggaggaggtagtggaatcggtcacgggagagagacgaagcaactaaggcggcatcagtaattgggggaagaaggaaaggataagctagggttgcttcaagattgatatcctggccatccaaatttgactgaattatttttaccattttcaggcaactgaaggaaatatattactttcatgtatgtatagtagattctaaaaaaaaagttttgtatagctagctaggaaacataataccatttttgcgtgtggaaaatgactaacttttggagcaggggaagccaggttgttaggttgcttcttgtggggatgcatgcaaaatggatgcatgggtacgttggttgttacacaagcaacttgcatgtatatcatatataagttgttgcatgccagagagcgaggagtactaccataccatacgttggctgggaagcccgtgcgcgtaacgtacccttaatttcgctaccgccgtgccccagccgataggtggacattgaatttgatggtgatattaatatgggaatgtgatttttaatctcaatcttctattaggcagagatggtgaaaatcgatagagagtttagatattatggaggctagatcgtaagtaaaaaccgatttttgagatttgtttaggtaatgtataaaggaggaatcctctctgatcaactccttcccctaattaacctatatattgaaaaggagggagtttccccctcaataccccattccccatatcgcaccaaaactcccattcatccaatcacctccacgtactcaaaaactgcaaatttaaaaaatatattaaaaagcagctacaagaatctgatctcccttgggttaaaaaaaagggtcataaccatatgagtgcgatcaccagatgtcatgggaaagtttggcagaaaccctagttgtttatggttaactaatgtactagtactcgagcgatcacctaaggagatagcctaaattaaaataattgaatctgactaattaattggtctaatctgccctagtcctagctccaagtgttgtttagttagggtgacatatgccacttttgcattttgttccgttatgctacaaagctttatgtgctgattagctagttaacggcaaaggtgacttctgctgatgccttttcntagtatgttatcaaaagggtcttcatcaaggatcttaggcatagtatcatgatttggttgttcactaatataatattgagatgaggtttggttgttaactaaacatgctaactagtcacatcaaaccaaacatttaatttttatttcaaatcaagagcatccttctgttacagtgggggttgtttggccttacactcaacggaatatataacggatatactcttgtcgcataacctcgcaaagtgtttatttagttatttacagtctctgaagggataaaatacactatgtttcttttttttttggctagtattagttaatttgtggtaattagtacactagctaggaggttcatttataaaaatcaatctacgaattttagtgttaacatttggtaatacataggtgcatgcagtaccttgcagcacacctccttattgttaataaggaacagtaaatcaccgtctttgcgtaaattttacaaaactaatgatgtttcgataaagctatcaaaaaatataatgcatttaggtgaatttatcataaaactataaattgaaggtataatattgcaaaaaatatagatacaacatatatttttttggtcaaaagctacatgttacatgtatccatataataacgcaagaatgggacctatgaaatttgtagtgttgtaatacattatgtgctaaatttataattttattagaccagcatataaatatgtagtttggtagattcaatgttaaacatgtaatttgtgatacacggcggctttaatatataattttgcgatggttttgtcaaaatatataattttataaaatttactctttcttttaataattcatagtctatatggtacatgcatggctattgggaatgaactttaaacaacgcatgtatttcaacgctgaattataagatattaattaatgaatatattttattaagtaatgaaattacatctgcctctgcatctatactatgctcacagcccaaaaatatcgcgtctctgttatctaaaagatcaagctagctaggtagctattgtgttaagcacatgacccacaacggtagtggttatctcatcaagtccataagaggcgatgatatatatcctatatattaggttaggacttaactagacatgtctcgttacttggaagatagagacttattcgatgtgtacctctgggtcctacttaattggcttaattccaccaaagttgccggaaattaagacactgtatctacaatattaggcgacaggactaatgatggagatgacaaagctagctaacaacaagcatatcgatcaatgatcatcgtggcaaactttgattttagttgtgtcacatgcatcatttcgattaaatttgcattccttttgttcatagcgtctgtcattataaggaaaaaccgatgcactgatgcagataggggcagagcacatcaaaagtctaataatagacccaactaatgttattccattcaagtccaagtaaaattttctgctttctacttcttttttaatgtttttttaagaagattatctaactgtaattcatcatttaacaactgcgcagtatgtgcgtttaccactatttttttattttattaattagaactataggctgagcttgggcacaagttggagcagagtacgtacattatgaaatcgatggagtttgtgctgtacagggtaaaaactgttggtttattgtatcagcccacctccgatatggattggaggagataaaaaccattgtttcttcttaatcaaggaaactaagagaggttatgtctgatcggtaaaaactactactataatcctaatagaattaattagcccccaagccacatcagtattctattgggaactgccacaagttatttcagtaaaaaactttcacatatatctatattatgattaaaatataattacattatataactgcactgtaactatactgtacctacgatataacttatataaaacttgcattcaactatggtttggttagctagtacgaagatcttacgtatgacatgcatgaaaatttctttctatcagttttttcactcatgcacaaatctcgatacaatctgatgattaacaaatatgaaagttttgagagcaaaatacttgcgaaatttttttagcaaatccgtaaacaaaagagaggcaaaggggttgcccaaagcttcgacaaaattctctcaaacctttttttctatgaacatgtacacaaacaactttattaaacaagaacagatcaaactaggggatataccccagtacatatccaaagataagaactgaaagcaaagagccatccctatgataaggagggttaactgaacaagcaaccttctgatgtaaccaaacaacataaaatacaggtcgacagggagctgcgacaataccgcgacgactgctaccttgggtctgatttgtcgtgcactccgctcgacaagccgttaattcccatcggctgcctccacggaatggcacaaaacaaaggtttgttgctaagcgtacattttggtgtgagcatcatcggactcagcaaaggatttccacggagttagtaattgaatctgaggagctctaacattttatcgatctaaagcactaggattcgtatggctattcccagctagtgtcattggcatccagagggtgcttcgctacgtcaacatatagaacaccagcgaccacttcgtgatcaagctagcgccaccgcttccaaatatcatggcttaataaattcacaagcagatccgtagatctattctgaatagcagaagatgagatcatgttaggctaagatcaatgtaaattagactcgatattgtaattcagagaggcacattttttttattcacacattatattgccaaacttaaccgatacatgttaaatatttaaccaggagaagttttaattatcataacataagatgccatatatataagaacaggggtgctagcttattatagcttaggccatgaaaagactcttaattacaggtaatgatggaaaagaaacttgaactgtaagatttgcatattcttttgcagatcaatgtagcattattcatccaatatattatatacgtactctctctgttttatattataaatcattttgactttttttctaagctaaactcgatcaattcatgtacttaaaaattactccatccgtcccctaatataagggatttttgacatttttgcttgcactgtttgatcactcgtcttattcaaaaatttgtgtaaatataaaaaacgaaaagttgtgcttaaagtactttggataataaagtaagtcaaaaaaataaataataattccaaattcttttgaataagagtacaagcaaaatgtcaaaatctcatatattaagggacggagggagtaatacactaaaactcttaacaataataccctaacatttttataaagctaaaacaaaacttcttcctttatggaccgatgcgtatgtaactcgatccatgctaattgaacacaccggcatatttaatttaagaatataaagaaaaccattaaatagctgtcatatatataatgatctcgtacggttttgtgatgccgttgcgttgtcacattacaagctccacgtacgaaatagttgagcctttccgacaatttggttaattgccaatcctttcagattagaaccctatttttttgatgaaaagattagaacactatgatcactaggagctatacgaactaatgaaccgactttataaatatactatatgcaaagattaattagttatcctatgatatctattctgcatgtagtgacggaggattggctagctagctaatcactcaaatccagtgacagcgtgcatttcaatgcataatcgctgaaccatctctagcatctactccctcaaggaacatgtccaggtacattgtctcataagggatcacattttcttctaaattaattttttaaaggacagagggattgagtatatacgaacgtaaatatgtatgcaatgttcatatatatgtcatgtcatgcagatcagacctctttatatgcttgaatgatcttttttttttggtcttaaaaaggtgatcagtagttcatgcatggtgcagtggtgacaaaagccaactaattgccagtatgttaagtaacaaattgacaggatcatctgacggtaattaaaaagaaagataatggagtttgcgccatcagatgccaccagcctccttcctaaaaagtcattgattgcattggatggaaaatcaacaaaactaagtgtgctaaactagtttgcatcaccgcatacacaactttagtttgctcaaataaatactagtatatatttgcatgcatcagagagacccatgcatgcatatagctatcaagcaatctaacctccatgtctaaattaataaatattaatcacaagccctatatgatcaatagttgctccctttatatatatatatatatatatatatatatatatatatatatatatatatatatatatatagcgtatcctatgcacacaggccctcgcgtgtacacaccgtgtacaccaactaaaaattttcacaaaaaattctaggaaaattcatacatgtacttttaatagtattacatctacgtgcaaagtcgcatattcaaattcattctacatagagaataacaaaaaagataaaattctgacaaaattgtaaccttaaaacggtcagattttttgttttttttgttacggctaaaatataatgaatttgacgttaagattttaaccctaggtgtaatacaattgatagtatgtgtatgattttttctagattttttggtgatattttttagttggtgtgcacgtgtgtacacgtgagggcctgtgtgcataggatatgttgcctacatatgtatatgtgtgtgtatatatatatatatatatatatatatatatatatatatatatatatatatatatatatatatatatatatatatattatatttacaagcttatctatctctgatgaagcaagcactatctatagagctatctaaactagctagccaagcaagttaaacgcagcaatccttgacctaagaaaaggaaacaggacaacatattacttaattattataattatagttatgtgcataatgtgacggcgccatgtacttaaattaattagttaaagcaatgaaggggaaagaataattaatggtggcagctctgaccacccatgtgtcgacgcaaagtttggcgtgtcgcacgctaaaatgtctgtcgacgtgtgtgagcatatatatatacatgtcgcttttattctgttatgacttgtgataacggaactacatgcccctttatatgaagtacaaataaattagtactaatagtatgtagatagggaaattaattcagaggacgtgtcgaatcaaaattatttctcttaaaatatactactagtaatatatgaaatataagaggtactaacacatgctacacctagctagtttcggtctattccggtcatgcactttgaacctagctagctacgactaactttgttccaaaatgttgctacctactccaatattaaatgggactaattttgatttgtagtattagtatgtgtctcatccagttttagataatattttttgcgaacgcgtaaaaggattgcacgtcaatatattagcaggaaaagagtttctgttacacaaagcaatcagccagactgacttatgcctaaaaagggtgggggacttgaagctatgaactactacgacggttaaaaacgcaactccaaacagcgggagggggcagagccacgctacactctcaagaaatcccaaaaaaaacaacaccggctaaagaccacagctggcccagttttagataacaatattttagaacgcaggaagtactagttaatcggatgaaaattaatatatgccacaatgaaaattaattggatgttggctgatttgacctatactgctaaaatttgaccttgatggagattcaaattaagcataactcaaattttcaagttcaataagtttttctaagcagacacttacagtacacgtgcacttacctctaagaacacatgtactacgtctataaacacctctaaaaactaagccgacgtatcttgagtttaaattttatagcccacaattgcttatatgctttcaatcagtaagaattctatgagctatatattgagctagttcatatatttatccctctgtatgtacttcatatcgtttgctctactgataaatcgtgaaaaaaaatgaatgaaacaacccaaaaaaaacttatggtaaggcctttatatgtgcattcttaatgatataaatgccaatgcggcaaaataaactacaataaaaaaacttaaaatcaactctaaattaaaatttggttgtggctgataagtcaactatagtaacacaaaataactcttgattaattattgagtagtttaacactggtctgataaatgacaggtagattttcatacttgtggcgcatggttggtatcctccatgttcgacacaaatctatcaaccaaagagataaaaaatattgcaagtttatcagcgattcattaggccaggtaaataacttctgaatccatgcatcgcagtccgtggatagcagaaagaaatatcacatgcatacgtgggccttgggctggcattacaggaagtccaataagttagcaaaacaggccttgtgggcccaactagacagacatcagaaaactggactgtattatgggccacattcctctcccttaacagggcagagaataagtctacattgcgtccctcaactcttgtccttggttgaatcacgtcccacaaccaaagtccctcaaccaaaataccaggtataacacctcctccagttttgaaaactagggcaaatcacctccctgcgccgcatcatcctatgccaccaactctgcgtgcctacctgcgtccatctccgtcgggacgccggggacatgtgccgccgaccacgccccacccgccagggtcgtccacccatggggagggagaagaagaggccgcggcgcagatgaggaggcaaggatagggatgaggaggtgtaggaggggcgtgggaggggaggcagcgatggggagggatgagaggaggcggcgaggcttccttacccctctctctctctctgctcccgccgtcccgccactccgtcaagctcccgtcgccttgccgctcccaccaccccactgccccacggtcatgccgccccgtcgctcctgccactcccgccgagctcccaccgccccgccgctcccactgtcctactgccgccaggctcatgaagctctctccatctcgctcgccatgaggataaagagggaggagaaaggtaactgacatgtgggcccaataatttatttttatcattttactcactgacatgtgggtcccatttaggtttgtctttattttagtgccacgtaagcgctatgtcgatgccatatggaatgatgaccaagtcaactcgccacgtaagtgccatggaggacaaaaccgccgagggagtcgatttgcaatggttttgaaagttaggggatgggttatacctggttttgcagttgaggggtgcgattcaaccaggcacaagagttgagggagtcaaagtagacttattgcacagggcattaagctgggcaatccataggagattaaccacttgatctggcccatttttttctttctggcattttcgtcggcccgtttaccatttccctttttctttattttgtcaccactctttcttgtactattcacactcgagtctacgcatataagcatatctgtgaaaaaaaaaacgaatttgggtgaacaaaaatgttgagatacttataaatcagtctatatataattgctattcctagtatataaatttatttatttcgtgacagttttgctgatctacacaagcttaaaagaagggtatgcttttttttaaaaaaaaagatatttgaaggatttgaatcctatgaaattcctatatgtgtatctttgtaaccaaggaatgttcatctcaaatcctataaaattcatatggattgcctcaattcaattattcacagaattttcgaatggtttctaagatgaggtccaaccacttaggaatcttgttttgtgtttttctcttctctaaattgatcctttgttttctttttcctataaagcatccaaacaattttatttgaaaaggtattgtattgttgagatacttgacgattcatggcttatttcaaacacaaaattcgaaaaaaaatacaagaataaaaaagacacaggaataagatgtcaagacttattaaatcttacaggaaactgatccacatcaatttgtagtaaatgtcatttgtcaacaccaatggaaaatcataggaaaacctaatcaaggttacagaaaacatgatgccaaaccttacgttattttttctccgaaaatcccatgaaatgagttgttacataagaatattctcaaaggatttggtagaagtcaatccttccaaacgaccaagtaggaatattactttctatacgatgttaatcctcaagattccctttgttttttcttttgttccaaagaagatctaaatcagtcgaaaacaaccaggaaaaccccctaacattttcattttcattttttttaaaacggaatcggaacggtagacccgaaaacggtaacgatattggtaatatattgtcggtgacatgggaccgggagtatcatgacttagagacttgaggcagacacgatcacccacgtggcctaaccccctcgggggggggggggtcgggcccgagggtgatacggccgcccttctctttgtctccccgaggggtcggaccgttcccgtctcggccccgagggccgaggcgccccgaccccttgtgggttttgcgccgcgtatatggggtaggtgagcatagcggggcatacctaaccacatttattgcggtttggacgagcgcgtcacgccgcatgtaacgcagtgcagcgcgctcgtttatccggtctgtgaccagtcacagactgatcagatcgtgggttaggtggcgacaggcggtctgacgcacgcctcgccccatcccgtcaggatgagagcctccaagcactcgtccctagccggagccggcgtgttaactcctggagatggcacgttggtcccggtcagatatataccaggcttcatcctaaccattacaagcaagacattgtatgaagaggggcgaacatgcagattgataaactgacgcgtggtgggcaagaatgaccgatttgtgaccggtctgacactgatcatgtcatcagcagacagccatgttcccactcgcgcctgcttccggcggaagtggaggtaggtatgggctgtcccatcagaaggtcattcggacggcaaccatacaagtctccgtctgtttatgaaaagataggataagtccccacaaaaaagagagagatggtgcatgtggtatccccttgaggtataaaaggaggaccttgcccacttagaagggggatggatttttggatccagaacgatcagagagggagagagtaagagctctctggttctccagctcttttgtagcttcttcatacatagatccacaaaaacacaggagtagggtattacgcttctcagcggcccgaacctgtatacatcgcccgtgtcttgtgtgtttccattctcgcgaaccttccacacacagactaggagcttagaatctcacccaggacccccggccgaaccggcaaaggggggcctgcgcggtctcccggtgaggagccccacgctccgtcatctggcgcgccaggtagggggctttgcgtgtgtttttctaagctctcgcattctttcgtgtgcgccaagcttttcctgttcagcccaatggccgaacaagcaaaggcgcacaacctctctccgagtgttagcggtgacgacggggagccgaacccacgccgtcgagctcgtactccaccgccccctccacgccaaagtcctaggcgggaggaggcactcgagagggtcgaaggatccgcgacttcgacatccacgggtgatggggaagggcggcgagatggggagcgtcgcctcctcgtctacggcgacggcagcacgccccagggcgcgctccaagctgcgggcgcgctcctacgtcacccgcccattgtccctgacccggagtctccagcccaacgttggctagacgacgtggccaacttggtcatgacggcacggcagcgcctaggtgctggtgggcggtcctccgccaccaagacctctggcgctgctaccaccggctccgtgtcgtcaaggcggagggcgcggcgagcggcggctgttgctcgccattcagccgccactccttcgtcagcgcctccgacccaggaagatctgcgtggggggccggatgcccgcatcagtatcgagcgccggcgtaatggccggcgtgctgcccacgcaacggagggcgcctcctcgtccggagtgtcacatcaacacggacgcggggatcagccctccgtgcccccggttggtggtgtcggctgtagagcctttgtggcgagccttcggaacgtccgttggcccccaaggttccggcccactatcgccgaaaaatatgacgggagcgtcaaccccgccgagtttctccaggtctacacgaccgggatcgaggccgccgggggtgacgacagggtcatggcgaatttctttcccatggccctgaagggacaggcacggggttggctaatgaacttgccacccgcgtccgtccactcttgggaggatttgtgccaacagttcaccatgaactttcaaggcacatatccgcgcccaggtgaagaagcggacttacatgcagtccagcgaagggatgatgagtcacttcactcatacattcagcggttctgtcaagtccgcaacaccataccatgcatccctgcacacgcggtgatctacgcgttcagggggggtgtgcggcacaaccgcatgctcgaaaagatcgcctccaaagagccctagactaccgcggagctttttcagctcgcggaccgagtggctcgtaaggaagaggcatgaacctggaacccctccggttccggtgtggcagcttcggccgcccccggatccgctgctcggacagggcggcgtgacaggaggaggaagaagaggtcagcccattccgacgacgagggtcatgtcctcgccgtcgagggcgctttgcgggccacccgaaaggggaggcctgcgagcgacaaaaagaaggagaccggcgctcccagtagggagcgcccaaccggcaagtggtgcattgtccacaacacctcccttcacgacctcgcggactgccgcgcagtcaaaagtttggctgagcggacgaggaagtgggaggaggagaggaggcaggagcgccgagagggcaagtccccggcggttccttccggcaatcggcgaagtgaggccaagcagaaggcccccgccgaggacatcgatgacggcgatgatgacctaggtttccaagagcctggggccaccattgccactgtcgatgggggagcgtgtgctcacgtttctcgccggagcctcaaggccatgaagcgagagttctggccgcggcccctactcatgaggcgacgcgccgggcgcggtggtcggaggttgccctcaccttcgaccagaccgaccacccaccgtgcgttgcccggggaggacagatcgcaatggtggtttcccccactgtttgcaacgtgaagctggggcgtgtcctcattgatgggggagcagcctcaacatcctttcccccgcagcctttgacgctatcaaggccccggggatggtgctccggccgtcccagccgattatcggtgtgacgccgggtcacacttggccgctaggtcatatcgacctcccggtcacattcggtggatccgccaacttccgcacggagcgggtgaactttgatgtggcggacctcagtctgccctacaacgcggtcctagggaggcccgcgttggtgaagttcatggcggcaatccactacgcctacctccagatgaagatgccgggccccggtggccccatctctgtccatggcgacctcaaagtcgcgcttgcttgtatggagcagcgcgcggaccacctcaccgccgcgtccaagcccgagggaggcgacgagaggcttggcacctccgcccccgccgccccgaggcagcggatagtcacatgcgacgaggtcccggtcaaggaggttgccctgagcgacggcccgtccaagaccacacggatcggtggtcttctggacggcaaataggaagacgcgctcgtctctttcctgcgggcaaacgctggcgtcttcgcatggagaccggcggatatgcccggggtccccagggaggtgattgagcaccgtctcgccgtgcggtcgggcgcaaggccggtccggcagaaagtacggcggcaggccccggaacgtcaagccttcatccacgaggaggtggcgcgacttctggaggccggattcatccgcgaggtcatccatccggagtggctggcgaacccggtggtcgttcccaaggcgaacgg

SEQ ID NO: 15013 - DNA, 12604 bp, Oryza sativa
cgtccacggattggaagtaatccaagcattccgaaatggacgtgactagacagctaccggtcgctggtttgcgttatcaagcgaccactccatccagtgtaaatccacctttaacttaaaaaatacaaaaatatgtatctttttttaatctatttaataacttatatcttttaaatcacatattggttttaagatctatttgcatcattgtactacactcaaaatatatgataaaacgagatccatattaaatatatttaaacattttattaatttaaaagtaatttattacatgttaggtagtacttttacatcttatacatgattaattcttattagttactttaccttcatcaatgttattttcaatccatcaaaggttttatcttctattctcatactacatgaaaaacaaaagtgaaatcaatgcttacaacagatttatagaaagttacttctgaaccatgcaaaagttacttccaattaacattgaagttacttttaaaaattattaaacttactagtgctgattaaatttaatttctagatagagtcatatttttatccctacaacaaatttacttctaatgtcatgacaaagttactttccttttgttttaagttacttttataatgtatgtaaattactttagactttattgaatttacttttatatgtctaagaagtaatttagtgaaatctaaaagtaatttagatatattataaaagtaatttgtatcataatataatcatgtgagatcttattataaagatttaattgttacgaatacaacggtgtaatcagatcgtagactatatgagtagtttaagaggaaattttatttgaagtatagatggttcctatttgcttgatggactagtaatatattttctgtagagtaatgtgtagagtaatgttttcaatggtgtcgcgttgtaagactaaaccgagaggcttctcggtttagattttgagttccgaaatctataagtatgtctattatataaaattaaaaaaatgagaaattgtacgatacttatatatatgtacctataggcatcaaaattttatattaaagattttaagtaccattaaagataaaatatgatacctccttgtattttctaaagaataatatatacctaaaataaactaaagggttttcccacgtgattccatagtgaactaattttttaaggtacaattggatttcttatacaaatcttagtgtctgtgtacataaaatatataagttgtatgcagtagatcctaaaaagagaatttgattttatatacaaatttcatattctattttcatagatactagttgaatgcctatgctttgctacggataaaagaaaatatattataatattttctaaaataaataaaaatatcctcgcaaaataaataaataaataaataatatatttttcatgaaatgtgtaccaatttagattttattgtgttttatatgtagttatccatttagagttgattgtgttttcatattttaaaagttcagggataatttataaaatttacaattggagtatgtagagtgacaaatctactatcaccaccactatcttttcctttaaggatgtatataaaattgcacgattttttatgcaatatgtctgttaacagtgaaatttggtaagcccaaagttaccatcggcttagagtcagtatcggcttcaaagttctagaatcggccgatgagagtcaagtcgccacgatgtcgtgttcttggtggagtcggatcagtcaaaggaagcttatctagaagagtctgagttcaagaaggatgcgatatgacagtttatctattaattaggcatagtttgttagtttccttttatctttaggaaagtgtgtttagtgtccaataaggactttatcttttcctttttagtttctagctttcttgtccgacaaggactagtatctccctatgggtataaatatgtacacccggggtcattgtaatctatcttcacgattaatacaattcggcgcatcgccacctcttaccttttctgctttattttatcgtccggcaggacttggaacctgatgcggggctgcatcggtgttcgatctccggcgaaggggtaagtccaatgttccgtcggcccaggcaattgtatcgtctacgtcggcatcgttcaaggctacatcagtacattcgacctcttggattgctctagtttggatgatatatttgcctacctatttatcatatgtctttgttaatctatatcaatttagctctatcggctgcttctcgttttagggtttatgccggtatcggctaaatcgcattgctagattagattagcctaggcatctaccaccctgaaaactcagtcaacagcttgattgtctagatattatgtttcttttcatacttagtgctgcatcagttaagtttgatctactaagtcgagcttagaaccataatctctagccagcttcttgattgccaataagggtttcatcggggtttcaaccgatgagttatttggacgttgcatcggctcataaggattgcatatacatataagttggatttagccgatgacaacaaaggtttcactgtttaatctaatcttgtggatttcatgacatcggatctacagccgatgtgtgctttaaccttcggatcgatgcttatttatcatatcattgctagccgattggtttatactggactatattgttatttcattacatcgtcatcagtcgattgcctttatatcattatctacattagacattaagccgattgcttaaaccctatcgctatcggctggtatcggcattggctattatcggctatcggctggaactgctccattggcttgtcagccgatcggctgttttgatctactattttcatatcttgtcagttgcaggatcaaactgactggcacgcccacatctcatcaatctttggacctgcacaggagttaagcagatctccctggccggtgtgttcgatttttttcgtcaacaatgtcttaaattttttttatcaacaattctaggaatgattgtgtacatttatgtcaattaattaaatttgttcttgtaacctaggcctacgatgaaattttaattttttttcccatcccttagatgataatttaatgattctcataactgacctattaacttattacttatcacatcatatccaactactggacaataaactattctaatataaaaaatgtataagattgcatgaaataaacttgtaaaaaattacaaatttacatgaaaaaaattaaacttagataaaactaaagtaaaaccacatataacaactaaatttgcacattgcatggcaccaaaagtttagccttagccatgtgtgattttcaatgatagccaaaaactttgcaaatgtttgtaaatcaatatcgtgaatctttctctttcttcaatgaaaccaagcttctaaagcgaacatgatgaatctttatcatctgtcctatcgacgtacacactccttactataaagaatcaaatatgactatgaatttagacaaacacatatctagattcctagttaggatttgaattttttttaacggatgaaataatagatagatagatagataggtagataaatactccatccgtttcatattataagtcatttgacttttttctagtcaaacttttttaactatagaaaaatatagtagtattttcagtacaaaataaacatattatcaaaatatattcaatgttagatttaataaaactaaattaatattttagatgttactaaatttttctataaacttggtcaaacttaataaagtttgactagtaaaaaaaagttacacgacttataatacagaatggagggagtatatatataggtatggatggatgggaaaatgaacctctcgctttttttaaaaaaaaacacacacacacatacgactttaaatcgatttaaagagagaaagatgttgcccttttatggtcactataagactatagattgatgagactacttataatactccacatgtgctactaacactataatcatttgaacagttacaaactaaattaccggatccggagtgagcaaagtttattacaccggccacacaagagggcagaggctgatcttacgtgtacactagatgactccgatgaatggatgaaaaaaaaatatatattgtcactagaccaatcttcaaatgttgaagtagtaggagtattaattaagcgtaatgccaattcagttgataatacgcgtcacatcagatcacctaaacaaaagggattaacaaggacttactccatccgtcccaaaataagtgcagttttacactattcatgttcaatgtttaaccgttcgtcttatttgaaaatttttatgattagtatttttattgctattagatgataaaacatgaatagtattttacgtgtgactaaatatttttaattttttcataattttttaagacggatagtcaaacattgggcacgaatatccacggcagacagaggtagtaccgagttagcatcaatgcatgtaggagtacacgtacttaggccatgtttagttccagggtaaaagttttggcgtgtcacatcggatatacggacacatatttaaagtattaaacatagactaataattacagatttcgcctataaattgctaaacgaatttattaagtctaattaacccatcaataaccattgtttactgcatcatcacattgtcaaattatgtagtaattaggcttaaaaaattcgtctcgcaatttaattaatctatatatttgatttttttctaatttaaaaagctagtaaactttttttttctacgataaaaaatgtttacgttggaagtaaacatggtcttaccccgtcttgtgcgctaggtactagctaggcagtttactatagccactagaatatttgcgcatcgccgtggtgcctgctgtcaggggccaggttcgttgcatcgatcaaataaatatcaattcacgaatttagtcgactttcttttccacgtacccccccaggtaaaacatgcgtccagtcttataatattaagatttattatattatcttttttcatttagggttattttttagtttgatgtcaacatatgccctaccaaattattgatattttaaatagtagtttgactagtgtttagtttgctatcaaaatgtatcaataagacgtataagttgtcaaaacattaagggtgtgtttagttcacgctaaaattagaagtttggttgaaatttgaatgatatgatggaaaaattggaagtttttgtgagtaggaaagttttgatgtgatggaaaagttagaagtttaaggggaaagtttggaactaaactcgacctaacactatcaaaatttacctatagtttagcaatgcaaatattttgacatggtggcaaaccaaacaagtgcttactttttgaggaagtaggcaaaggccgagtttagatataaagttttttttcaaaacttccaacttttctatcacatcaaaaacttttcaaaacacacaaactttcaattttttcatcacatcgtttcaattttaaccaaactactaattttagcgtgaaataaacacacccatagtataaacaggcgaaatgcccaagctactgtcggcctgcaggcatgctggtctgtggccggctggatgtgggacgcacctggactgccggagatccaggttcacctcctctcctcccttcacttttgcttttcttttgtgcagtgggggggggggggggtaaagcctgtgccaattcttgtttatgcaccaagagacatgcacagaaactttacttgacacgtgcatgggctgaaattttggaggattatccaaacaaggccttacgggtgggcctaatattgcacgttctctggaatcccgttccgggccaaacaatcacggccctacacgcttacgagtgtcagagatgggctggggtccgacagatcacggcctagcagggtagcacgctgcatccggcccacaggagacctcaccggcgttgagaaactgtgccggcgagatgccgagatgtgtgcttctgaatccgagtcgctcttgtcgtagagaactaaatgcgtgcaggttgcagactagcttgcagttcatgcaaatgacgtgcgtgcactttgaatcatgaatggtaattgatctgtgtggttcaattcttctctcccctcgatcgatcaatccagacaaaagtttgaagaacttttttttttaaaaaaaagagttggggagagaagggttttcatctatacggcgcgaacccccgaagctcccgcgtaggcggagggagaaagcctcccccaaacatggctggcgtaatgcaaagcaccgtcacagtgctacacacacgacgcagcacacgggggtttgccggcaagcctctccgcgcaacccacctacgcccatgggaaaaccggccctgaaatcccctcgattattcccctatatatcgggctccgccggagagttccctctccggccaatataaatatcatcccatcggggtggcgcacacacgcggcaccggcaacaccgcgggacgaacgcaagccgcgggtgcacggacaattgccggcggccaacccacccctcgttttttaccccgtcgcggcgcttggctcgcgacttgaccgggcccagttgtgtgacacgatggaatttttgcctgaccccgacggctcaaagcgccgccttagacgaaacccagatggggtgctcgatcgatcggccccctttgtcgctgctccccaaccctaccctccgaagccggagttacagacctgcgctactaggcccggcgatcggagatgcgaagggcgcgcgctttatcgtcagcggcttccgatcgaaatggcgaggtgggacaaaaatgtagcggctgctactcgatcgagccaatcgggttcaaacttccgcggcttgatcatgccgctgtataagtctgcaacgctaagagccatggccattagggcagtcccaacccatagtgtccatatgtagtgtctatagtgccatgtcaataagacatcacaatagaaactacactctacaacccgtggtttcttaaagtgggccattaataaatacatcatctctcttctctaccaatcatatttattcttcatctattatgaagacactattctctcccaatgtaaaacttgatagtgtctaatgcataggttctcatgttgaagctgtgtcttgtatgagacccagtttcttcctctcttcactctctcttaattaaactagtgccacataagctaaaagtcctacatggcaatatatgctatagataccatcctagatggagggttgggactgcccttacttatttacttccaccagggtgatgaaatcggaatgcaagctagcgtgggattcccatgcatgtgctctagtttaggcagcgtcatgtgttcatatttcatcagtcgtatgggacacagaccgaaccacaggtttcagcctttcaaggcgcaaaatattggaatccaacgctgcaccaatgaacacggtcagttgctctaccagtccaccttatctaattacagaaaaactacctaacggcatcccgtggagacggaataagtggataaccatccattcttatccattgtctttctgtctctctctccccgatcctcgcttcgtcgtcatcctccgccccactctccctccgtaacttctcttttcgttcctagtaggggttgggacatgattccatggcaagccctttaacaagatcagaattgtccagtatttcatttgctaatgtcgcgtcgccgacggtggccatggggctctcacatgccaggtccgggaagagatgcaacgatttcaaggtgggaggtgagttgaggtgtgtcgcagacgcatcacacttgtgtgggtgtcaaggatatgggcaacgacgctccggatcaaggatggcaacgataatgaatggcatccctccacctctaaggaagtagccatctcattttcacgcttgcctttgccttttttcctttctcctcatggctctcatcggtgtgaagacatggtactcgcagagtatttgatgcatgggtatcaagttcctgatacctaggtatcgagtaactggtacccagattatccagattagtaccataagtaacagccctgatacctcaggtatcggtgtaccaggtacctatatcagtctagcacccataggtaccagacctaacactggtatcgggtagctaggtatcaagtacttggtatctagatcagtctgataattgtaggtaccaggtacctagattggtctgacacccataggtaccaaacctagcactggtatcgggtagctaggtatcaagtatttggtatctagatcagtctgatacctgtaggtaccaggtacgtagatcggtctcacccataggtaccagacctagtactggtatcgggtacctaggtatcaagtactttgatatctagatcagtctgatacctgtaggtgcgttttgatgcgaaaaaacacacactgccctgaaagatctacttaacttcagtgcaggtccaaaatcttgcttttaggttcgtgagcgtgccagttgatttgatcctgcaatcaacaagaaagaaagacaagaaaaccgcggttaaatccataaacaatagccgatcggctagttgccgatgacatatcatttatctttgagccgatgtcatattgagatcgatcggcagttataggaaaataaggtaaggctaaatctactcgatatatcggctgtagatattaacgatatataatccttccgtcgatgtatatttaaaccaagtgattgggatatatcagtcgccatgccgagacagtataaatcacttagatcaaagtatacattaacacaaagattataaacatttatagcatagccgatcagatagatctagcatgtatcggctaatactccgataccactctatattaagatattaaaacaggtagaatatatcaaacaagaagcctaatatactttaatacaataagatcttaatacaaagggcagatttagcatatcagtcaagtatataagatataaagtggctaaatcaggtaagatcggctaaaaccccgatgctatctctctcgatgatcataaagcaagccagatatcataattatatattacttaatagatcgaactcaaccgatgcaacattaagcataaagacaagtataagatctaaacaagatgatgaaaatctataagagatggtagatacatgatataatctagattaataacaaaacataactctaccgattgcttcctaacagtaagaaccagtcgataacaagttatagagcgcaattaacagaggttacaacgtgtatatgataacttgatgaatcacataaacaggattagagtgccataaagatggaagcactaatcccgagaacgtaaaccgccatgacaagtttacctctagttgaagatcgaatcgatgtagctcaacccgaaagtaagaactcgtcgaaatagaacgaaagtaaaaagggtggcgatgcaccgagattgtattgaactgttgttaattgattacataggttcgggtcatatttatacccgaaatacaaaatatgtccttgccggacacgactcttatctctaacaaactctaagataccataagtctttgcggtagacttttgtccaaacatatctctaaggaatttacacgaaatgtcctaattaatagatacaattgcctatcgagagctttatctctatcgtggcaatcctcatgaagcacattgatcgattctagaaacagctctaaagccaccgccatcggaatcggctgcatcatctctatcggttgtcctctgtccgatccatctcagccgatgtcatcgcagccgatgcatactctgttcttcgaatccatctctttgcgaatccgccttgattccaatgtcgaacctggttcatattttaccaaatttggccattaacagtaccagacctggcactggatatcaggtacctaggtatcaagtacttgatacctagatcaatataatacctatatgtatcagacctggtactaggtatcgggtacctggtacctacctggcactgggtatcggatgcctaggtatcaagtatttggtacatagatcagtataatacctatatgtatcagacctggtactaggtatcgggtacctggtacctagaccaatctattactcaaattggccctggtgttagcatcataacaatcgaaacaggtgcgttgtgtctgagaagttgtgcacttacgtgtggtcccttgtgaggacacgaagagacgtgggctgacacatgagccctcacgtggggtgaagttgataaaataataggagaggttagttgctcaaatagtcatactcattaaattatctcgttggaacggaagtccgtgctctagtagttctctaataattaacacggcatcagcatcactcatagcaagaatcgatcaattattcaattgtattcgaattcagatgtatggctgaccgggaaatctaaaatgaacgtggcagagagggggggggcgcctcctctccccggcgctttttcttttttcgggatttttttcttttcaaatctcagccgacgcttttttaactttgtaatgtattttaaaatttagatctttcatctcaaattttataattttcaacacaaaattaaaaacttgaataaatcttgagttgaaagtttttagattttgacttcaaagttaattttaaggtcatagtttttaaattttgacttaaaagttcaaatttcaagttgaaagttttaagttttgggtatgacttttaggcttttaatagaaagctttaaattttatttgaaactatcaaatttgacgtacagatttcttaaacttttagtaaaaaaaagaagaaaataaccttaaaggttaccttaattatcgtcattatcactgtccaaaagaaatgttaccttaattatcattattatctcctaattttattagttacactaattatttttaattaccgttattattcaaactaattcggatatatatgcacttttccgcgtggcactggggctagtgtggcttagagcatatacaacagcagactataaaccaactataaacacatcttgagaagataaaagaggagagaaaagagcagcgagctgcagatttatagaattgtggttgatcgggacgaatatatcggttagaaaagataatgttggtcggcaaaactataacactaccatctgatgatcagttggcaaaaatatgtatgtggcctttgccgacagatccttcgttggggattttgtgtcatggtgtagtctgcatggccaaaggcaaagaacaaatccaacccctatatggagcatggttcaatctaggatttgtctttgcttttcctcgaatctattaactatcgtggacctccgtctggaccagtggtttaactgaaaaaactagaaccaactcttggttcggtctagttttgtcaaaagaccgtctaaacatatgaacagtaaaaactagccagttgatctagcggtttaatatagaaccagtgaaaaagctgaaaggccgccctccaaaaccaactgagcaaagtttgttgttggttaaatatataaaatagttcattatctctctgagtaattcataagaatctcggttggacttgtctatatctgtcaatctgtgtgtgaatgttacattcagttctcatcgatttgccacacattatttatacgtagattaacaagattaagactgtgtttttctctcaactttccagcctctactccttcatttttcacgcacacgttttctaaactactaaacggtatatgttttctttacaaaaattatatataggtaagttgtttttaaaaaatcatattaatttattttttcaaagaaaatagctaatactgaactaatcatgtgttaataagtcgcttcattttgtgtacacgagagatgagttcttaacttactgagaaagaacgcaaccttaacaaagaaaagaaaagaaaatgaaaaaaaaaaaagagttggcgagaggggttgaaagcgcgtgagagagcccaaggctcccaaacccccaacggggaacggggaaatccccggcgtgttagttgtatttacacgttaggctcgccggaccggaggcgccggaggcccatgtcctcaacggctcacaccggtcactgactcgattactacaacaatggttaagttgccggggccagaaggcaacgtttgaaccgcgggggggtgggtccggagtccggacgctgcgatctgaccctgggccggagacttctcgcgccaaacaaaccacgagctcgggctccgccaccgaaatggcgtcccacggtgagccgagccttgccctcgccaactctaccctccgaagctggagtgacaggcccgcgctaccagacccggcgaccgagtcggggatgtggccg

SEQ ID NO: 15014 - DNA, 2906 bp, Oryza sativa
attgcacaagaaattaaaaatacaatgcttgcagttagtttagattcaacaatgggaggcactagggatgtaataatagagtttgtgagaggcagcaaacttgaagagaaaacaaaaggctggctgtcaggattataaattgcaaatagtccgattcatatacatgtatgaacttgtgcatgctattttgactatttgcttacacgatattacaaacaattgtggaagtgctaactaacaccccagaggtattgacctgttgccatgactgcaaacgcactctcatgactaagccccccaaagtagtaattaagcaaatgcgtccccatgactatatggctgagcgctagaacagcgcttagaaatctatcctataaaaccttgaacgtagccttttgaggccgtgggcattagttacatggtaaatgaatggtaacctaacaacttcacatgggtggacactgtaatcatgattcttaaatagcttaaagataggtaaacaaacttaccattttctttgtgtcatatcgagcaacaaagccaactcctgattttctttgttgcccaagccagaaagcttcagttcccaaggagaggttcttagttacactctgaaacacacaaaaatattagtttaatatatatgttagaataaaaacatattctcggcaactcaattcatgcagttaaatcaggcattttcttttggatcatgaccctaacaaaaaaagtgaaccgtttaatcacttttatcctccagtttaatcaacagaatcacatggcaaacaccacaaagttacttaagagatttctggagttatattcttatgcttattgtacaaagaagctaccacggcacattgtttttgaaatatgtttgtcttcttagcattattacttcctctctcccagtttagtgggcgtattttttttttggttgttgttgatgtaccaaaacacaggacacactggggctttcagccaagagtgctctgctacatgcatgcatgcaagcaaggaggtgctggccacataattggtgcatgcagtgtggcgccattttaattggcttatccgtttcatgcatgaggaaacggagcgcttcaatttactagaatttggtggcttggtgctttgtttacatgcattgtctgcttaataggggcagatcaggaagaaaatatattgcatgcaagggccttagcgaaatattttacacaccctgtaaatggggacagagggagtacttcgtctaggtaaattttaagttgagaaaaggaaaagggaaaaaaagctgtctagtcattacatcatattaacaagaactgtcttcatagcagctgtctatgcacttacacaagaatctaaaatgtagaaaatcctcaaagggcatggttattatatgcaaacacataaacacatacctggatgtagttccctccatagaaggcattattcccaagttggaactgtgatctaaaatctttgccctgcaatcaaagatataaaagcaacacaagttataaaataaagtacaccttcagatataattgataggaagaaactaaataaaagatatatctatctggaatacactatatctcaaatacacccctttacacttgcgagaaatttaaacaggaaacaacacaaagtttcatggaaagaaaaagtttcttgcattggccattcccagtagtattcttcagaactagatattatggaaaaggaaggggtaaaactgggaggaaagggaacaaaagaaaactacggaaattatgtgttgttgagaactcctaagaaatgcatcactacatcaacaaacacgtctatcaaattaacaaactagtaaaaattaggggcacgtttcagagtgtgcattccatcttcacattcttgatgttttcgattgaaattaaagatacatgacaataggaatttatttggaatgcaaagtaattgtaggaaacagactgaaaatgagctataacgcatttcattaaatcagccataactttcctttgaaactaaattgttcagcatctgctaagaaagagtcatctgttaatgattcatgagatgcattatgaaaatactacgaaagtttcgatgccatctcttttcttaaaatcgttcggcaagataacaggctttatgttgtcctaagtggaaatttaaaagatgccagaaaaaacaatcatatcttccattattccatcattttaataaaaaaaatagcaacaatataggacacactttcattaagtgagaaggattctataccaaaacacagtagcttgttgaagaaaagaaaaaaaaatgtatcgctggaatgacattgccatcaaataaatttaccaaactaggaaaacccatcatcacaaatccaaatgtacacaaagactgaccttataatcaaagctaaacatgccttgggagtaatggggctcgttcgtcaactgccaggatacatacaaggtaagctaattagtaagtacaaaaggatggtgttaattagcgctaatctcatattgaacacagtttggctcatatggttccaaacaaaaaacctgagcatttatcttgaggcaaagattttccaatagatcgcacttaacgcgcgcggtcaccctcccgtcgtgcgaaaccctcccaatgagcatcatctggcaaatgaaccacactcggatcaacactgaaaccaaccatattagaacaccaagcatgaaccccttcacagaagaaaagcattgcaaaccttgggatccataaagtttgcgccgaactcgtagttggaggtggggaccttgatcacatccgccccctgcgatgggagctccatggatcccatggacacactgaggcgcacaaggattgtcacgatacagccaaaaccgctagtaata

SEQ ID NO: 15015 - DNA, 611 bp, Oryza sativa
ttattgaatcagaaggttaagtagaaacataaattaatgaaatatagatgtctccttagtgagctgcgctgaataataaaataatagcaaaaggtaaagaaacattacacgccttcaaaatcctagccatctcagatgcttgaaattccaagatatcagctttcgtaggcagcagaacttagcatttgagaagcatatctagccatcataggtgaattttatcgtgccctgcatttagttgtatttggagtataattttgaattgacatgatgttgtttctacaatcctgtgcagcttgatcactggaagaaagattacaaatttgggtttggtatggttcttggagagtgaggcagtgtcggcggtttcttcggagacgcatgtacgattatagcagttggcatttgtcgacagaactaagacaattttagttttgcattcatttgttttcagttcttcatgggtttgctattgtctacggcaccttttttaattgtactggcctcattacttaaaaaggctcgattaggataatgtagttatgagatggtgttggattgcagtagcaaacctgaatataattcaaacgtgttgctcttttttttgtgcg

SEQ ID NO: 15016 - DNA, 3806 bp, Oryza sativa
cccacccaatcccccccgatggagcgcgcggcgcgaccgcgcaaaattcgatcgatcgggcgaacggcgccccccacgacctccgatcgaatcggaggcgatccgggtagcgaggggcaggggaggtgagatggggaagaggggaatgtaccggacggcgaaggcgactcgcggcggcggcggcggtcggcggcgaggaggaggagagagagagagatggatgggaaaggggaggaggaggagaggatggtggaaggggagactttttctcctgcgtcctctcccatttattcggccgtcgatctggatcggacggctgggatttgcccgggcccacggcgcgttgacggcgacgatgctccccgggtttctttctttcttgcggaggagaaagatgaataaaattgatgctttcaagtgggcccggggatgttcttattccaagttgattgaggtacaacgaattgggcttgttcttgttttaaaaaaaaaattgttaggtttccactaaaagaaatatactactagaacaaaagttgtggagtcagctttgtcatctaacagctcgaagggaattcagtctctcgtaagtattttataaatgcttgcagatgattaagtattttctaagataactttaaaaaatgacaacacttttttcaacaacgataaaaaaacaaaattaaatgatcaatttcgatgtatcatgatatgtttatggttctgagatttgataatttagcacttctacattgtcattctaattgaattgatattggtgacaatgacaaataggcataggtggtttgtacttatgtgcatttcccgtataccaaaaatgacatttaattgtatttgctcaaaacaaatattgtcctattattctagagtggaagcacgaatattggcgtgaaactaaaactcgagagtaacacagcaaatagagataaaagaaaagccattgctcgtagcataacgatacatgtaagtgtgtaactacaatgcacgctacaaaagtcatgaacattttctctctaattagctagctagtcctattgtccgatctaagcctttctaatcaaaatcagcctataatccatcgcacactatttgacctatcatatctattgctatagcatgtcaagaggtggaacaagctttctcaaaactacttacttctatttgctaatgagttgagggtcgtgcattgtacacacgtttaccctaaaaatagtttaagctgaatgggatgtaacttcattagaaatattgaatttgcacccatatacagcctttcctcatgttattcctctcccttatcctttgtcacctccaaatctcgccagtagttgtcgataatgcctctacgctcgatctccatcatgtgcccacgggtactctagcaactaatctattgcaccaacaccttgcttacttagatggcagctagaattcaacaagctaggggcaacagctacaagctaatgccactgcagaatggactcgcatgaggtaggcggtgactggagctcagcaaataggcaagcaggacatgatggagctatttgtatgagtcaggtgtcagccaaagctctatgcacgggccgatgcaaaagggtgatggagatcaagcatgagagacaccaagtgtagttggtgtgctcgcattgaccaatggatggctggagatgaacgcaaaatgggtgttccctacgaagttgtggcaaaagagaggggttccacttggctatgaaatttgcggtaaatgagcaatttttgcacaagttttggtacaaacccctgtcctgttgacaggttatacccacctatggtatttgtaatgtatggggatcattagtacaagagcatacgtgagattgcggtaaaagatatgggagacagaaatttttatacggataatagccctactcccattgtccgaagtcggtattgcttttatatatcaatctcacacaaatacaatagagaggaaaacctaatctagtctctagtggttagctgttgttggcttcattgaatattaactcgacgagattgaaggtgtcttgtattgtcttggcttttgtggcattgtattggtcttatcttggcttatcttcgtctcccccgtctcctcctcgagggttttgtatttataccctcaataccccccttgtccaagtagtattacggaagcaagtatggatactatccaagtagaccttgtaggtatcaagcagggactctatttatttttcttattcggaaaccttccacatgaaattttattccatataggacttggtgtatgatgggtccaccaagtcttaatacgcaggtataaggtatctcatatctagaacactgactcgtctcattgcattatagactaacatataaatctccctttaataaggatattatgaggttgttgggaggaagacctaaccttagtcgaacttgctctcggggggatgttgaggtttgctctcgataaatatcccactcccaagtcccaattggtttgttttttgataatggaaaatatgcatcctagccactgcttcaaagaagctataaccaattattacatcgttcattgctgatacaacttcaattaacacctctcaaaattcaaggtgacaagaaagctgaaaggacagccaacgaaggatagacgtaacatcatcaacaatacgtacacaaatgccccagatctccttgtggtttagctcaacaagcattccattttgccaatctatatttttccaaatgatcatgggcttgtttgttttgctaccataccaaaatctaggcaattttggtagtttcaattttttggcaacttatgtttgtcattggtgtattttggtagcaaaccaaacgctagctaaagtatttaaagtcccaacaatttggtagggtgtaggccctgttaaaatcccaccccaaaatttttcaccctgtcacatgtaacgtttggacatatgcatggagtattaaatgtggacgaaaaaaacaaattacacagtttgcgtgtaaattgcgagatgaatcttttaagcctaattgcgccatgatttgacaatgtggtgctacattaaacacttgctaatgacggattaattaggcttaataaattcgtctcgcagtttacaggcagattatgtaatttgttttgttattagactacgtttaatacttcaaatgtgtgtccgtatatctgatgtgacacgccaaaactttacacccctagatctaaacatcgcctttggcttcaaaccaaaatggcccaatcattttgattaaaaaaaacttgatatgcagtaatctatatttttagaaattcctcaatgggccttgagaaaataaggcataaacactacaaggttagttccaactacttaactttctataatcttccattccttgtcagcttgcttcctatcgaggattgtactaatgaataagaagaccatgaatgaaaggatgccacacccttatatcctgtgtctttaattttttaagaattataccatccttcttagactacttcggtagtaggaggggttgcataatagatatatcaaaggataagatcccaactggtttgctatgggtcacagacatttttttttggatttctgttttaaaaataattttaggagaaattattacttattttcttatcaatcatgaaaagggagtcaaacagcgaaaaggttactaagaaaaccacaaacattaatcataacatcatatgaatcaagcatgctctagccaaattttactatacatcagtcaat

SEQ ID NO: 15017 - DNA, 2791 bp, Oryza sativa
aacacccctcacaacctggagaataaatagcacacagtgatgaataatgctaacaagaccaatgaaaatgatattgcttttaagaatgcttacctgatgctcaaggccactatattctccctcggtattttcacgaatagtcacaaggttcacatcatcatatcgagtcttgtatcctgggaggctgttgcaaggtctaacatttgcataaagaccaagctctttccttagtgtaagattcaatgaacggtggccttttccaataggcgtagccataggacctttcaagccaactttgtttctccgcaccgactccaagctttcccaagtcagaaaactctctgttctgggatcaacttctgtaccaacatagtgttcttcccattctattggtacccctgcaacattgaatacctgaaacagcaaaaggaaaagttcaaactaagatataataaatacataagaacgagctacatagtcagaaagcatgatcagaaggcacttggcaccatttttggaacaagaaggtgtgacttcattgcatcaatcgccggaagagttatgtaaggttgtatcctattttgcaagaatgaggatatttacatatagaagagttgcctagcatagtagcattgctcagtaagttttggatcccatgctctatgcaataattaaacaccccgtttaaacatgaactctaatgtgcatttatgtccaccaaaaaaactaggaagataattagctcagcataagcataaaatgtactaccttgttccaaaaagaatgcaattctagctatgcacatggacaaacacttgtctaggtgcattgctagacttgcattcgttttgggacggatatagcactatcttaagcaagccagcaacatcacatcaacactagctccaacattcaggttccctagggagatttgattgtagtttgattattagagtatgacagagtaatctgatggtacacaattgacagcagttattaaatcagtttgattggaggtaaatcaaacagagatatcaaaggcatgtgcttgcagccaattaaccaaacatgatttcagacatgaaaagagaaagaaatcaaaaggaatgggctgatatgcctaaatgaaactcaatagtggagctgtgctaagttaaacccaaaggccccttcctttttatttacaagctaaactaactaggcacacatattcaaataaagcaaaagagagatcaacggccggtggatattctactttttctcgattatcacagaaatactatggggtttaaatttatttattttccactgtgaagtttttgatgcacacactctatctactacttatcttagaaagcttataaacacagtagcctggcacacattcaatcaatgattgaatataaaatataatttatcaaaaataaaacacttgaccaaggtgcatattgtaacccataaactctctactacattgcatgtgacctacataaatgatgaggatacattgtgaacaaaaccgtagatatcattaccggccgcataaaatttcaaggggattgaaacatcaaaacaagaaaacctagttgcccaactgacaccaatagcaaattttagaagaaatcagctcaattcagttggctctccaactagaattataaataatcaagtgctctactttcaagaataatagcatatatcatacatagacttgtctgcagagtatgccatgtcaaatttaaactgaaattaccttaaagtgcatgcacgcaatggactaaaaagtcatgagatccaaacagagtataaggtattttaattttgtgcaacatgatttatcctccctaattcaggaacgtgatttaatttgaagggtccaaaatgccgtctcttggtaagaggctagaatttacaagggccttctgcttctttatcgacgtaaatgtaatccttcaataagcaacattcccagtgaacagaaaaactaaggtagaatgtgcaaactatttatgctcattgtcatatctaagttttcatggaaaagaaacaaaacagaaataagcaatgtcctcgttattttcattgccatttacaggcggtagaggtcattattatttacatgcagtagtggcgggggcataagttcacatcaattatcagatggcgtaataagaaccatctttgcacgttctagacagaatgtaaataaatctgtgggcagcagacaaaaaactaaaagagacgaagaatttaatcatcttccctgcacgtcatggccaaaataaatcttaaagctgttgcacacagcttgaaaacaaactaacaaacttgcttttttttttctcatcggatcaaggaaggtccgcgtcggacgaatacagcccgagctgatgggagtcgtggtcacagaggggtatatataataacaaatcaggatatacaaaaccgaaattccgtacctgcttgaccgactcggcgatctccggcccgatgccgtcgcctgggaagagcgtggcgcggacggtctccccggacgccgtcgagaacggcgccgcggcggctctgcccgccatccgcggcaggacgctcccctggagcagcctccgtagcgccatgcccccccttcctccctcttcctgctgctaccctgcgcaccaccacaaacacacgtcaaccctagactcccaacacccgcggaacgaacggggcgcggactagtccaaccccaaccccaacacaaaaatcatcaaccaaatcacgctcgctcgatcgaacgcgcgggggggggggg

SEQ ID NO: 15018 - DNA, 654 bp, Oryza sativa
  unsure (1)..(654): unsure at all n locations
ggctcgtcagccggctcgaacagcgcncgcgggcaccgggccgaccggccagcagcgacggcagcacaacgcgggcaaggggagaagcggagaaggggaaaaagaanagccgaaggaagncgncggcgctccggtgactgacggcgacgacagagggacggccgaggatcaggacgacctaggaaaggtggtggcacggccgggcgaaacccctctcgcacgcggggagcggctgaaggcagccaaaggcggctgtggcttgggagcgcgagggagaaggcgtttaggcggtgggttggaggagcaaagcagcccccggggtggagcttgatgcagcgaagtcgacagcgcaaaaagagcggtgaggcgtggtgatggctagcgcggcggcaacggccggccggaggcaacatatggtagtggcggcttgggttggcggtggaagcagcgttcgggcggtggaatgaaagaggggcgcgtcggttgttctgcaacgtgaagtggcggagctggtggtgcaggtggcgtagggcggcggcggctctagcggcggcggcgcgcggccagagctcgtcggttagcggcggagcacgggctcggcgtggggagaacgggagggggcgcagggagctcggggagaatagggaaaaatgg

SEQ ID NO: 15019 - DNA, 587 bp, Oryza sativa
ttatgtttgcagatcagttagttgcccgatcccatgaggcatgctaacatgaacatttcctggttccttttggacatcaaggtgccgcagctttgtcaaattcattgtgctttccggtaactcaatgagacagcaacaatacttgagttctaatgtctgaagggtttgtaactgacctatttcagctgggagactttggatctttgtattgttcagagccaagaattgcaagagtttcatcttcataatagaactggggagctctcgtattgttgtacagctcaaattcaacgctcttaaaaatctacatttcatgagaagatcattcagacccagtattttcaaaagtggcacaaatgaacctgggtactctgatgcagatctcttgacaaccatcagggactgcagatgtctttgtactttagtcagcacaactgacttggaatctggaagaacaactgaaaggtggcaaatattttctggaaggctgcaaaatgcttcccctgaactgaagcattcatcctttgagacggagcacgcccaatcatgaaataactcatgcataacaaacttatccttatgatcat

SEQ ID NO: 15020 - DNA, 581 bp, Oryza sativa
ttcagcagcaagtcccaatcgaatccggccgaggcggcgccccctccgcccggaggcggccggcgccaggtaccacctccgcgtctgtggccgtagccgtagccgtagtcatacgaggccgacgaggaggaggccgaggccgaggcggaggcggaggcggaggaggaggcgcggctgtagaaggaggacgagcggatgcggaggtcgtactcggcgcggagtcggtcgtcggagaggaccctgtaggcgtcggaggcgaggcggaagcggcgcgcggcgtcggcgcgcgcggccgcgtcgggggagtgggcgtggcggtccgggtggtcgcggagcgcgcggcggcggaaggcggccttcacctcggccttggtggcgtcctgccgcagccccagcgtctggtagtggtcgccgcccatcgccaccggcggcgacgaccgcggcagcttggagaggatctcgccggccggtggatcacgaaatttctcggcgagggagaaggggaaggaggaggcgatggagcgcgacgacggttgcgtggcgtggcgtggcctttcttcccgaagcgcgtttcctcgggc

SEQ ID NO: 15021 - DNA, 578 bp, Oryza sativa
cagagttcgggcttttctccaaacttcttgggctgttctggctgagcaggcagagctggctgaaatgactgagctggaatcattagaagacttggagtagggttgaggctgtgctgctcactgttgtagttcttgttgaagctacccgggtggtagggacggtgctgccggataatcattgtggaaggtccaccctgatgtcccatcgtgaagcaaggcttctgactgatcccctgggaagttctgagctgagctgccttcctcttacggttcattttgttgcactgctcttcctgacggatagctttgtccaccagcttctcaaagtcctcataatctctgcagatcaactggttggtcaattcgtcatcaagaccagacaaaaacttctcctgcctctcggcatcagtgcgcacgtcctcaggggcataacgcgcgagacggttgaactcatgcaaatactctataactgctctgggtccttggtgcggagaacggaactctctcttcttttgtgccacgattccctcaggaacttgggctttattgaaactctgacaaaactctgaccaggtaac

SEQ ID NO: 15022 - DNA, 6085 bp, Oryza sativa
ccttctaataatctcattggccccatgtatcccttctccatccatcatgtaatcagaacgatacgggtctgactgctccggaagctgatttggacgctttgtatgtccctgttccatacgatttagtggatcgttaggttctgcttggatgagtcccgtgcgactcgcaatattaggatgctcttcgtgcgcctgcattacaacatcaacacgaaccaatgcactattagagacagcagtgtagcatatcagttcaatggagagaatatttagcatcaacttcatgataatttctccaattgagaatatgcttcactcaatcaagccaggaatcatgaaacaaaacatagctgtagtcaaactgttttttaacatcaaatggggcatttgccctaacctttctagcaacactttcatcactcatagagtcacagtacatcgctttgctgaacaccattctacctcctctaaaaagaagtgatatggtagccattgaattgagtcaattcaattgaggacacgggagtggaagcgtacctcccggacttggaggatcggcggtggcgacgaggtgccgatcggcaccacggggacggcgccctccaccgcggcggacgacaggaggtagtgccggagccgcgcggtgtcgacggcgagctcggcggcgcagatggggcaggcgcagcgcgccagcccgacgggcacgctgagcagcgccccgcaggcgccgcaggggagccgcgcgccgcggacgtcggcggcgccgcggggcaggggcagcgccttcctccgtggcggcggcggcggcatgagctccgggggcagcgactgcggcatggcgcagtcggggcagatgaactccgtcagtcccggctccacctccagcgtctccccgcaccccgcgcaccgcacctccagcggctccggcgagcctccctccgccgccgccgacgccgcagcgcgccctggcgccattggcgcaggtgggaagaggtttcgaggttgttttttttttttctgcggcgaatgaggagaagtggggagggagagtggggggaaggagaagcgttgcgggatgctgatctctagcgacggtcagcctttagctagtctgcctagtaggagtaggtttaacgcttttttttactcaccagcgagtgaattttatgaatatagtaaaaagaatggatcaatcgatcccaaatacaaatttgttcatcggtactgctatacacacgaactagctgttcaaactcatgtacagctaaaaacatgttaccatagatcaatcaaaaagtatatgttcacatgtactgtttacaacagttgatcaaattcagtcgtacataagtctaatgatcaaattcagtcgcacgtgactctgataattagttcgtatgtacaacaatttcctttgttaatattctatgctatttcgagtgataccacaaattagcgatccaacgtttcgatatacaggcaaagggacgctttctccgctcatttccacaagaccaagataatgtttccgattgagtaaaatgcatgagcggtgcttaaacttgagcagaggtgttacgtaggatcgtaaactgaaaatttgcacaataaggttcatgatcttgttttaatgaaacatggtcggtccaaaaaacgtttaaccatatctgaccgcatacgtagcattccacgtaggcagcattttacatctggcccccttcacatctcgagaggggatgcaaagggatcaaaggatttgagagattttcggtgactactgtagcaacaagaggtaagaacagaattaccgccacgtcgagatgcagaaggggttggatgcaaaatgctacctacgtgaagcgccacatagttggtcaactctagtcaaacgcgctttggaccagctatggttcattaaaacaagatcctaaacctcaatgtgtaattttcaagtttacgcacataagtaacacattcgctcaagtttaaggatcggccatgtaatttactctttccgatttttcgctactcatttgcatatgtgatagaatatttcctaacagaatgaatctgaacagagaagatagatactcctttcatcttaaaatgtaagaatctagtactggattagacattttatagcattacgaatccggatagagatatttaccagattcatcgtggtatgaaatgtctaatccggtattaggtttctaattttggaacaaagagagtaataaacaaaacgtgaagagatgaagctattctggccatctgggtcaagagccaagagatgagtttcactatcgatcggagtcagcgtagcagcgggaaataccactgctggcagtgcatttcagcatctctccaaaagaccagggacagggaaacagcattagacgcaggtttatatattacatggccaaaattctacgcggcgaggcagatcaatcgcttgtagacaccacttcctcctcctcaacctcataatcttcgtcatcgtcgtcgtcatcgtcgtcgtggtgtctcgcagattgacgcctttcaacatgctgtttgtctgattcgtcctgcaaaacgttacaaaacaagatcgctgcttagtcgcttcaacgaacaagctacaaaagatggttggaaagcatgatcaaatgtatgtgcagcagcaagattaagtgggtcaactcacaaacccacttatagactaatcaaatggattgaccagcgggttacgcacttatttgatctataagtgatttggcgggtcaatccacttacacccttagctggtaagcatgacctctagtagattttcctttgcttttgggaaaaaaagggaattcatcatctacctgatgttttgactggtcctgttgaacatctcctccagctgccgaagacccaggggcatgctgcagagtcaccagatcaatctcttgggtctagtttggaaaaggaattaagtgaaaccatttacttactccctccgtttcacaatgtaagtcattctagcatttcccacattcatattgatgttaatgaatctagatagatataaatgctagaatgacttacattgtgaaacggaggaagtagtttttatgtgtacctcatgatcaacacctaacaatggcgcaccacgcacactttgctccagggatttaaacttctcctcccaggattgatttaaaccttgcagagcatgattgatcatctgttggacctcctcctgcgagaacttctgctgaccccttttaccagggatggactttgctatctccgcgattttggccttgtcgatggtgccagtgagtccatagtacctcccacggttccggccccccacctgctgtatccatgcagcatcgggatctgcaggtttatcaccagcctcctccattcgcttcttgaaaccctcctggaaaattcagtgaattgcaaacacgattcagcagccattggatacactcatctcaactagtttgcatggttgcatgatgcgtttctacaataactgcatagcactctttagtaactctaccatcaatccagtttcgcttttctcacatgacataattctctctgtgccacctattaacacttatgtggtctgtgttgtaatattctcaatgttcgtgacacatggctgtcccaccgattgctctatgacgctatgcaattcaatcagaaccagggtaatgtgttataattctgagtttttttagatgaaaattaaaatgactaaaccaatggaatttgtctttatgtcttaccataagctgccgttgcatggcaaagctccgagaacctgatgtgtgatgagcacgacctccaacaaaccgattcttcctatacttcagagacatctgcaagacttcttctttggcccaatattcacacaatctctcccaccaattcggatgcatccatgcaggggggaagggtttccacagtaaagggtcctcgtcctcatttaccttttctgtctgattgtcctttggctcttctgtagcatcttcctcctctgactctgcatgactattggagctacgagaacctgaagcttttttggctttttgtactgcagccaattctgctctaacccttcgcttctcttcgcacaggaggccagtaaactgttttactgctctgcgctgaaatatcttcaggcactcggcctcacggccaggggcccacttgtacctttgctacagcaagtgaatataagatcagaagcctgtcaaatatatatgacagtgcacatgtattaatttccttacaagaaattcattcaaaatagcagccctcgtctctgcaggataatgtttccagcggtaaaccaattcctcattagctggaacatcaccatgctcaccaaccggcaaataggttgatccagggtacttctgcttcaaaagagcagtgatggtagaggacaccttgggacaaagtgggttgacatcccagttactgtcagagaaagtttatttgtcaagtacatggtaaagaatgcatcaagaaacactaccgacaatttatcaacgcacatattgccttcaaataaaatgcacatactcgatattatttggtgtcaagacaggcctgtcatattccctgcgtggttcaatcagtcctctaggacggcgtcccctgcccctacctgatgatttacgactatattttcttaatacgggatgatagctatatgcgtcctgctgaacaagtgaatgcgtatcagcttatgcattcagactcccagtcacactaaatatatagaattcatgcataaattaaaccatcagatcctcaaacttgatcctacaatcttgctcttgggcaagttgcatctaatggaagctctgagcctcatacctgttgcgcatgcgtaacctgctctggtgactgtggctgcacctgctcaccacttttatcaagctggtgtgtacccctgacctctggagggcacagttgattgtagcggtgcggggattgctcggcttgaggcatctcacgatttgaagatgctggtaaaacagatgcatcagcattgcctgactcacttgagcatgcttgaggcatttggcactgaggtgatggactgggacacaaattggcaatgagtcggtcaatgtctggaggatcagaattatattggtttggagaagcagctggctgctggactggatcatcatttattggttgttctggttgtttcgtcaagcgcttgctacgcctaagatagagtccttcatttggagaactcggaaagcccttatttttcctcttattctcaccagcattcttgctgctcctttttctcttcgggcatccaatcgtcttaccagcttgtgcttttttcagttcactagcttgattgaggggctctgctttttcccgctccatagtacttgagacattttttgcccgctgttcacgacttgaaatgtcaacaagaggttgctgcccttgtgcgtggtccccacgaactgaattactcggagggcaagcttgtgcctgtggtgtgctttcctgaataggacgctctggttgtagtttttcaatatatatagattcaacacctgcctgcaatctagccttccttgaactagaccttgcagtggttttatcaagtgtctcattgcatgattcccccctatgaattgaatggttaacaggctcctttcgtgccaatgtgtgttggactgctgctggggagtcgtttctgaaagaactgaatgtctcctctcttggaactgaacgaatggagcattgtgctggtatctgctctgaacgaattggatggtgtctttctatttgtgactgctgcaccaaaataaataaataaatcaaaagattagatccatacatagtagagtaagaaaagaacattgaaggggagctcgtgatcaaatagattttgcagaaatacaatgagtacatcattgtaactgattttagtacattaagacttcgacttgcatagtctccgttcagctattggctatatcactgacactgattttgcttgttattaagattggaatgacccacatctagactgattgtctatggttgttcgatttac

SEQ ID NO: 15023 - DNA, 3041 bp, Oryza sativa
ttccccctccccctcccacccccatcccaacctagtaccctaacccgtagggtcctctgccggagtctagggtgtcgccggcgccggagaagaagaggaggtcgccggagttggaggataaggcctggagcacgaatcgcaaagttcatccagtgattcaaaatctgcaagatttagagatagattttctgtcaatatatcgttagcctttccgtaaagaaaatcaatccgggcaatttatgagcagctaacttagcttacttattaaaacaacgaattcgagaggatcggagtcatcagcttcgaacttttttgttcactgctagttgtgcgtccatatatcgtgggggcggcatccacatacgcaaagattattgatcagcagaaggaaacaaagatcatgtttcttccacatcatgttacctatcatcgatcaaatagccgtgtccacatctgtcatacatgctggccggtactccatgttagccaaatccattctctctaccaacctcagatccttgagagggtgtcaaatatcctggcaaaatgctggttgaacagtttaaaaccgctgtggaaaaaacaggttaaagttgaactatagtgcatgaataattaatggtctcttcggattatagccaaaataaaccttaccaaattttggtattgccaaatttttggcaatttgacaatattgccaaagttttagtaggatttcttacttatttatcagagtttagtaagaaactaaatagatgcacatattttcacaattttaccaaaaattggtatggtttgaaatgatatctatctgaacaggtcctaagttttaattattttaaagagataatagctactttagtccctaaagtttctctgtaggatcagtttagtccctaaccttttaaatggtctaaataaatccttaacctttgtcataaaacctagaatagtctttgggtccaccaaaaccatcatatggatatgccatgtcatcattcatgcaaaatctataataaattgtccaatttacccttacgtatatcatagaaaaataaatataagggtgaattagacataaccataggaaaaaatacttccttttttcaccattttgaggtatatttttgctcttgcatataccatatattttttttaactttttccttttgttttttattttcctatgcgtaagggtaaattggacaaatcatatagattttgcataggaaggtgacatggcatgtccatgtggcgattttggtgggaccaaggactatattagcccacatgacaaatttaaaggacttgtttggacaatataaaatattaagaactaaaatgacccaggagcgaaactttagtgaccatattagctattctccctattttaaacatgaaaaatagatttatttgatattttaaagcaaagacaattttcaacgaaacataccatttgataggtaagtttaataatttggaaaaacgtgctaacaagtcgagataaaatctttctgactttctcttactcctcttcagccatacgctcaagctttaactgaagtccatagaaagcaagcggcagcgtgcaatgcgtgtccagtgcagcggcgcatgcgcgtgagcgcgtcaatgtcgttaagaaacagttacatgtacctgtcagtggcacaattgggagctcaatagcagctgagattttcagcgaggcaaaagacatacagaagtagaagagatggtgagccaatcaaagcacaaaccaacgcgtagtagctgacggatttgaattgtccgcacatgagctctcccagccactaaatcggggagcccaaaggaaaaaaattctctcaattattgctgcgtgatccactgcattattgtccgatcactcaaacagtggtccatcgaagctttcggctgctcgatcgatcagttgccattgccgtttgccaatctcacctgcatgctgtatccattccgactgaactggggtctgaactgaactgttcagatcagagagaagaatataaaaaaacattcagtgacactagtgttaatgcttgtacattttaccagtgcggatgaggtcccgaattgtcgataggttacagctgctgcacacagatgcatggaccaacttcactggcaagtgtagcgacttccttgactgctcaggaagaagggaatcacatagaccaatctgtaacaaaaaaaaaatgaaatattttaatcaagagaatagtgttgttgtaggaaaaattgccacgagtccttttcggagtaccaaaaatccctggattggcttgttccacagccacaaaatatgctaactaaggtaccatcagcatcattgttgtgcgaactgaacgtactcctcttgctacaaatatagaccaaacacttgggactctaaaaagtacacaccaccaatgttgattgtttcatcctacatattaagctcagagcatcctcacattgggcagcgttacacaagtaccaacaatattagaaacctaccaaatatgccattgaaacacactatgggttgccaactccaataccaccttctataagcccaaaaaatttgttgaagaatgcatccaccaagtttagtgctagataccttgaagcgtatcaaactatacatagccatgaagctcctgttaccgaattcggaggtgcctcggatctattgggagaaagctcagcatctctgtgggttcctgtccatgaagctcatttccagagccagatgtgtggcaagttctgtcaaacaatcttatagttttctggtttgcaaaagtaaccctttggtagttcagctcgtttactttgtgataatctcatttgctggtttccttgctctgaagaatctcaagccccagggtaagccaggtccaaaggatttggacctattgttcacctctgtgtctacacttactgtctcgagcatggcaacagtagagatggaagacttatctgacaggcaactctgggttctgatccttctgatgctaatgggaggagaggtgttcacatca

SEQ ID NO: 15024 - DNA, 736 bp, Oryza sativa
ctatagggcgaattcgagctctgtaccccgaacaaggagatcctggagcacgaccggaagcggcaggtggagctgcggctgctcctgctgagggacgcgctcgaggagcaggggtacacggagggggagatcgaggagcgcgtcgaggaggcgcgcaaggaggccgagatcgaggccgcggcggccgcggccgccgaggaggaaggacgcggcgcggggcggcagccactcccgggcaaaggattggtttgtgaaaattgagtgtttttagatggttttcatacggagttgaccaaatttgtcagattttacccgtttttgcttagtttttggtaaaccgaaagtggttttcaccttgaaaatggaaatgtgaaccctggtgtgcacaagatttgcgcttcattggctcaagaatggccataattactattgtactcagttttggtcatgacctaaaccatggattaagttgtccagatagttcccatgtttttctgggccagttcgcaatggctatgacagaaagaaaggaaaacaagagacagcactaactaaaacttctgtcttacaaaatcatgtatgatttttttgaccggaaaacattaggggaggctatttgactttattactctaggtctacaaaattctgtaaattagtttctggtactgaatatggaaattctttgaataataaacaaccgcaaatctggtacttaaagatattttttattaccat

SEQ ID NO: 15025 - DNA, 6409 bp, Oryza sativa
gaaactaaaagaaggctgagttcagcgtatataaccaaggtgcttgcctctattcctagttgaaggacaggaagaaaatagaattctcaagtccaatgccaagaatttttaagtggctcaacaatacatggaaagtggaacccccattgctggatccattgacaatctcagaacatatacagcttacgcacaataccattcaaagaccccctgcaacttgcatattcttgctcaagtcacttgcaagaacttatatgatacccactgtcccaaaataaagctatttccagagtttaaatttgtcccaaaatgtagctatttctacacctaccctcttatctcaaccaatcgcaaccatctcttatttaattcctccacctattttctcctctcaaccaatcacagcattcagttccacctacttccttaattcctgtgaaaaaatagatgcttatattttgggacatgtggagtattattgagccaatgcggcattccagtagagcaagaccagcgctctaagcttctggagaaaattgcaatattgggactgcaaacattggggcttcgctgttgacactccgagtggatgataaatgggcccatccgtgtctatgaaatatgggtccagtgtcattatagcaaagcttatgtttgcagtgtcataattgcgaatcccccaagcttctgactgcttaaatcacagacagatcaaaatgtacgcacctccggccgatggcgcagggaagacgccgtgagcgtgacgccagctgggggcggcgccacgacggagaccgtgggggcggcaggggaagcgaagtagaggcggaggcgcccgccgtcgacgacgagctcggcggcgcagaccgggcaggcgaagcgcacgagccccgccggcacactcagcagagcgcagcagccaccgcacggcatgcgcgcgggcgcgggaacctgcacggggaccggcacgggagcgtgcaacaccgcggcgggaggaggcccccgtccggggatgggcagagcccgccgcgggcgcggcggcggcggaggcatgagctcgggcgggagcgcctggtgggtcccgcagtccgggcaggcgaactcggtgaggcccggctccacctccagcgtctccccgcaccccgcgcaccgcacctccacgaactccggctggccccccgccgcctccgccatggcttcggggagcagcggctagggtttccttcggtgcgccctcggggaacagagtagtagttggagtgaggtgtgagtgcgagatactactactgccaacccctagtacccgtagcaaagccggaatcggccgtcgggaaaagaaacggctccgtgtcatgtcgcgccgtgtgggtcggaaatttactttttgcttagggtgtgtttagtcacttgaaaaaagttaaaagtttgggaaaagttggaagtttatgtgtgtagaaaagttttagatgtgatgtgataatggaaagttgaaaatttggaatagttgggagtgaactaaacacggccttagagggaaaataccttcgcgccaactttttcccgcccggcatcttccatttcattttatcgcttttgtttacacggaaaaaatgttgtagatgttggtgctcatataacgcatatatactcacccctataaacatatacagtcatacacttacaccctacgtcaaaaaaaattatagggatgtatctgaacaagcatatcgttataagcatcttcgaatagtgagcatatatcatttgagattgttaatcccattatatattagaggttgtttggttttgagaattttcaacccttgagaatgagaaaatagataaataaggttgtattaccccaacccttccaattttccaagagatttgagtcaatagaaaatttcatatgttttcttctctatccaactcgtatgaaagaaaaaaaaatctttgattttcctatgtttcatttccacaaaacgaatggcacttatgaaaattaattcttaggaattcaaatctttttttccttcaaactaagcaaagtcctaaataattggcatgtaacagcagcaggtaaaaaaatagtgaacataatcgtacttcagtcttgtgttgggaaagaaaaaggagaaaaatgaattgcataaacaaaaacgatataagggcactcccaacctatagtgtccataagcagtgtttatggtgccatgtcaataagacatcacaatagaaactacactctacaacccatggtttcttaaaatgggtcattaataaatacatcatctctcttatctaccaatcatatttattcttcatctattatgaagacactattctctcccaatgtaaaacttgatagtgtctagtgcataggttctcgtgttgaagccgtgtcttgcatgagaccccgtttcttcctctcttcactctctctcttaattaatatagtgccacataagctaaaagtcctacatgacaatgtagttaatgccatagacaccatactaggtggagggttgggactgccctaatggatgcaatatcctcaaattactttccatgtataataatttgaagatgtcttataatttgatcttaagatattgttaaattgccattgcatatatgtatagtctgtttggtaaagctccaactcttaaatttagttttaggagttgggtctagagtggaattgagcctaaacccagctccacatctctagtttattttatgagagcgctccacccaactacacttatattttagatggagttgaaattgtttggctgagctccaactctagaagaggtggagctgaaactatgccaaacaagccctataaacgtgaacataacttatccacgcaaaagaggaatactcaatacaaacaccaattcaataaaatatactctgtaaatgatactgcaaactatgtacaaattttaaaagagtttagtatttaaaagactatcacatattcatatataaacgttaacaacatggcttataaataaattgtaaaacctaaaattaaattttaaattttgattcataagcataataaggaaagaaaagatgaatatttgtaaacaagaataatgtatagtactcacgcattaggccagtgagacagcggcgacagccaacagttgtcgggactgtcactccacccgtcacgctcatccgatcgtacagtcccttttcccgagagcggaagagggaaaacggaaaagaaaaaaacgcgcgaagagaaaaaagggggaaaaaaaaccaaaaccctagcgatcgcttcccccgatccatggcgccgccgccggggatcctcgaggtgcggtgcgccgggtgcggcgagaccctggaggtggagcacggcctgacggagttcgcctgccccgactgcggcatggcccaggcgctcccgccggagctcatgccgccgcgcccccgccgcgcgctcccgctccccgggcgcgcgagcgtcgtcccctccgccgtgcccgcccccgccaccgccaccgccgccgcccctcccacgcgcgtctcgtgcgggggatgcgcggccgtcctcagcgtgccgcacggcccggggcggttttcgtgcccgctctgcggcgccgagatcgcgcctccccctcccctcgcggccgtcgtctcagtcgttgccccgccggcagcgatcccgattacctccaatcggccggcgatgacctccgaggtactatccagaatcatttcctcccaggatttccctcgcaatgcatcgttgattattggtttcattaagtgtttatttatactagctcaaatgtgagcaatgtggtgatggtatctgttggccttttgctacaaacttgtgacatgtgaggtgaaactactttctataggttgctagtagcataaccatgcttgtattgtacattgaggactatgacctgtgtactaagcagtgagattaaatttgattaggaattctgaataagcatgcgtgactttactatcagatcacttggttttagcaaggagtcgctattgtagcattcctgttttaatctcaacaacccgcattttctcatgtttggctaaaaacgctagggatcagcatggccaatatatgggtaccccttgaccagttatagttcaactaaatatattgcatgtattagaaagctgtattttagttgacctaaagtagctcaatgagtacccccatggatgatccatgctcatccctaaagaataacaagtttaaaagttaccagcataaatggtcatttctcatttcgttcgaactgaatgtgtgcatttaaagaaagagtttacctatgcgcaatcatgattggtgcaattaaccagcattgttttttcaagtatccacgaattggaaaaaagtgatgtatttgattcagtcaactttggagaaaagtttaaacacttcaacatttgaataacaacatccctttgcccctttgacctttctattacttccaaagcacctgtggtaccactagtttaatgatcaaccatctataaataaataagtaaagattgcagccactatattctctaactgtcttgagctagaaattagcatgtttgttggatctgcacagttgattgtggtgcatcgaaattataactatggaaattgatcaaatatatattagagctgttacaagtcatgtaagaaatacaattatattggaagtttggaacaaacatgtggtatcattgatcaaagttgacagaattggctgcacttcccatggtgacactttatttagaccaatagtagtatttcatcacagtgtttcatggtgtttttcttctttcaggtgctgaatggaaattcaaatcagccaactcttgctggacaggttcagaagtccattattccagagcaatactacaagcattcttttagagaggagtcattcagttcattcagagttgactctaggacacaaattcctgatgtagggaggttacaaaacgagtgtgttaatccttcagctgatcgagaggagtcacgcacagaaccacctaacgggactatgaccaagcctggcaagaagaaaactacatctgcttctggtccaaaatctcatccagctggaaagttgcaggaagagcatattagtaaggccatccatgcatcaagggctcagggaatgccttcaaactctgtaggaggaggatttcacaatggcatgattgcagtgcacaacaagcagaaaactgggcatatagctgcccctagtgctatcgagcatgagcagataaacactctccatcaagtttgtgacaagcagcagcctggcgaaaattccagtgatttggttcatgtggagcaggtacaggtggcatgcaaagcagtacaaaccataaaaaaggtaccaagtatacaaaaggaaatcaaaagaggcaaggtaagagtccgttgaattattcaactgagttgcctcatcttaggcgtagtcagcgcttaacaaagggttcgccagaccctattgatattgagcctatccataggatatatgcttccccaaaccaaaatcaatcagaaactccaccaattgagagggcgatagatgatacttaccatatttcaccaaaccagcaccggtatcctcaatcagtctctaataagttggacaatgctgatgcaactactcctgctttgaatcatagtatgcaacaaaaggagagaattccccagtgctacagccagatgtactctccagaaagtaggtgggtacttccaaatcgtagttctaattcatgtcatgagcatgagatgcctaatgaaagctttgatgggattgtccaactcgatagtagtgatgatgaagtgcattcaattccattagagaaccaaaatcaggatatggatggccaactagaacaacaagcttgtgctggcaagaacctttcagagcatggcaggcaaaagaatggcttcattggttcttcaggtgatgccaaacatcatgggggcttgtcctctggaatgggaacacgccaccagatgaatttggctgcttcatgcagccgccttgctgttttattgccagttgcggatgctactccattgcccaccatcagctcaccttcttcatttgaaagtctgtctgtcccactctccggcatgctcaattgtttctgttgagtcctttctaacatgttcttccgcacctgtgcagagctaccagttaactgtagcagtccaacaacaccgcaccagcaccaccaaccatcccccatctattctcaggttcctccctttatctattcttgctgaacctttttatttttctttgggtgatgctgaactttattttcagtttgaggtctgaacgccagtgtgcttgaaaagtggaaagagcagacaaccaagtttctt

SEQ ID NO: 15026 - DNA, 12196 bp, Oryza sativa
aacgggaacgacctctctcagatgatgctatcaagctgctgtacgttacaaaaattaccccattcttgatcccaatggcctttgagtctagcttagaatatggtagcttatttaaagggtgcactgcatgaaaaaaaaacccaacatcaaacacatatcaaccataaatacttttgatcacttaaggtgaaaatttaattttatgagttaattggcttcataccctgtacacattttgcaccaacgtcatccaaatctcttcgagcatcatacttcaaatcagagccaatagatacccacctggaaaatacaaccataatacaactagaatcaaacaatgaagcatggaaacataactataagatattgttatgaattcatcagatcactaaatgttgtttcttggcaacaatcttacactgccttatgctttccctgttgccaattttcccatattaatccagcaattgtccggcccttaccaacaccagctccatcaccaatgaaaaaacctgctctatcaccagtagggagatgataaaggtgccgctgtcatacaacaacataaagatttacaagaggtgtgacatataaaacttcatagaagaatatagaatggcactaacctgacaagcataaactaatgtttcgatttgcaagcaagacaaggcctttgtctcatccaattcatccatgatgttcaagctgtaagttggctcaggaggctgtacagctgacaaagaagaagtttctactattggatctggatgaggcagaccaagagagagtttgggaggcctctggaaacaagtgaaaatatgggaaaaattctcaagaaattaaatatgaatcacagtaataaatatgtgtacgaatatttatgcatagtaaagaatcagctgttaaagtacatagaatccttacatagtcagtgaacgtttctccaacagtaccaccttcatcttcttcacgctcaacatcaattgcaacctgcttgacaaaaaagcccagcaagtgaaaggctgtaaacctggtaaactattataatacaatatataaggctgtaaacctggtaaactattataatacaatatatgaagcatgcatcaacaatgtcagagaaactgaatgtttatgggtgtaaaacattgtacagtttgaaattaatcagcagaaacttttaaatcctgctgtacacatccaaagagcagagaacaatgtatggacgaccaagcagatgaattcaaaaattgaaaccgaccagccaaagccaatcaccagaaatgaaaaaatattgccctaaccattaaaaatgaaaattaaggaaatcagattgtacataattatgtcatgtgaagccctcgttatcatctcaagcaaaacaattgtccaatttcatgcataataaaagtataaatggaactataccaaaattgccttcctagcgaatatatagcccattacaaacagaatttctcgttatgataaactatcggtccaaaattgcctcgattaacaccgttcaaaggtcaaagcgcattcatcaagccttaacgaataagatcgtatacactaaccaacaaaatggcagagcaagttagtgcacaacagcatacctcgttgatctcctcaggcggatcagtgatgggaagcaccatcgggatcaacgcgccaggcaccatctgcggcgcctgcgtcatgcctggcgtcggcacgggggggaacggggcgggcggaggcgcaggcaccaaaggcgcccgcgacgcgggtcccgaggccggcgggacgttgtccggcggcgccgcggcggcgttgttgttggaggaggccaggaagttgtgcagcttggcgaggtcgacggcgagctccacgccgcactgcgggcagcggaagcgggcgaggccgtggggcacgttgagcacggcctggcagttggcgcaggggagctggatcttcgtggggtccaccccctgcgcctgcgggggcggaagggccgcgccgcctccgcctcctctccgggacgtaggcggcggcggtgccgccggggcgggaggcgcgggggtcgcggcggcggaggaggaggaggagggcggcggcttgggcatcagctgcggggggaggcgctgcgccatgccgcacttggggcagatgaactcggtcatgcctgggccgacggcgaggacgccgcggcatccggcgcagcgcacctggatgggcgcggcggccggggagggggaggagccgccggccatcggcggcgaggcgaggcgaggcgaccgagggtttgtgagagaggaagaggggggcaggtcgggttcctttccttgctcgctatggagaagcaggagcaagaggggggaggaaaccgaaacggcagagccggaggagcgagtgggttggtcggttggtcttctggtccgagaattaaaagatttcctgctgccaattgtaaatttttactgctagcgtcaaataagaggggattttggtgcttgaattttagttacatttttacctctgttctttttgttgccggagttgtttttaagggttcttttttaatttttaatagttcaaactttgaccatatggtaaccattttgttttttcaaagagaggctccatttttgttctttcacaaaaatggaaaaggaaatggagagttgtttcaatttagataatacgacaattttatcacatgtacttctttcgtcaaaaaatacttaaccaaggggttcctagattaagcttttttttatttaacggagggagtacgtaacgaagccaatatttagcttagataaaagccaagagacttggagaagaacgaagccaagatttagcttagataaaagccaagagacttggagaagacctaacgcactaccgtattacttagttcatacctaggtctagttaattagatgaccctacataaaagattgttagaggacctctgtccatgtaagggtgtaagtggctaaaccatagagtcatttataagtcaaaataaatggataagtgtcttattttgatttataagtgtgtttcgtgggttagccacttacaccctttgtctaccccatctccgcaaattatacaacatccaggtgactacatatacagtttgaaattacgatataagaaaagggactgttgttttgaagatgctgacacggtgacaccaacacacacgaacacatattgttgttttcaaatttcaaacatgccatctgcaagattggaagtgaaatggaacacagtggaagaccaaccacattactctcccaattactctcctaacaactcaaagaaggaccaaagaaagctgctatcatgcgtgaccaaccaactaaatggaaaacgcagatgcagcatatctgagatccttgcgacgcctgcacgatcagcatgctaggatgtgagtaatacttccactgtgtactcgagcatccaccaaccaggttcaacctgaaaatggaacgtggtaaagacagtagtaaatgacatcctctagaaaccttgctagtttgagtttcatatttacactgaataattgagagcttgatattacattacccgtgaggcaatcatcgagtttgttggctagaagagttagggttgtacagcacagagtaatcaatatagggggactgcaaatcatcacgagagctcgatgcattttggccctttgatgtaaaaagataaatagcaattctgatttagatacaaatggcacagtttcaaacaacctaatatagtaatacctcaaatcagaagttataaggatatcacctgtggaaaacttggaggcgccgttgatgcacccatcaatccatcaggcaaaccaccatttgacatcattttctgcatggcgctcactgtattcctcatgttagccaaatcctcctgcagctttttctgactttcctccattaccatcatcttcttcctcagtgtggcagcctcattttcagcaatctcttttgcatccacagcttccttgaaggatgccttaagggctgccttttccttcaggccactagggctggccccaggttcatggttatgcatcctacccctcctcttttcacccatggctgtgacatcatcactgcgcttacgagccttgtcacgagaacatgactagacggagaaagaaatgtcagttcttttacacttcaaaaggtcaagtacaaaataagagtacgaatttatacacatgtgaaatatagtaatggacttaataatgcaagcttttgtgtaactaatagacttcatatagtatagttgcatcaggttatttttccctctgtcacgcaaataacacaggaatagtttatggttacctcttcgtcaagtatccgtgcaaagctcttcgatcctgtagagctgatataggttgattttgctcgagaagctttgcatctagcacttgcagcctgtatttggggaaaaagagaagggtgtaccaatcgtccaacatgatgcaaaatcaaaatatgactatattgttacaacatatgaaagagaaatgtgcagccttacctgtgcctcttcggtattccaaaatgcaacaaggaatcgccactgttcttttaggacacgaggatcacaatcagcaagacgttcctcttcagttatatgagaatcatagtgttttcgttttaagttacacctccaattcctccactttgttcttatgcatttcagtagcaaggactcggaagatggagcaacataaaatttaagctacaccgacaaacatggagtgggaaagaagctataggcaggacaaaaaacagtattagtaatcataattcataaatcataccttaataatatgccacattacatccttgttctcctttggtatacttttccattttttatatgtaagaggtgccaatattccatcacgcgctagtgtgcccagaaagttaccaaacatggcagcattttttccaataggaaaacctgaattgttcaaggatactggaagccgcacaccttcaggcaaggtccacactttgacacaaagggtagggccacgcctgtgtcctttctttctcttgctacctacttgaaacaaaagtataataactcacctgaacagcacttctttaaataaaatggcaaatgtgaaacatctggattcactcaaaattgtatcttgcttgaaaagggtagtcattttagcttctgtagaaattctacttgtgatcctatcttggtaatttgatccacaccctccacttagacaatgatttccaaaattcttttaacatgaagttttgaccaagtactttttctaaccttttgtactgttattctgttttaaaacagcaatattcctctcaccatcgtttttgacttacaacagactggagtggagtaccagtgtcatgaatagaaaaggtgtggttaacagatcattatggcgcccaaggataactaaaaatgtgtttaagaccctttcagataataaactggtgattatcccttgaaagttaaactggttaccctgttcttcatggttcaactatattttttttaaaaaaaaatctattggggaatcataagtgggagtaatagcactgaagtttatcagcaggtccactggtgatattgcaacatataacagtaacaacaaaggacagtaatacatctaaaaaaaagggacagtaatacacattaccaatattctggccagatggcttctgacaatcacgtgcttgctccgcatcaggaaaatcatgcacaaattcctcatcggaacattcctcggagactagatgattaagtaatgaattagatcttttctttgaaagggcccttctgacctctagagggaatacctgacagtaatgttgagcaaaacgctcaggatcagacatatcaggatttgaaggagttgtggctaaatcagggtcatctggttcactagatatttcccgaggcttctcatgaacagaggatgtgctagggcaaagaccagcaatgattctgtcaatgtctggagggtcagacatgctttgatgtggagaaaaagcacaatgctcgtgatgctcactttctacagattcggcgtctgtcgtagatactaaaacttcacaatttggagaaggagactgatgcagaataggctcctgttctattggttcactagacatagcaaccgccgacacctggcaattcggagaagaaacctgcaggtcaacagggtcattttcaactggttcattttctacaacagcaactgaatctttggccaaacgtttactacgcctaagatgaagacttgaatttgaagaagccatcagccccttcctgttcttctcccgggcttgactagaaggctgcttgcaattttcgacattaatatgcttcttctgagcctcatgattggggggcatgtgtttctgatttatatggctaagctgattcggagagactagcagatcctggttctttagggtcaaattagagtcaactccagttccagtttttggtttgccttttcttccaatatgcttactctgaggatcaaaatccacctgcattgcatgattattaatatcagaggtatgtcctgtgtgctgtataacatggctcagtggctctatctgtctcttgttaacattatttttaggatcaactacgtgtacaatgtcctgctcgctatgccttgcagaagaatcttttctgggtcgaaagcacatggcttctctatgagtcgtttgacttacatcctcgtgaatttcctgatctggatgctctatctgtgcatgttctgcatcattagcataagattgatttgtttgtgtctgctttgtgacctgatcggcggtcgatgtttttctcttccctgcactaacagtgttatgtctaactgagcatccagatttccaactgtcaccccttgcagttgttttatctataacctgaatgcatccctcttctccatgatttgcttggtcaacaggttccggttgcgcctcctctgcatgaatcgcaccatctagacaccctacctgagtgtgctctgcacgaattgcatgagcagtatgcttttgccgcttctgtgtgatctgattatcgtgttcaatacgcctcttatctacactcccaacagcttcgggggcaacagagcacataattctccggttgctatgagttgtagcagtctcatatatcagttcagcatggcttgcttctctataaacttcatggctaagaggcccctcctgtacctcctctgaatgaatgactctatgcaggcgtgctagttgtgccggctttcgctgagtaccgtagcttgaacgctgatcatgtacctgatgcctggccgcttttatcggcaacaacctattcttcacacttacaataccaggttcaactgaacatcggttcctctgctggatattacttgaaacaatctcatgagcttcctctccaccaaacacaccatcaggatactcttcttcatcctgctgtagatgaataagacgatcgggatgctgtatccgtgaccgttcaagaggaaatagtctatcatcagcttctgctcgggcaaatcctgaacgaactgcagaattagggcgcctttgccatgcctgcatcacagcagaaggagatgcaattaaaaccctagccaaggtaaagcaatggattgaaaacgtcggtactagctcggctagcttcgattgaactgagatttcgtcgatgttgagagatcgaacgctacaagccaaatggtgcatttgatttgaccagaacccaacccacccacctcccggccaccgaggatgggttgcgcgggggcgggggcgaccggcaccggcaccggcacggcggccgtcgcggcggaggacaggatgtagttccggagccgcgcggggtagacggcgagctcggcgccgcagagcgggcaggcgcagcgcgacagcccgacggggacgctcaggagctcgccgcaggagccgcagggcagccgcgccccgcgcgcgtccgcggcaccccgggggaggggcagcgccctccgccgcggcggcggcggggccggcatgagatccggcgggagcgactgcggcgtggcgcagtccgggcagacgaactccgtcagcccccgctccacctccagcgtctccccgcaccccgcgcaccccacctccaggatctcgtcgggttcctcgtcagctgctgccaccgccatcgccaccggcggcggcggcggcgccattgccttcagccctcagcgcagtagcgtcggagtgtggaggcgaacgtttgggccgtcgagacgtcaggtcgtcactaaaaggcaaacaaacatcacttggggtgtgtttagttcacaccaaacttcccccaactcccaactttccatcacatcacatcacatcacattcaaaactttcctacagacataaactcccaactttttttttcaaactaccaactttccctaaacttctccgcctatatggttctctaccctacacctacacccaaatctaggtaaattttggtactaatactaattttttctggtagggtaaagtaggctagcccatgtttggtttgataccaatattaaaccaaagtttagtatggtgaagaagtttctagaatgtgatcaaattgagtatgggcattaccaattgtttggtttcaattcaaactagcatgtttactattcaaagttaccaaaattttggtagagcgcattttggcttcaatccaaaacagcccttgaagcacagaaaattcgtcgcgtttttgccaattcaactcgtagtacaattagaaaacacaaggtataaccctatagagagtatgtttgggggagtttctagctgctgcaacttctcccataaccaaaagctcccttaaatagtctatgttttggtacagattctgagaagttgtagatatagaatccagaaaatgaactataagctcgaaggcagaagctgagaaacccaacttttctatattctcagaaactggctaccaattaactgcttctcagaatctcaagcttcactaaacacgcccaaaatcatttcacaggaagggaaatgcgaagtgaagtagttctagtcagtgtaaacaaaacagaagagagtatcctgttacagtagccaataaaacagaagagtacaagcactgggctccgggtttagagagccaacattacacatgaacggccaactaaacgtctaaacctcttcgtttcatacaccattccacgatcaagatggaatcaaccatgcatattggcattgtctgtggtgcgattatcatcgaaatcgtggactaggggaggcagaaggatcgtacagtgcagagtagtcaagatatggctgcaaaatctcatgagcgcttcgtgaattttggacctggaatggatgaggaggaagcatggattccggatcagaaacagtgggataagctgttacaatgatagatactttctggaggtgcaaaatggattatagctggatactccatttacctgtggaaagttttgcgtttgaccatccgataggtcaccagttgacgtcgtcttctgcatagcactaactgtactcttcatattcgccaaatcctcttgcagtttcttctgactttcttccattgccaccatcttcttcctcagcgtcgctgcctcgtcttcagcctttcttttagcctcctcagcttccttgaaggatgcctgcaagactgccttccgacgatgacccctcttcccacgcaggccaatggagcaggattcaagtccgactttgtgtgctgcagagtcacttcctgagcattcggcttgcttatgagattgttcacggactcgtgcctgcatggaaaataaaactcagatctcaaccagaaaattattagtataaattacttccttgtgtctcacaatgatatcagctttttccttcttcataggcttcccgtttctgtgtgtatgagtcaataggaacaaatccgcagcagtgggctcctcattgttaggccgcttctgcttctgttgcatgcggtaatacaattagcacgtcattggtgatagtgaaagcaaagcaacaggattttaattacctcctccctcaattatccgtgcaaagctctttgttcccctttgcagtatgcgtagcggttacatttgcccgacaagctttatttcgactactcacagcctgatcaaagataaagttaccaatcatttaacaagcctgccaaattgcaaacaagatggcaagaaaatagaatggtcggtgttaccttcgctttttccgtaccccaatatgcaactaaatattgccactgttccttgagaacgcgaggattttgatcagcaaggcattcctccaccgtttcatgagtatcataatgtttttgttttaagagagctttccaactcttccactttcttcctatacacttcatgatccagaattcagcagctggagcaatgtcaaatttgagctacatcaacaaacaaggggtgtcagagaagaaactaaaggcacagaaagcagcagtaaccatataaaactgcataccttgacaatatgatacatcacatccttgtttttctctggaacacgtctccaatcttgatgtgtcagaggtgccaatattccgtcacgtgctaatgcacccagaaaggtagataaggtgcctgcctctttcccaacaggctcccccgaagcgttcaatagcactggaatgcggacacccttaggcaaattccacaccttgagacagagtgtaagaccacgaccacgaccacacccttgattcctcttggtacctgcttgaaaggaaaaaaaaacaatgagacaatcagatgagcataacaagaacagctgtcaaatggtggtgttctttatagacagagtatgaataaggaaatgaacaggatttgataatgaaacaggggagtgtgaacagtttgtttcaaacaaatccaatttattatatgtttagtggtctacatgggaaaatgaatattttagtgtgacaagttcctctcggtacccacgagtctccattcttctgtggattcagcatggataaaatgcaaaaaaaataataaaaaaaaaaccctccaactatggtaatcatgggcagatagcttactgagttcaaaatgatatgtattatagcttaataagactcataatcgctgctcctaatttccaaagaaagaaaacacttctaatccccaagaattctttatagatatgtttaccctcagcagtgtaacggataagagtgaaggagaatagcttaatgagtttaaaaggatttgcatcattgcttaataagattcataatcccaatgaaattattttatctttataaggaggtttattctcatcagtgtaaaatagacaataataagagcaaggacaatggctcactgagttcaaaaggatatgtaccagggcttaataagattcgtcatccttagaaaaatattttatctttatatggaggcttattcgccctaatgtgaggcacaataataagagtgaagcgtaatagcctactgagttaaaaaggatatgggttgttgcttaataagattcataatcccaaagaaaatatctctttctaagaaaacttattctccatggtgcaacacataataataagagtgaaggacaatagaagtgtgaattaccaacattccagcgttcgtcgcaatcttcagaatcacttaatgcatgcacatcaccagaacttgcctgtgacatcgcacgctcaaatgatgaattactagatcttagcttcgcaagggcctttctaacttcctgcggaacgtagttacatgcaaaatgctcaggatcagacatgtcgatatcggaaggtggtggtgtagttaactggacgttgtcaaactcattagagactttttcaggggtcatatgcctaggggatgaactagggcatatgctgttaatgattctgtcgatatctggagagttagacaaactctgatctggagaaggcatatacagatcatcaggctcattttctgatggttcactgtctgtgatggcagctggcatgtggccagttgaagatgcagcttgcctctcaacaggatccctgtgtattgattcagtatccatgactgcagcagatacttggtcattttgagaaacctgctgctcaaaagact

SEQ ID NO: 15027 - DNA, 690 bp, Oryza sativa
gcctgctgtttgttgccccagaggaggacaacatggagacgatcgtcgcgcagatgcgcttgtaatcacgtggaactcgtcgccagacaccgcagatcttgcccgtggcattctgatagacactgagagtgcccgccaaggtggtctccagttgatgctcctccaggattacacccgcatcatcaacgaattgaatggcacgcggacgaccgattcgcgatgaggtgtagaaggagtagtatagattcttcttgtggaacaggaaacgggcggtggccaccacattctgcggattgtaggtggtgtacatggacttcatttcctcacccttgaggaaataggaggtgcggcccgttagcaacgcagcgtaatctataaatagggatcaaatgaaaggtggagataatccaggtgttagataaatacaatagttctcttgttaattaaatgtaggagctggtgaatgggattacaatttcccgcaggatttggcggattctattgggatctgggtgggtgtccggtacttttgtacttacgtttcatgttgcgctcttcctcttcattgggcacgggcacatccaaggctacatccgtatctgaaagatggagggaatacaaatagagaataagatgatgctgggcgataaggtacgaccttaaatggaatttagatagcaacaaatgctt

SEQ ID NO: 15028 - DNA, 18363 bp, Oryza sativa
gtgtgtgaaaccttcgatggaccggaggtggttggtccttgctaggggaatagatacttgggttgacaccaagagagatccaatattgcaaaaaaaaaaaaaattctaacatagctgctctattgcgtccatagatgttagtggacatataaatatgcctgctagtatgttaagcatgctccatttggaggtagtaactggtaaggtctcagcttttgtattcaaatttggaacctaacttgcataatttcttgaagcatcaatcgacgatatatgccaatcgctgaattcgccaatgtagctatccggcctttcttagctggagcacaaaacctaaccccagttcactcctgacgctttgcaggacacattagattccgtggacggtgaaaaggatccagcgggggaaggcgaggacgaccccgagaaccaggattatgatgacgatgagcattggagctgagccaaaacgtgagcttgtggtggcaccagattttcgtctcctcggagcacttcccggttgccagcgtgtaaatcatgtacagatttccagcatctgaaagcggttgtctcgatcgcttgctggtcgcttccccatacggcttcggagttaagactttttctcaccgtcgtgcgtcgccgtgggaggcaggcgcgtggtacgaaagaaagataccccccgttgcgctgcgcatcctcgctttcctgccggccacgctgcgtcacgcggaagctgtcgcgcgcggcgcggggcaacgcgacgcgcgactcgcacgccaccggcgcgcgcgtgcccacgcgttggcaccccccgtgagcaacgtgacgctaccaccgcctgcctgtctgcttcgcccgccgcggcttcctcccctctgcacgcggtgcggtgccgttgcctgtttttttttagtactccaactctagcttttcggcgtgaattatagtagtagtagtattttgaataggggtacgtatatattcttctgcgtatattcttgtgcgtaggtaggaaacggagtgctgagcaccagctgtacgctgagctcgtcaaccaattgtcaatctttacgaatggagtattttgcctaatatacccactaaactagagttgacccggtgaggccaaactgctagtctttggcaatacggttatttcgtgagacgcggctttgccaagtgttagatcgtattttcccgacaaatcatttctttgaacggtaatttacgtgacggactgacggtggtgtttattacagcacgggctgatcagttggtccaactgaaacctcatacccccatcacaacagctttgccaaattccgtaatgcatacgtatgacccgtcggtgtgtgcgatgcaactgtagggccagaaaagaaagaaagaaaagggagtagtagacttgccggtgaaaagccgcgcgcagaccaggcgatggagtccgcgagcgaccgaagcgggagcgaaaaaaaaaaggaaaagggaacgaaaaaaataagttaaacaagtagcagtgggggccccgcaccgcgccggccgccgagcgacaaaataaaattcagagactagcgaagtagcgaggcggatatccaccgatgcgggtgcgtgtggagtagagaaacctcgcggaggagggcgggtcccacctcccacgccgcagccgccgcagtcgtgtgtccgtccccatgcgtgcgtctccgtctccgtctccgtctcctggatggagatttgattggacaagtggtgtgtggtgggcgccgtaacggacggtgggccgcagtcacgcgctcggcgagcggggcgctttgcgacgacggcgacgtacggctcgcgcgcaacgcgacccgcgcccgacgcggacggtgggtggtgtgaaaccccgcggtctgcgcctctgacgtgacggccaccggtgctcgacgcgttagttcgacgccgcgaagaataaaaataggcttgcgattggccaggaaaccagaagctgagaattgcctcacgctgggtacgcttcggatactatgcgtgtcctgctcttttctaaccgctaaatgttgggggtttttttacgaaaattttctatataaaaattattttaaaatatcatataatctttttaaaaaattagaaaatttgaaactcgattaattatgtgcgaatattttttttacatgtttatacttaattttcatctccgttaggttcaagcgggaaagttactccttttcatataaaacccttacacgggacatactgcgagtaaatttagaattcttttttcaactatctaatcaatcacttcctctattgtaaagtccagagggatagttaaaaattaaaagttgttgtattaacggagggagtacatttttaagtggtttaaaccttttttacaaaccacgtcctacaggataagtttagtctggatttttcatattttgatccttttaaaaaacttatttcacagatagacccctaaaaaaacttatcacagaaatggtcctttttgggatgctagagtggctggcgccgtccccctgccgacgtggcggggcgatactgaggtggctagggggagcgcgccagagtggttggcgccccccctccccgaaattttttatttttcttttatttgtttgatatttttttcacgcttaggaacacacaaagaaccaatcatagaaaaattgaactcaaatggacgtaatatgtgacctatagaatttttcctctcctctttctctttctccgaactagtacagaggagagagatgtgcaacttttttatttttattttttttttgatattttttcacacttaggaactcgctagaactaaccatataaaaaataaactcaaacggatgaaatatgtggcctgtggaattttccaaagctctacgaaaaaacttctctcttcgaaaacacaattttgcaagtggaatttggaggttttaatatcttccgagtccgtatgagaaagttacacctattttaataaatgacacccgaatgacttttcggtagagctttggaaaattctacaagttacatattttgtccgtttgagtttattttttctatggttagttcctgtattatcctaagtgtgaaaaaaatatcaaaaaaataaaaaaaaagtgcatatctctgtactgtttaacttatggctatgatttcatgtggttatatttactaaaggagttatggtctaattttgatgaaagtaggctaagtggtatgctattttcagacttctagctaagtggtatattccgttcgagtttaattttttcgtggttggttgtatcgtgatcccaagtgcaaaaaaacatcgaaaaaataaaacaaaaacaaaaaggttgcaactctatatagaggaataggaatggaggcgaggggtgggaggagctgcgccaacatggctggcgtcctcctccctagggcggcgccctcctcctgacacgtcggttcgcgtgtgccacggtggcaggaggacgatgccagccactctagcgacctaaaaagaaccgtttcttcgataagttttcccagggatctatttacgaaataagtttttcaaatgaccaaaatgtgaaaaagtccattaagtccagctgcactatgtgtcacgtgaagtgctcgctccatcacataaagactataattatcgcattgataaaacaaaattattcagtagcttagggcctgtttactttgatgctaaaaaaaccttaccaaattttggtaaagttgccaaaaaaatggctatatttagtttgctgcaaaatttggtaactatataagaaatcttgctaaaattttggcaaagttgtcaaaattttggcaataccaaaatttggtaaggtttttttggcaacaaagtgaacatgcctttagttttttttaatggctaaataactgaatgattttgtgaccacattaaaggataccaacaaatatattattaaaattagattttaaatagattttcaataaaaaaatccatatgtagattttcttttgaaaaaaaaaatcaacccctaacttttttctaattcttgatattttggataaagttctctctccaattttgttgcgacagaccaacactagaatagcaattacgaaatttaaatactcctactaaaatcacactcgtttgaatgaaaggttccagaaaatcgattcgtgttgtcatggcatgctaattatatttagatcatagtgttataagatatagatatacaattttgctataggttttacgaaaaatcgtcggtgtcgtgtgataccggctatatccgcctctgtgtacgccgcctgcgcctcagcgtctggcagagaacagcgagagggaaaaaaaaagggttggcggtttccccattccaccgtccaaatccggcgcccgaagacttgtccggtccagctcgcagctccgctcgggtgcagcgtgcacgcgcaacaatacaataatcctccgcgaatctgccgtctacccgcggccgcctcagcccgccgccgtgccaagcaaggaagacgcggtgcagctacgtcgtcctcctgcggccgcccaccacatccatcgtccgtcccctgttgcccaaaaaaaacactttttttttccgcccacacctccctcccgtcacatcacgcgccgcgtcgtcgcccccctgcactgcgcaccgcaccgcgggccacgccacgccacgcggctcgcgccgcgaccgggacaccgtcggccccaccaccgcgcgcgcgctctcgcgctctcgcgctcgcgtttacgacgttacgtacgggggaggtggggataacaaaggcggcggccggtggcgttggccccaccacgcgaaattgcgacggttttgctgctttttttttttggtttgcttgtctgcatgtctcgttttgcgcgcgccgccgtcgtcgcggtggacggaattatgggaagcaatcagctgggtgcgcgacgcgacggcacagccgttgttggctcgctataccatcccttcaccgcgaaaatcggcgcgcgacaccaccattcgcttcgccgcctacctgacgcgaaaatacacggacctcaccccttgttgattccaccgatgggaaatggcaaaaagaagtaagaaaaaaaattggaaccaaacatacagattgagatcggatacggtcgtaagtgcgactgcaccttacgactgcatatatttttagccatttatttttcagatctcaaacattctaacgcatgcatgattatcaataatgcgaggacaaaatattataatttagaattaaatatgatattttctaatacaatgtatttggatagacagtctgtcattcttatattttaatacggaggtatagtacagcaccctgcgtcgtgccgttgtgcgtccaaaaggatcacaaggacaataggacggggcagcgcagcactcgaactaccaagcaagcaaggagcaagggaaagcaaccacacacacacgctaccaaatcagcaccgtcaaaggcaaggagaaaagaaaagagagagagagagggaagattaacgacgggacaaaccgcgggggcggcgcctctctctccgctccgctatggggtcaaacctcccctcccgctggccccgccgcacctccgcctccctataataccacctcctctccccactttcctccccccaaactccaacgcaccaccggcgccaaaccaaccacccaccatccaccggtcgaacacttggcgctctcgcccgccttagctcgctctgctcgtggtgctcgacccgaacaagaacggacatggctcccaggaacgccgccgaggccgtcgccgtcgccgtggcggagggcggaggagccggcatggagcccaggttccgcggcgtgaggaagcgcccgtggggcaggtacgcggcggagatccgcgacccggccaggaaggcgcgggtgtggctcggcaccttcgacaccgccgaggccgcggcgcgcgcctacgacagcgccgcgctccacttccgcgggcccaaggccaagaccaacttccccgtcgccttcgcgcacgcccaccaccacgccccgccgccgccgctgcccaaggcggcggcgctggccgtcgtcagcccgaccagcagcacggtcgagtcgtcctcccgggacacgcccgccgccgccccggtggcggccgcggccaaggcccaggtgcccgcctcgccttcgctcgatctgagcctcgggatgtcggccatggtggccgcccagccgttcctgttcctcgaccccagggtcgcggtgaccgtggccgtcgcggcaccggtgcctcgccggccggccgtcgtcagcgtcaagaaggaggtagctcgcctggacgagcagagcgacaccggctcgtcgtcatccgtggtggacgcctcgccggccgtcggcgtggggctcgacctgaacctgccgccgccgatcgaggaggcgtaggttgcagcgcccgatgacgacgacaagacccccccacaaatccctcgtagaaaagtctagagcgacgtgtaatagtaagaggttaatcgtccgtttaattgccaggattgatcaactaggtgtacatagatcgtgtcctttttgcacggggagataggtatgaggaaaaggctactactcccggtgttacagttcctttaaagaaagaaggaaaaaaacaagaaaagaaaaagaaaacattttgttgttcgatgtaacatattgatcatcaatctctgattaatgagaaatttacgttattttgttcttaaaaaccatttactgtggatgctttacccgtttattactagtatgtggcttcatccctgcaagttagcagcacaggcaactttgtttccagcacctaaccagatctgtgtcttgactcttgagggaaaaaggacttgagatttaccatcccagcttgtgcatcattaaacagaggaaaacaattaaaccggttttgtcgtctcctgtgcatcttaattgcacatcaaaacaggcagatgtatgtgcaaatcagctcaaacaatgactgctagtagtcttctcccaccgatctgaagtgtgtgttcgatgtacaagagcacgcgtcgttgaacggttcggcggatgaaattccgtggcaaaacaaagtacaagtgccccgctcctcctccccggcgaccgacagccacaccaccccgcggcccgcggaaggaaaggcttggagtacgacccggacggaggagacgcgcggaaaaccgcggcaccaacgaccatctacgacgacgtcgcttgccgcgggccccgtggagaacgagtccacccgtgcacaggcgtgcgcagcgggagcagagctcgtaggacgccgcgccgcaccgcgtcgcgtcgcccaggggagggggaggagtcgtcgtggtcacgctcacacagtcacacttgctcccacggcgcgacaaccacgtagccaaagccactggctatggcctccctgggcgcgcccccaccaccaccccacgcgcgtttgacgccttcctgtctcttcacctcgcttcggcccggggcaagctcgctaccgcagcgcaagctacgtacactcgcacgcacgcacacgcgcgacccgtgagccagtgagccaacgacccgcggatgcgtgggtccaccaccgcgcgggggccccacgacccaaccaaccgtgtggctcggatcgtgtttgtcatgtggtggccggcgtcgcggtcgcggggcggctagtcggctacagtaggcgtcctcgccttttgttccgcacaaggattggttggtttggttggttgtttggatcgatctgcgactgcgagtcgagccgcgagcgagctgctttgcttttggctcatcagcgccgatggttttcgcggttcgcgtaggtggtagcgttggaagctctcgcaagtttactatctcaactttgcgaaatttcggctgtgctctgtagttgttggcgcagtatctcaactagctagctggctggtatatttgccagagaattaagggacatgttggctgttagcctgtgagcttactacaagggtctataagttttgaggagttggataatctagagttttattccaactgaattacgagtatttgagtggttttctcaaggcatgattaaacggtctggcatctttttcgctctcctctccatctcatctaagcacatgttgtttgcgctaatgcttaattacatatctgaaggtgtgtttagttcatattaaaattagaaatttggttgaaattgaaacaatgtgacggaaaagttgtaggtttgtgtgtggaggaaagttttgatgtgataaaaaagttagaagtttgaagaaaaaatatataactaaactcagcctgaacttgattactagcttactgattactgattactgtatctacctacacacagtatgggtatatacatgggttgatatatacccatccatgtctctaacccagaaaaagaacagtaaccgtagaagggaggaaaaagaggaaaacaagagcaaagtctcgagtctccacgctccaccatcaaggcatcaactcatcaactccactggtatatcccgtagtaagagcaggtacagtagcattcataaacatattttaaagagataaataaaaaaaaagaagagcaacggttataacggttataaatctatagcacgaactctaatatgtaatgtgtgtatgacagataggaccaagtatcaatagtatagtaagcaaatattatatgaattgactatagatgatttcgaaatagtagtgcgctataccgttaaactggctctaagagtaataaattaagacgaagatgacagatcagaacctgcctttctgttccgacctcgagccggccagccacacaggacgcgtcacgtgtatgcacctgtactccaccacatccgagagggaggcagcgtcggcggcttcgaatctcaggcggcggccggcagatcagaataaaagtagccgcgcgcgcaccggatcacgacccaaaagccaccgaaaccggtggacctgctcgccgcgcgccgtgctccagcttcagacggcgtcacggcgcctaactagcgaggcattggctagcccagcccccacgctttccaccgggaaaaaaaaaagaggaatcccgtgtggtcgtgtcccctcggccagccaccagcgtacgtacgtactccaccactcccccgcgcgcgccgccgcctacgaaacgatgcacgcaacccaccacaccacacgtccacaccgcaatgcgcagctagcgggcggcaggtcaacattgtacgcatcgccaggtatgcgtgtgtccaccggtagtactagtagtgcagctaccgtgctcgaggagtaactaacagaatcaccgaacgatctctttcgtgcgccggaacgacacgtgcgtgcgtccggactagctgtgctcgatcgatcgatcgtcgtcgtggccccagcgaacccacgcgaaacctgtcacggcgccgcgtccgtggagattatttcctcgtccgcgtcgctgctgctgctgctgctgctgcatgcggctcgtccggtgctttgagccgtggaggtgcacgaactgccgcgccgatcgatcgagctcccgcctcccgcggcacgttgcggcgcacgcgcgcggcggaactagccatgatgaaccgctccgcgcggtctacgaccccacgaatcctcccacccaccgggttaaacaccgtaccgcgcgccgcgggtggccgttgttcgcgccgtcccacccactctcgatcacgcgagtgcgtgcggaaaacgcgcgcaggcctccacgcgtcgcccctcacccacgaaccacccgcacgaggcacgacgtgccgacgtgttggcacgcactggtggtggtggaggcgtggagctagcgagctggacggaacgaggagggcgtgccgaacagcgcggagcaaggagacggtcgatcggtacggcccattggtgcgaatcaacagcacacacagcccaaacagctagtacccttgccagcggccaaattttaaaatttgaacttaattttaatttattgttaaggtttttcatggtattttatttttaagaattagattttaaatcaaaggtgcaattgcaaaattttatccataaaattatattaggttctttcgtttatatttttttataacaatttattggttgtagctcaatcggtcacataacaagtacttcttcgtaccaaaatataacaatctaggatctgattgaacatattaggtggtgtttggatctcctaaagatgaagataaagattaagtgtttcacgcaaaacgagatggtaataacgtgtgattaattgagttttaattattacaaacttggaaaatagattaatctgatattttagagcaactttcatatagaatctttttgagagaatcccttatatgccactgaaaattggtttgatcccttatataccactgaaaattggctctttccttatatgccattgatccaaatttgcgcaccctctcatgccactcccatcagttgaccgtatgttgaccgttaattttaaaggaaaaaagacatatttacccttctgagtatagggcatgcctaacaactcagacatgcaaatatgtcttttttacttgagagttaacggtcaacacacggttaactgacggtagtggcatgagaaggtacgcaaatttggaccaatggcatataagggaaaaaccaatttttagtggcatataagggatccgacgaattttcagtggcacataagggattatctcaatttttttttgtaacataccgtttagcagtttgaaaaacgtgtcacaagtatacaaaatttcatccaactcttgttggagaaacgaacgcagccttagtatgaatatggtgaatagtggatatatcccgcctatatttacagtagtaggatagtatattttgggatgggggattactatggtagagtattttctttcgctatcgagaattaccgttgcagacatgcagtgatgcagtttcaagaacaatatgagtacagctaatgacgaggctcctaccttggtaagcatttcgtcagcatcgctaatccagtctcgctcggtaatcggtgtcgtatatgctcgagctgagcggccaagctgcccccgtccatcaccccaattcccacatgtcgcattcgatcacttcctgctccccaccgataggaacggttctgaagtctgaacgtgaatggttaggcgccggcggcagtcaggatcaggggtagtattgtgtcaattaatcgacagaaaccaaacccagctgtgtcagatcagaagaaacatcaggatgtcgtgcacttactatagaacatgtgaatactcttaacccaaattgtgacaccaacaaccgtcagattaactggaatgaatcggatcgaaaggtattacgagtaaaccgatatttgcataaacgcactgatcttttttccccctatctgaagacgcccagcagctctattttctttccctgccgacaattatccttgcagtttcatgtactcctactactccctccgtattttaatgtatgatgacgttaactttttaacaaacggttgacatttcgtcttattcaaaaaaatttatgtaattataatttattttattgtgactttatttatcatcaaatgttctttaagcatgacataagtatttttatatttgcatacaaattttgaataagacaagtggtcaaacgttggttaaaaagtcaacggcataatacattaaaatcaaaattaaaatacagagggagtactttatacagcaaaacaatcgaccatcctttccaccatactcgtcctacaaacacagagatcactgctactccagtggctaatgctgggcaccgatcttactagcatttcgtgaggatttctgctcctgtcttggtaatcagtatcgtgtgctcgaactgcgcggctaggctgccgtccgtcgtgacggccgtccagccgtcgtcccacatgtcgcaatcaatgcttcccatggatagggccggttctggacgaaaagagtaagagccactggcagtcaggatcagaggcattgttttgggagtaaaaccgaacccggttgtgtcagattagaagaaccatcagggtgttgcgtacctattgtgaatgtctggccttcaaccatttgacctggcatattattacctgtctcagagaaaaaaagccgtcagatctaacaattcttggagttatttgtatgcaatgagaagagaagatgcattggtaacattggcatgcagaaatgcactagctcttgattggtaacaatcacttacgctggtgatatatcattggttctgaatgaaatattctcccaactccatgcccaacaaaacgatccacaacaccaaatccgtgcctctcagcatgctcgctgacatgttaaaagcaaactaatgagcaagaaccatttgagatgtatttgaaatcaatcaaagtttgacaaagttgcagtaagagttcctggttatataccgttacagttgacttagtcaattgcatatttattcattaactaaaacacaaccgatgggtaaccaataacaggctgagaatgtttggtagttgaatgcattataatacaagttcttacgaagacataataacctatggattctgaagatagaggcaatgatgattctgtttgtacttgacaaaaacacttcttcaatttttgggttcaaatacctgagagagataccatttggtgcaacttaactagtaaatacagtataaggttgaaaagttctgcaaagaaaaacagaagtctagaatagcacatatggtaaaagtccattctccattggattatggatgcaactatccttgccctgctggccatgacacaaatatggtatgagatttttataccttattcttctgccaattttcttcaagctggtaccatgtttgcaagctgatatagccctgagcatgcactcttcagtaacctgacattaccgtcattagggtccccgattcaaattagtagacagatggttttgaaggaaaagttgccatcaaaagtagatattagctctggttatatgatcaaatgcaaactgagacgtaagcaaaatctcacaaggtaaggaaaaatgaacacaaatgacttctcactttggtgaggcctactataatcatgacttctaataacatgaactacatgtttgcaaagacaaagatatataccttcacaagtcgtttactggcttcatccacttctccacataggaaagtctttgaggtgtccccatgatagccctgaaatggaaagatatattacttcagatgatgatacgaatgaaggcgtgaaaacacatcaatggtatgaagtaacaactaataaaaaagagagtagacatacattcaggtagacagtgacgtcgatattaattatgtctccatcctgcaaaacagaaaaaaagaaatgataatgacatcgtcagtggagcaaggggggtgataagcctgaacatgagggaaaaaaatgactatgtaggcttctcccagaacctgaagttcacgagaatcaggaattccatggcagatgcattcattcacagatgtgcacacgctttttggaaaccctccgtatccgagaggggatggataggctccagcatcaatgatcatcttgtgcactgctttatcaatttcgtctgttgttacagagggctgataaaaggatgcaataaatttcttactgaagctataatttatcatggaataattagcttcaagagaaacataaattgtcgaaatgctgaaatgcaagcttactttcactaaagttccagcgtattcaagaacacgagcagcaagctcacatgcagctttcatgtgaataatgctcactttgtcatgcatttgtatctcacttgctatctctgaagcatcctttttaccaacgtaaggaggttgagttatgtgacctggtactggtagaggtggactcactgtcccacggatcagtggtgctcttttcttcacttgttccaaactttgctttcctcgtgacctttgagtttttgcaagtgttagaactgtatgaagaagatcatgaaggtgcagtggcactaatatgttctaggttatcagccactgaaccacatttcttatagaaggtaaagactcgacttatataggtggattttataccttgggtttgccttctccaatccctctaatctctttgcttggacaaggaaaggcttttgaaggcagctttttccttaaaaattagaagacatcaaacataactttgtttgtcgtttcccaaaaaacaaactttgtttgagtaatagaaagaaataatgtattactgaacatacttccataatatcgttgcagatgcagatatgcaaatgctacctataagaagaatcattgattttgagttacgagatgttctttctgtcacttaactgcattattagtttgatcatattattgattatgcacactgaaccactcagtctcctatacccattccattagcactaccaattgctcatagcattgttcagagttcagactctagtaacggaaaacataactttctttatctactcctcggattattcctgattcgtagcatcgtttctgcctttcagcagtaagagagagagagagaaaaaaaaaccttctccatccttcacagcattgttccagcaacactagtgactgattaaagcccctgactaaaccaaaatctagcacttagaatatcctgatattaaacccaaagttgtcagtttgtcacctcgcacagcgagacgctcgccgcaacaacagcagcctaaaatcacacgcggctgagcgagataaagtttatagaagtttcatgaaccccccacccatccagccaaccttcggcgatgccaaaatccgacgatatcgccatcatattgggagtgatgaatcatgaatagatacctcggacaccggatacggacggcggggggcggtgcagctccatggaagggactctcaccgccatcggagcgccactttggtggccggagcagccgcgcggcgcgaggagtgagagggccagaggttgaagaggataacacgggaaggctgcagatttttttcccccttcccttttcgccttctcgtttcggagaactttaatcatttgggccgtatcatgtttcccacgcacgtgaggcccatagtgtgcgagatggaacgggcttgcgacgtacgggtggcccattgtacatgggctgcagcccatataggttggcccactatatagtttccatggagtttgccccagaatctaccgcgctggtcagtggtcagggtcgccgtcgccgacgtgaggccggccacggccagcttcacggccacgacgctgagcgtggcgcccaggggcggatccagcataggctggcgggatctcaagcctctactactaacatgaacgtgaaaactatgagagccccacgaaaattgcactgaattttttaccttatatagatgagagggggactgtaactctatataatttgctcagacacctattcctttctatatccgtgatcgtctccgacaacgattgcaggcggtcgccctcgaacatgcgttccatcgtctggcacgcctcctagctcgttctcctcctccgtcgttctcaggtcggcggcggccggcggcggcattgttagcttcgccggaacgtctcttagctctccttttaaatttcccgcgctttctgttggtagcttcggtttgcttgcgttgagttgggtgcgtagtgtgaggcgcggggcgggagggattttatacgaggcgtggggatgcgaattggtttggttgctgcgtcatgttgtgacagtttggtagttgattaacgaactgttgctaacgatgttcctataaaaagtggggaaatgaactgtggctaaagatagctattgctgtcgtaccctgattatgtattttgatttgtttgttctcccagcgagagaacttccggtggctacttaaccttgacatgctatcatagtttcattttgtactggatcatgtctttaaggggatagtgtatatgctgttagtataaataagtgtgctttaagattttaccatgtataatttaaagaccaagcattcaacgggttaaatagaataccatcgtacaagtgactttgtcctataaatacattaaaatgtgttgttcatcccgtagcactaatagggggctgttaaaggaaccctaagcaatgacatttcttaggccctctttgtttaggcttaggcttattggactagacttttaagttagcttattgacttatatgatttataagccggtggatttaatgtcctaagtttagtggttgagtcatacatctacctcacataagccaaaaaagcttctccaacctagcttttggcttaatagtgttagagtgacttatggctttaaaaaagccaaacggaaaagctacttatttgtttaggcttagacttttcgacttataagttagcttataagcctaaacaaagagggccttagtcagggccacttgtacgatgatatttcataaaagttgcacttatcaatggcattttatggaattaagcgcttgttaattatatttcttgaattttataaaatatagtatagatataagaaaaaaaactattatgatccctcgatgggatatcctgtcatgtattacatgttattcaaataatcacgaatctttttttaaaaaatataaaaaatatttaacaagacaaaataatgtatgagatatcacttcacaaattttaagacgaagttgatagcgcaaaataggattagaccaaattaggcctataaaattcattccctagtccctataacttcctactcctatcttattatatctcttggatatagttggccaaataggctgcccagcatggcactggtcgtgcctgggccatggttagtcgggctggcacagcccgaccgacacgcaaggccgtgctgtgtcagcccacgtgcttcgtccaggtcaaaatagcgtaccttggatcgggccgcgggcctcgggtctcgggcctcggcccatataaccatctatactcctggaggaaaaaaaaataacaggcacgtcagcaggatgagttgagttcgtccagaacgttcaagccgatcacaccgatcacagcgcgagctcgatccaacggcctctgtctcgacagcaaggcagcgcacacaccatcgctccacgcgtcacctccttccacctcccgccgcgacgtgtcttcggacgtgtcgccccgctcgccttcctcgcccaccgcccgcctcctcctttacaaaaacccccgcctcccacacgcacgacacgacgcttgcacttacagctgcagctagctttgcccagttttgcttagcttttctctgcttccttcgatcccatccatgtccaggttgatggccgccatgctgctcggtggcgcccgcgtcgccggtaacaccaccaccgccgtgatggcgcttcatcatccgaggccgtcgtacttcctccctccccggccgcggctggcggcggcgagctggagccgcctccgcctgcagaccgcgccgagatcatcccaggtgcgtaccgttcgtccgtcgtcgatcgccgtcgccggtgagtgatgggtgttgttgggttggctggctgacatcaatggccgtcgtttttgttcggggtaggcgtacgacaactcgccggcggacgaccgaagggacgtcggggacaggtacagggacgccgcggaggaggcgaaggaggccaccggcgacgccaaggagcgggtgaaagggatggccggggaggccaagggcagggcggcggacattgccggcagggccaaggacgagaccaaggacacggcgtcgcgcgcggccgacgcggcgtcgcgggcgacggaccgggcgaagcacgaggccgccgacaaggcggcggacgtgaaggaccgcgccaaggacgcggcggacatggcgcagggcacggcgagggcggtgagggacaagacggcggagacggcggagggcgccatggacagggccggcgaggccaaggacaggacagtggaagggacgaagcacgccggcgagaaggtggcggagatgaccaaggaaggggcgagcaaggtggtggagacggcgcaggccatcggcgagaaggcgaagcaggcggcgcagggcgcgtggggcgccaccaaggaggcggcgcagggcgtcaaggacacggtcgccggcggcgacgt

SEQ ID NO: 15029 - DNA, 20568 bp, Oryza sativa
agttattgagactggaccggtaattgaaccggtgaggctcttggttcgatggttcactggttcaaccggttgaaccattggtctaacccggttcaatagttattaaatatattactcattcctttcaaacacaacaaggatgatagcctggtggttggtgagggctctttttccctcattttcccccgactgctcccttgcatgcacccactccctcgcaaggccggttcaaccatggttttttctccggttctatagcggtttttcatgaaaaccggacagcctaaccggtttataccggcttgattgcatatccggtcttttaactggaccgaaccggcagaggctccagttctggtttttcccggtccgaccgccggtccggtccggtcttaataactatggctaaaactatcaactggaacaagctgtgcatggaaacaagttcacagaccatcttttgtgacccattgctaagctaaagcaataagcatcaccaagagatcaaattattatgcataatgtgtgctagaaaacaaaatcagtgattggagtaaaagatggacctgcctccttccgtagttgtctgaaactacaccccaagtgtaagctcctattagcattccaacaaaaacaatgcttgtaatcatgctttcctgatgtgaagtaagcttccattctaactgtactgatggaccaacaaatgatagtagcatcatctccattgcttctgcaatcaagccgaccccggcatatgaaagaatcaatatttggtacctcccaaaacctgatgacagaagcgcgtcatcgacgctatacgtggctgattgatcctcctccatctgcaaggcaatgataaaatatggttattctttcagcagccagctgattaatcttcctgacagttcttgtatctaaactgcagaagcccaaggctgaaaacaggaactcgaatcctacatttttcctgtaattctgcctgttcagtatccgcacaccatttttcttttgctttgtaaatctagtaagagtatatgttcacggttaatcatccatggaggacagataaaactgaaaaagaggaaaaatctcccttatctcactctgcaaaacaggtcttaatcacatacgtactgttacatacacacacatataactaaagagtaatgaaggattcataagttccatagcagtggcggcggatctaacatgggccaaacctttttgggaaccatcaaactgttattggtattaaggttaaggcaaatttctagaacagaagctagggttagcgcaaattcgagaaaaaagtgcgtgggtagagagcgcgatggatggggatcggcgcaggcggcggtggcggaggatgtgctcaccaggatgcggcggaagcaacgacggcggcgctcgcgggatggatgggggatcggcggaggcggaggcggaggcggaggcggatgattcgccgatgctgtccagatcccgactaatcaaagcggtggatggagagaacgagcgatgaaatggaggagaagaagccaaagtcaaagccaaaagccaaaagtcaaagtgtgtctcgaattcatggatgcggaaaaattagctctaaatcctcccagattccagagataagcgcgtggtttgaggattttgccagccttgaattgaaagcgcagttttagacaatttctttcagctcctttttgaccggagctttgtgttcatgtgccatgtgcaaacccatgtggagaatcccttggaaaaggtaggtggtatatccatgtcaaaaatgttgcgggctctgtgtgcttgggcttatgtgagcccaaatagaggcctttaggggatatcggaataagtccactttgactcccttaaatgtgaccccaatctaatatatgtgaccttaaccgcaaaaccaaatattatggcccctcagctgttaaaaccggtgtaatttaactctctcagcggtttttttacgacacgccaccatcgtctcatcaaacctccgcgatgacgacgagaacaggggcgatggtctccaccagctggctcccgccgcggaggcaccacgctactcgacgtcatacagcgtcggcgaggtggttgtcgcgaaggaaaggagtgccgcccacggtggtgttggtggcgtcatgacgtagcgccgtggtggtcgaagacacgaaacggaggtaggaactaggaagcgccgctcgcggcggagtaggcaaggtggccaccgtccctggcgccgtgaggtgtggccgcggcgacgccatcgttgccaatcgcatacccctcgggttagacagcgtgggaaaaaaaaaagaagaataaagaaagggaggagacagaaaaaaatgtgatgctgacatgtgggtcccacatgctaagtcagctagttgaaccgggtcaagacgccatatcagcaaaaccgctgagggagtcaaattacaccggttttaacaatttatgggtcaagatatttggttttgcggttcagtgtcacggattaaattcgggttacttttaagaaagttaaagtgggcttatttcggggatatctcgcattatattccggactaagttttaaggcccaatagaacaagacgcttcttttgatctaattttttcgtttattcatgctcattcgaatcgttactagcaaataaagaatcgtttaagggtaaaaattttatatagttgtcctcagagactcaaagtaatagttgtaaaataaactataatgaaaaagccaaaaaaacaaattcaaaatcaaattctaaaatttaaattttggattataagcataagctaaccagtgtaaaacaaatagtgtaaaaaaaatcaaacttcgtgcttgtgaagtatcttcagaaaaaaaacagtgtaagaaaaggaaaacaaacagtgtaaaaatgaaacaagcactttggtacacaaaggtgcttatgagataatattacagtgatggtattggcatatacacgagctgattttgcgccaaatacatcagcagatggtactattagacagaacaatttcccctgcttcaatagatgtgcactatccatgtctgtacctagtgctgctaattaaccaacaggcgacatgtgtaattaacgaaatgatcggaacgacatacgtactagtatatgcatactcgatcgaccaaactcccaaacaataaacgtcatgtagattaagtacacgataagttgtagtttaacgaagtgcacctactcaatcgatctgtactgcttaattggttacgacttgcaagcaagcctaactctctctggaggcaattaacctactatctagaccacaaaaagtattgcacatataattcactacctaacaatgtccgaccgtaccgatctggtaatgcatttgcttgcatcagagcatcatcgacacacctgcatctgcatgcccttctttcctacctagcttgataagcatatacacatctggctaatgcatgtaaggaagtgatggcatgtgtgtcagtgagcaattatattaattagcatgttatgatctgctctgaccaacttcaggtttaaaaacattgcgttggcattgagcccttttcttggtgatcttccaactgaacccaatatatttgcctgttacatcttactactaggctttgattgacaagaaaggaaggggttcaagtgatgatgcattaccttgtatataccttcttgttgcaactagagagattataatctcagattaattaatattagcccactccttaactagttgagtgtggttgcttgttacttcggcactggctttctggtctctttgctctgaccacattccttcttcaccttctgttgaaaagagcctgacttcctgccttcccggtcaccaaattatcttgttttttcatgtgcgacgttttcatcagtgcatgcaagatgtaacctgtttaggtggtgattagctcaagcatcgtgtcactgtggttggtaggatgtccatgaacagtggactgaaagatcagccatgcatgcagcattgatcagaagttcataaccactttactgagacacatcaagccctaaaccttagaaggattaatcgaacaagacctaggaaatattcctgacctctgcataactaatatgcatcatcagtgaaacagaggaaactatgattctctgctacatctattcagcagcttcagtattcaccagcaggtttgaccgaggtcaactgagacaaaaaagctgcagtgcctgaacttgatggatggcgccggcgcatcaaaggtgtctgcgaatgtgtaatcttcctgtaatttgctccctagatgatccacaagatcacaagtaaaagcagtatagttatcgaggccgacttcatcaggatgcttaattagctcgtggaatgatcgtcgccgttgccgtttttcttccaaacctgatcgacggcagtttgtcgcctgtgcaactcgtgcagtttgtcaacaagattcttcagatagctagcttaggcaatggtgcgactaagctagcatttcttcagattcttcagtttgtcaagtaattacttcttgcttggttgactgatgaagtgatatgattgtaagtttgtaacactcccaattgagcaatgataatgacggagttaatccttttcaggaaggcttgacaaatgcttttgttgctttttcgaattgataataatgatgatgagtaaggatggtgttaagctacgtttaaaggcttggaaggtgttgggcgagaaacggctgactacagacatgcttggacatgcatgtgaggacatgtttgttggtgaatggtcatacacacttgcattacaggttcaaacggaattaattaggcttgaaaacgcagaagcttatacttctgcaaaattgcttggctacaccctacgtccacaaatataacaacatcaacacggtcttcaaattataacttaaacaaatattatttgtaaacaccaattattttacatagaaagggttacatataagatatactgttccacgataaatctagtaacactattccttaatttttgttattgacaatcaattttaaagaaaagggtatatttgtgaacagaaaaatgtagtttcttattgaaaatattgtggcgcgcttatatatgtactccgtacccagatatcccagttaaatggatatatatatatatatatatatatatatatatatatatatatatatatatatatatatatatttacgaacgcgtaaaaaaattgcacgtcaatatattagaagaaaagagttatagttacaccacgcaatcggccagactggccaatgccaggggaaaggagaaaaaagcaaaataaaataaaaaactgaggcttagaaaaagaaaactacgacggctgaaaaaaaaaactccgcaactgtaggaaggggctgagcggcgtgcacgcggctaattaacgtgctgcgatctcttaatatatgcagtacaattttgacggtcagtaaaactggcaaccaaagtcggtcttcaaagaaaaactaaccaaagggtctttcaaaaactagcaactaagctagtccatacgctgcatttttccagataccttccagggctctccactcatctggaccagaccacaaatctcaccatcatctgttactctccgtgactccgtgtagggtatagctaatgtttttttttcctaccaacttacaattctaaactaaatgaattgtctgtttgtgcatgaaattaataatgacgtgcaaacatcgactaaattttttccggcgttgaactgattcatattactattacattgttaatcacattgtgcaaattgaaaatgactagaacagtataaaaaaatagtgtgaatggcattgatttctgggaaactattttgatccctcgaggtaatatctcctcgttatttgcatgtcaatcaaacggttatgaaaaaaattttaaaaaaagagaatatgtattaacatggtgatattacactacacaaatatgtaagtttaaattcaacttctacatttcgtaacgaaaaaaaaacaaattaaaccacagctagttaatgtatattcacagtcaacttaatttaaacttgtatgtttacaggggcgatatatgatatgttaatatatcttcttattttttttcaaattttttcataactatttaagtggcataaaaacaacgaggagatatcccctcgagagatcaaagtctacttccttgatttccggcatctcctttataaatagaacatccatccatgattcacactcaaaccgatcaccaaacatttctcgacacactcgcgcgcgcaggtacacaaacatggtgcacgaggctatcaatggacatggccacgaggtgaccgtgaaggtgacgtcggcgtcgacggtggcgccggcgctgccggtgcaggagcaccggctgccgctgtccaacctcgacctcatcctgccgcccatggacgtcggcgtcttcttctgctacggcgccggcgagggctccggcggcggcggcgcgctgctgccggcggcgaccctcaaggccgcgctggcgaaggtgctggtggcgtactaccctctcgccggcgaggtcgtggccaatacccgcggcgagggggagctcctgtgcagcggccgcggcgtcgacttcgccgaggcgaccgccggcgacgccgtgctgcgtcagctccggcttgccgtggtcgacgagagcgccgagaagctcgtgcccaagaagaaggctggcgtcatgtgcgtgcaggttagcgtcacgtttttttttggattttgctattttcgttacgacagaattttgtactcctatttttttaaaactttttttagaattttgtactcctattttttttaaacttttttttagaatttttcatcaatattcgtattcttgtgtgtacaacttatagttaaaaaaatagtttctcaacaattgtttttctaaatgtatgatttttatatgtttattgttttattttgttattttatttaaaacaggttttttttaagataatggaataaaaacatcccggcctttgttcaaaagagctacagccaattattacagtctagcactctcgaggagtaaagtccaaaataaagcaatcacactaaataaaagaaggaaaggcaaacaaggcaaggagaacattattccagtctatcggtgaatctccatccatagttggcaaagagttgcataaccatcgtctcaagcgtacggcatgcaaccaacggcctcatcacacttttgtagctgagcccttagccagagttagtatgttgccctgaaaattatctgcatataggaaacatatagtgatttgtcaaaaaccctatcattcctgctcaaccacagaacccaacataaggcagaggctcgaatcagtatcagtctactctttttcttatcaacccccagaagccaatcataaaaaatattatatatgttactgggaaggcataatccaaaagaaaactgaattgctctccaaataaactttgcataatgacattctataaataaatattcaatggtttcattttttttatacagaaacaataattcaagttgtcattctaatttcatcttgctaaaatctaccatattcgaagccataaatccactgaaagataaatacgtagtctttcttttaagcgaagaggcgaagcaaaatgttttcgtcgctcgtacagttgcagcaactgcacacgtggctgcaaaagtgcaagattaaccaatacaaaatctgtcagcagatggatagctattccgttttttgattgatcgtatcggatccgcacgtgagctgcaggtgaccaagttcaagtgcggcggcgccgtcgtgggctgcaccttcgaccaccgcgtctgcgacgcctactccttcaacatgttcctcgtcgcctgggccgccgccgcacggggcagctccgccgcgccggcgccgtccttcgaccggtctttcctcgcgccgaccagcccggctccgccgtgccccgacgcgctctcggacaggctctttgtccccgtcagctgcgtgccggcgccgccgtcttccgccccggaggccgccgccgccgccgtcaaccgcatcttccgcgtggccgccgccgacgtcgcggcgctgcaggccgcggcggggccagggcgcaccaagctggaggcgttcaccgcccacctctggcagctccacgccagggcggcggcgtccccgccgcgccaccgccgttcgtgctgcatgggcgtcgtcgtggacgggcgcacgcgcaaaaaacacgacggcgccatgggggcttacttcggcaacgtgctgaccatccctacggcgccatgagctccggcgacctgtccgccatgcccctcgcggacgtcgcgggcgacgtgcaccggtgggtggcggaggcggcgacgcgcgaccacttccggggcctcgtcgactgggtcgagcagctgcggccggagccgtcggtggcgagggcctacctgggcggcgacggcggcgcggaggcggcggcgtgcgtggtgtcgtcggggatgaggatgccggtcggcgaggtggacttcgggcgggggcggccggcgttcgcgtcttaccacttcccgtggccgggcggcgccgggtacgtgatgccgatgccgagcgcgcgcggcgacggcgactgggtggtgtacgtgcacgcggcggcggaggtggtgaaggcgatggaggaggaggagaccaccgtgttcagggccctcgagtcggactacgtgttcggtccggtgcagcagtaaacacatgcaaaaacacaataatacacacggtaaaagttgtgcccgggatggcaccatcgtggcatcacaaacatctgcgtgcgtgcacatgtgtcgtagtaactgtaagctgtaagcatttatataccgttttgtactcctcgtaccgtggtacgtatggtatgttgtaaattgtaagtttgtaacggtcttgttgcattgcttgtacaaaatggaaggaaattgttatgcttactatccaactgttcgacttacgtacgactgaattcaaccaacgattaatataaaatgctccattttaaccgatttatggttgtatgtctctggttaacaagaccatgggccgacctgagccatgtctgctgctgggccatgtctattggcgaacatgtcgggccgacacgggaaactattctaattcctcgaggagatgtttcctcgtttgcttaaaaaccatctaaacagttataaaaaattctggaaaaaattgacaacattcatacaacacatatatacaactccacaaaatcttaagtccaaactcaactcacacgtcgagatataaaaaagacaaattcagcgtatgaatagtagcgtactgtttatatctaaatttgtcttttttttcttgatgcgtagatcgaatttgaacttgaattttagtggactagtatgtatcattatactctacattgtcaaattttttcagaattttttacaactatttgcatcgaatttgaaagaaaaagatatacgaggggatatcccctcgagggattagaatccactcccgggccgacacctaatctgggctcaaagttcacgcatggtccagtacgttgccctgccccaaacccgcgcgccggcgacttgacactgcgccgcgcgtctaattattcttggatggattcctctcgttttctcgttgcataaacatgcacggagatgggacaaatcaagaatcaacctaaggcagggagtactcacgcctgaaatttgcaagcaagcaaaattttaaaatcaaggtttgctggagctgagacctgagcatcgtgcacttggcttgtccacacacaccgacgtcgtactgaactattagttgataatagtgcatcgcgcattaatgttcacgcaacaaaggggtgcccaaagctgcgaagcgagcgcaactcaagatttcttgtgatgaaacccattcactcgggttcaagttaattatagattttaataggggtgttcgtatttatgactaattattatttcagtggtaaacgacgtactcgttgacagcgagatacccatagtgacttcattaatctcaatatatactggactagtctttcgaaagtgttcataagaataaagtgtacgtgtatatatttataggggtggatacagggccgtcttcagaaatttggggccctggaacgaaatgccaatcgaggccctaaatttaagaaaaattcatatatctaatctaatatatgagggatgattttagctttagtatgtattatttcgtgcaatatttacaaatatcatcatctgtatagtgttttttaaataaaatcttcaattgttcgtaattaatattattgaagacatcattttcagcacctaaatcatgatgaggtgattgacgaaacaaatctattctatttttaaacaaaagcaaagacatgtgtttgattcaataagtaatccattcaatcgttcgtttactcacaataatgtaagggactgtctatatatcatttgacagaatactccttaaaaatcttgtaaattttgaaccaccctattgctttaagatttgtacaggcaatcaaaccctaaaaaaactctcctttcccgattccccctcacgccgccccgctcctcagcgtgagcacattctgcgccgccgcccggcctcgtcggctggccggaaggtgtcaacggcgctggaaagggcccccggccggcctcctccccctcatcctctctctcccacctcacctccctactcgagctatcgaaagtgagatgctcccaacccggcgtcttcctcgtctccggcgactcctcgccaccggatctaccaccataagctcgctatgcccccgccaccaacaccggcccaccaccctactccgtcctcgcggctccgccggcgcctcgccacccgcccactccgacgcctaccgccaggccgctacttcccacgaccatccctcttagcccagcaaactcccccttcttccccctccccctcccacccctccctaccccgggaccctaattcatcagccctctgccagagtttgggttgtcgccggtgccggagaagaagaggagttcgccggagttagagaaagtagttggagcacgaatttataaattacctaatgaagtgattagtgaaactagcaggcggcagtcgctagacgttgctttaggctcggcctccacgctcgcctccagttgtccgcctcgccgttggttgctgcgatacgtgctaccgccgcccgcccgctcgatcgcaggctgccttcgccgtcttgacgcacgcacgtgcaatatgtgggaattatatgatgaaaccgctccttcgtttatgactcgtgacacctcgatgcacacaactaacgcatgcgatcttcaatcgcttgatgctcacgacgcatcagttttgcttctacccaactctccccgtcccataaaaaccaatctattactggaggtaacacattctagtattatgaagctctcattagcatatcgccaggtatgtggcccaccctaggtggtggcgtgggccccccaaaaattggaggccctgtgcggtcgacgggttcgctctcccccatcgatggcactgtgtggatacgggtgtgttgtgagcgtatattttgtaccgtgtgtttctttaaaaaaaaattgtcctaagctaaaaattaagggccatgtgcggtcgacgggttcgctctcccccatcgatggccctgcatggatacagatatgttgtgagcgtctattttgtaccatgtgtttcttaaaaaaaaaattgtcctaagctacgagctatagctagtgacaactgaccagcatggcctgttcgtcgaagccggccgtacgtgttttgcgtgctatggactatggtagcctgttgcgcttgcgcgcgcacctaacgttttgtgcgcgtgtgcatgcgtgcgacggtggtgtctgtgtgcacgcgcgcgcgtgctttgtgcgacgtttcgaagggacgtgacaatgagaggaggaagagtacagtggacatgcgtacgtacaaactgatgatcgatgcacacagatcagattttacatgcagccaacgggtgcttgtcagtttattacgatggtggagatattaatagggatgaaacgtactactccatcctataaaaaagcaaatcctatctacgaagaggaactgaagtagttgactgtccgtgctgactgacggagaggttaacaccaagtgaagcaaaagggtcgacctaactaccactctatatatagcctggaccggaactggccagaattcgtgagagatcaatcgatgtcatgcgtgttaacttggcttcaaccatgcatttttgccggatcggtgaatgtaacaccactcgatctcgctctcttggcaaaatggcaaccgaaatcgaccaacctggcttcccccttaatttgatcccaaaaatatagggaaaggtcattaccacgaatattatatatgatccatccatctcgttagttcgctggttgccgtcaatgcgagcgtacgtacgtctcatgcacgcgctgtagatagagaacgacgtacctctcctctcagcagtgtacgtacagcaccggagtcgctttcatcgataaccattttcacatgactcgatctgtacaaaataaaaaaaaagtcgggaattaccgtaactattttgctgatcacggtttatcctttcgggggggggggggggggggggtgagacggacgatgattacaaagctgggatatatattcgctgtacctcatctgactatcacatcgcagctgcaaaagaagaggcactatatatcgtgggtgtgacaagggaaggtgtagccgagaagtcaattcgaccgatcgagccatgtctcgagtggttggccggctcatggggtctcgattaagattttcaggatctgaattatctgtagttggaaaactaaacgacaatatagtctactccctccatcccaatatattttacagcctacccattctatgactacgaatctgggagtagctagctagctctgttcttttttcttcgtaggttgactcttcgccgtggtcgccattggtcagcatgtcagcataacatcccgtagtaccacttggcacaccgatacgtcatcctattgtagaggtatgtttttttttaaaatttgttcaatttcatataggctgcaggtaggtgactaatacgataaagtaaaagaataacagtcgcctgatgaataaaaaatgtttatcattaatcaaaagctataattttttaaagaaatttattctatttttctatatctatactatgtaaaatgttagtagtggtggtgtccattcccacaccacccctacaactgacatgtgagccccacaatctatattattacatagtcttttaaagagttatctctcatttcactattgattttcctcaaattttaaaatcatttggttgttcaataaggaaaataatattattacttggactaaataagctaattgattttttttttacgaaaaaccagcaggagaggctcctactgaaatgcattgccaatagaagatatttacaatcccaaaaagtttctgagagggagaagaagaaaaaaagaaaatagaacttaaaagaacaattaattgatttagcctagttaattgatttaccttattgattgatttagtaaggtagaaactcaatttgttttccgttgcaacgcacgggctttagcctagtatgatttaaatttcattgtgacatatcagaatttgatcttgtctaaatagctcgagatgcagagaagcagctggtgattagccaccaggtagaacattgggtttctcatattatggcttgtattattattattattattattattattattattattattattattattattattattattattattattattattattatgtaactatggaatgtcagaatttagatgataatctgaactagttaggagtgttggagattctataaaaaggaagatagaagctctcctaaatagggtattcaactggtacatcgttgaaaaaagtaagctatatattgtaactggacattggcttattttttctctctctctctctctctctcatgtttatgataatttgtaaatagttactactccagtctacaatatgaaagcaaggatcatctaaagcatctcgcaatacttgtacatccagatataagaactaattaagcacaactgcgacgcaggaaacatcataaaactaactttagtaacgctacccttgacccaatttcaaacaagtttcaacagaagcagagatatgaagcttcaagagttgaaatataggtcaggtgaccatgacttctatgattctcttccaagctctttcactgtgaacctgaacagagatttgttggcaggaaagctagagaaactgcaggaaatggaaaaccatcttatagaagtaatatttatctacctaatatctatgcagtgtttctaaaaaaaaaatctatgcagtgtttacagcgtcacttatcttaattctccccaactaaaagagattccatctatcctactcatgatataaggcattgtcttcaaaactaatttttgagttataatctttcatacactataatatctgtagcaaggaaactagctataatcatatgaaagtaaacttaaaatgtaaatccagcaaattaaattcaattcatattataagtcaaatgttttaaaattaaatctaaaacatgtgcgcttatattatgggataaagggagcagcatatattattcttaagtcctacgagtattccttttttcttcaaagagcatatacaatcatcagtgttttctcatctgaaacgaaagggggctacaaccaaaccacacgtattgagtattgacactatagttgtacaccaaccctgtattccaaaaatataggtaatctttagggggggtccagctttaaaaaaatggctaggtaagtgaattgcgcaaaagtaatttaactgattttttaacctgacaaggaactaataatgaaatgatcaactgactaaagcatcagattagtaagtgtactattaacagtttttttaagctggattgcattctaagttggtcactagtttacctaacaccctgcctttaaataccacacccatccagtgtctgaatctgcaggcctaattaattaagctgagctccactgtctccactctccggtacactacacacgtaggtatataccatccaacatggtgaaggaagagcaaggtggcgaggtggccatggccgccgccgccgccgtcacgacgacggtggcgccggcgctgccgacgcaggagcaccggctgccgctgtcaaacctggacctcctcctgccgccgctcgacgtcagcgtcttcctttgctaccgccacccggcgccgtccgcggcggcgctcaaggaggcgctggcgaaggcgctggtgccgttctacccgctcgccggcgaggtcgtggccaacggcgacggcgagccggagctgctgtgcagcggccgcggcgtcgacttcacggagtcggtcgccggcgaggagatgcgcgggctgcggattggcatggtggacgagcgcgtcgagaagctggtgcccgccaagaaagccgccagcgtcatggcagttcaggtatatatatatatgggagaaaatatatttaccggaagccccttttttttaaaaaaaagttcaaaaatatgaatttgatctaccaactaacttaactactacttcctctgtttcacaatgtaagttattttagtaatttccacatgcatattatatctagatttattaacatcaatataaatatgaaaaatgcaagaatgatttgtattatgaaacggatggagtactagtatgtgaggataattctgatctatcacatggaaaaaaaaaataaatgaagatgctgtttttctggaactggagagctaattaatgaactaataagctggtatatatatatgtttccagcatatataactgaatatcacatcaagttatcccctcccctggacgttaaaattatgtgggaaagaaaatgtgtgtatgatgtcaagcaagcactggctactaattacacatatacttacgtgctttacgtgacatggacgtacctaccgcatatcaacctactacatgttttctttgagacggagaacatgagagaaaaaacgtagacttgatatgattcatgcatgcaggataaattacctgaaaggtatatctatcgacgaattaactaattattatcatattgtttgacctgttgtggtacaaatggtcagttctttgacctgcactaatccacatggttaatatacgtgcaggtgaccaagttcaagtgcggcggcgccgtcgtgggctgcaccttcgaccaccgcgtctgcgacgcctactccttcaacatgttcctcgtcgcctgggccgccgccgcccgcgatggtcacggcggcggcaccgcgccgcctccgccgacgatcccgtccttccgccggtccatcgtcgcgccgcgcgacccgccgccgccgcgctcaccgtccaccgacgcgctgatcgaccgcctgttcgcccctctcggctccgcgcctccgccaccggacgacgccgcggcggccgccgtcaaccgcatctaccgcgtcgccgccgccgacgccgcctccctgcaggactcggcggggcccgggcgcacgaagctggaggcgttcacggcccacctgtggcagctcaacgccagggcggcggcggcggagcgtgagcggccgtgctgcatgggcgtcgtcgtcgacgggcgcggccggatgttcccggacggcgccatgagggcctacttcggcaacgtgctgaccataccgtacggcgtgatgggctccggcgagctgcgcgccgcggcgctcgccgacgtggccggcgacgtgcaccggtgggtggcggaggcggccaccggcgaccacttccgcgggctcgtcgactgggtggaggcgcggcgccccaagccggcggcggcgagggcgtacctgggcggcaccggcggcggcgacgcggcggcgtgcatcgtgtcgtccgggatggggttccccgtcggcgaggccgacttcgggacgggcgcgccggcgttcgcgtcgtaccacttcccgtggcccgccggcgccgggtacgtgatgccgatgcccagcgcgcgcggcgacggcgactgggtggtgtacgtgcacgtgtcgccggagttggcggtggcgatggatgaggagcccaccgtgttcaggtcgctggacaacagctacgtgttcggttgacaaggccatgcacgacaaaataattaatgtctaattataacgtgtctatctttttttttctttcgaataagagaatgtgtatcaactatcgactatcgtcgtatgggagtagtagtgtgttaagggtggagtaccgtgtgatatcgccagatacatcaatcttggcatgaaacagtgtgtgtgaaaaaaaataaaataacagtccatgcaatgtcactgtaataactagaaagtgtcatgtaattaacgaaatctattcgaaatctattaatctttgtacgttgcacgtaaagaagtgcagaaacgcgcaatgttgatggaacgttagttggcaactactctacgacgggatggatgtgtcaagatgacaaaaaccaaaatggaaatgctaggaatttcagtcactttcaagttccacaaggaggcgggcaggaattcgaagagataggaaggaaggagatagcgaggactcaaccgcgacgacgacgacggcgagctagccttggccgccagtggcgctggcacccaaatcccagatggcttttcttcgagttaggattttcggacttggagaagaggatgggagaaggatgaggcggcaggagcatcagattttagagtggtttggccacaagggtagtgatggtgttgagtctcgacgggaagcggatcatctaacgtgaactcctcctgagtagacctacgagcggtggagttcacatgtcagtcagcacgttcctttgactccaacgtcagaagatcacaatccgtctcgacggtgagagcaggcaaagacgggatagacgagtagggtagagacacctcgctactgctcaagcgttgggagggtggggaggtgtggtggaggtcaggtaggcgctagggttgggtcgttggaagtcgctgcagctggtgcgctgacgcgcgtgacctcgcgcacgtacgccgccggtgtcctcgtagcctccgcagctgcgcctctccgatccccgtcgttcgtcgcccgccgagcgcgctgccgctgtacgcctggctgctcgcgatccgcgaagggtggagtcgtgcacagaccaccgcggcgcagcgaccgcgcgcatcaccctgcggcgccggagcccaggacccgtggctggctctggccctagcaagcatgcgtgatgatgtaaaaccagttgccggtttggatattgtgagttgttggatgcgttgatagaattttgtcctgacgaatgattaagccgtcatcctctgatttgagttatccattgttccactgaaagtctgaaactgttctagtgttatgctgttgcattttttttttttttgccttgtttgctgcatctctcatttgagatgtggaccaatcaaatgcaagatacgttgaattcaaagaagggtgacaactgacaatacttttcaacaaaagggcttctctgtgcaatcgactgttattctcaggttaattttgcatctctgcttcttgtgctatatgggcttgtgggaaatgtcaagagggttgcatgatcaaatgtaactacagttcaacatagtatgaacaattccatgtagtctactgagcctttgtttagcctttgtttagttccaaactttttcttcaaacttctaacttttccatcacatcaaaacttttctacacacataaacttctaacttttccgtcacattgttccaattttaacgtgaactaaacacaccctgattttcttttaaaaaaatgtttgtgaacttgcttttaagttagtcgattattgatgatttgacattacaaggcactattgctatatttgtatcgcccttttactaaatttgtacttatgcatgggtattacggtgttaaataattagttatgtatgtgaacttgcagtggccgatcaaaataagttctagagcctggctaatattattaagtatttgctacgaagattttgcttctaattcatcgaaaaacattcaaatttcattgtgcagggttgtcgagcagtaaatccacccctgcgaacttgtgaagtagaactatccaatgaaaaatttttagctacaccactagagagagagtaggtggcacgtgcagcgagaggaaaaggttgtcttgcacgaaaatttacgcaatctgaactgctcaaggcaactaaatttataggtattttcaagtttttctcaaaaatactacaaaacagcatatcgttccaacgttcaacgaaataactgttgtcatgatgacgtcagcatgatacctacagggtgtcgacgattgatgtcgcgattctggtatttgcatagtatggggatcgtcggtactagggtatacgcgagactgaggtaaaagagacggagacagggatttttattcaggtttgggcccctgaattgtcaggtaataaccctacatcatgttggccgaagccggtattgctcttattcaccataatcacaccagtactatatttggggtagcctatccaactgttgtcgacatgacggtttgaaggtctgactcgtagtcgacaacagggtagtctttctctttgagttcgtgctcggcgagatcaaagacagcgcaatgtctctcctatcagtatccggagacaccgtaggggattagccgtgcctatctccgaagtcgatatccggcgtcttgtcttgacgtatgttggcttgtattggcttgtggctttgtggcgtctatgttgcccgtgtctgttgattgtgtcttctatggtgggtgtgtctcctctcctcctagggggctttgtatttatacccataggtgtccccttgtctaagtagaactagggaaaccaatatgcatacaatccgagtagtcctcgtcgtttccatgtagaactctggttgtccttccttatccggaactcctgctatatccgcagattgtttccgtataggacatggtatgtggtgggtcctgccgagatttaatcaactattattaggtatgtggtatccataaccttgacacagggtatcatgtctagtaccgaaggtaacatgataacgtgatacctacgagatactccctccgttttttaatagatgacgccgttgactttttcttacatgtttgaccattcgtcttattcaaa

SEQ ID NO: 15030 - DNA, 3733 bp, Oryza sativa
ggtcagacgcgtgagtaaaagtcaccggcgtcatctattaaaaaacagaggtagtatcatatttggtactgaagataccataatgatgtcagcatggtatcgtgctgatgtcatctaatcagttgaaacggtataccgttctgtagttaaaaaaaaaaactctccttaagtcaagagggagagcgcgcgggatcgcgtctgccgcctgcagcagaaagcgctcgctgcaatgtacagaacctttgccatgacacatgactgggactactaccatttcacaactcacagccaaaaccaagcaacaatgtatgtacacaacggcaacaacctgcacgccccgttcgattgataaaacagtttatgctggtgtatgtatgcacagacgaatcaccaccgcccaccaccaccctgcacacactcactactcgctactgaacccacaagtttgaacatctccagttttgtccttgctaacatatctcatctctagggtctgttcacaacagctacatactataggtaaaccatcttttttcagcaccaccacacaaattcaatcggaacgaagagaaacgcagagacaatgttgcgaagcgggtgttcagcagcggaatcggatgacgatgcaggagatgtcgtccttgctcttcctcgcaagcgcttcggtcgtcagtcgcttcgctgctgcctgggggtccttgatcgacttcacaagatcgacggcttcctggttcttcattacctgagttgagcaagatcataagatttagcaactgatttgtggatgtactttgttaagggcggaatactcaaatatagattgatgactaatcatggagatcacgaggatcatgcattttgccacatggtaagtgcacaagaaaccatgatatgtacaggtcctaactaaacaatagatatttttgctccgagaggaagcatggtaaaaacaagcagtatacaaggacagaagaagcgaaaggaaaatggagatgcttataaactcttagcattaaaaagacaagattaatgtaggcaagagttttaaggaattatagtaccaaccttccatagtccatcgctggcaagtatgacgaactctatgcttgaatttattggtacatgcctaacatcaggttctgaactcaagtgcgccttgaggctttggtccccaaaggccctcgcaacagcaagctgaccatttacccggggaacatcacctgtaaacaggtcatacaataaattattaagtaacatgaacttttttattttctgaccaagaacagtgatgagacagctgaacaacaaaaatcataccaggaaatgttgttacaaagccaccctgcttctcaatcctctgcctttcattagttgtatgaggttcatggtcaacagtgagctgattagcagcacctctttcacacacaacagctcttgaatcacctacatttgctacccacatatcctttccatcaacgacaatagcagtaactgctgttgaaccaccaggtccaagttgtttggcattctccaaaatatatttgtttgtagagcggtatgcattcttaattgcttcctgagggttagtccagaagataggctgcaacatcagaaaaggcaaatggtgagcaaaagatacatttgtaaggtaaatggaaggaatgaacgtcaataacacatattcgtagttttgcaggcacataaaaaaaaccaaaaaagtaatgcttacctctttcagtatgttgcagaaaaggttagctttcaagtaacttggaacactgtctcccaagtgaccatcaaaaatggcaaagagaccaagctcatggctcttgtcatacttgtactctgccacatggtagtcctccatgtcatgcccagatttcccttccaccaagtggaatccatgagtcactttgttgcttgactgcttactcctccccttgccggtatcggtagatgacgaattaaggcatgttgcactctttaagaccatacacaaatcaggcaaaccaaattaatgtcagtacacactgatgataacccaaacaagaccaatgaagaaaggaggtgtgaggattccatgaaaatggcaccaaaatcagcatgcacaagttctcaaaaacttaaagaaaaaaatagttcactgtacaaacaaggttgaaggttgtaatcgtatcaaatagcagcattcacagtattgttcgtgttaatgaataagaacagaaaaaactagtcttgtggaacaccattttccttggctttgaactttcatttgaaattgtgggcaaatcagagtttttttggtaaacaagttatgaccttgataaatcagcaatgtctagttgtctctatgtatgacaaataacatttttgccgctgatagacaaatgtaagaaatctcaaaccatgatttaaaaaaggagaataatccatccctgaaaataatagtaatagactattcataggaacaggaaagttccattttcatcaatgaagactgcggattgtgattgctgagaatagtaatataacattttcaccatttttgtagttctaaaacatagaatgtattttgtcagaaaatgttttgcacaaattgacagaaatagtcaatagcatatttttttttagataaaagcacatggtccagtactagccttcctattgccaaactattcggagaacatcactatctgtaaagtggtataatgtatgcaaggagcagctatattattccgaaacaatattctgcaaaacatttattagatgaacaacaggacattttctaaggtccaagtggggggccacggcatagaactgaaaaacaaacaagaataaaatcacaatttgcaggtaatattagacttcataggcgatagacgagtagtattcatccttttttgtttccaaaggtgatgtaatctcctaacttagtagacaacgcacatgatcaaatcctgaggatcatgccgataatcccccaacctctgctcgatatctgcaatagggatacttcaagagctactttacgggtggtccaggtctgaactcataacactcgtaagcatgtgaaaacaggtgtctagcaccgcaagttactgactcttgcacgtcattaaccacagtgtaatcaaatcctgagaaaccaattatcaactacacacaccaagaggcaactttcccaaggcaggcaagaacagatgacagttttctttcttgtttgggttcataaacagacagaaacacataacattaaaatataaaaacaagggcactaatatcataatctgattgcttgaagacaactaccgccatcattccgataaccacagataaggctaatgatttgcatgaactggtctggtttggtacagcaaggttacaagcttaagtagggagcaatgctatacgtactaaatttttcttactaaacttttactaacaatcatctcaatcgtttgatttaagtagatggaagttacaaaaaaatctagatgcactcatagcataacagtgttagtaaaaatttagtaaaaaaaagttactaggtatatccttttccttaagtaggtgcacagcaaggctccaagaaagtacaagttgcttacggctggcacggcagcatgggcgcacgcgtactaagtcaaaaaggaggaagcggagggttgcacaagtccgactttgcttggaagttgcaaccccatacttggagatcctgtgactccaagttaac

SEQ ID NO: 15031 - DNA, 3054 bp, Oryza sativa
tgagtggatgtttcgataaacacggatattaatcagatgctaaaaaaacgaagctcctttcaatcaggcaggcaccagcacatcaaagagggtaaacgaagttaaaaaaaatcaaaaattttgctacgcagccaagaattgaaccgcatgaagacaactcaaaatagtcaaattaaagaaaaaaaaaggtaggaaaaaaaagaagaggcgcacgcaggcaggcagggaaacatacccggatcatgttgagtatgtcgggccgcttcttgcccccgcaggccgaagacgaggaggaggtgccggcggcggaggaggagggggagcatgacgccgacgacgacgccgactgccgctccatccgcccgaccatgtcctgtccaatcaccacggacacagaccagctcgctcgctcgctccccactcccgacgacgacgacgacacagcagcagcagcgcacggggatgagagatcttctggggggaggaatttctatcccttggtttgcttctcctgatccgattcttccaccaccagccgagcccgaggcctctcgcggcgcggacacctgtggcggtagcgtgaggagaaatggaatggaatggaggagaagaagaagagaaaaaagaagttggagaagaagaagagaggagagggaggaggagtcgttgcggttggggtttgatgattgtgttgtggtggagtggaagagccgctggaagtgggtcccacaccagggagggggcaaaaaaatcggctgaaaatgaagcaagcaagccgcacacaggcacaggcgcacagctgtggaaaacctggaaaatggaaaacattgctgtgcccggcgtggatatggatggacacggacacatctttgcgtgataaaaacaccaaatttgaaaataggttaatagttttttaaataaaaaaaaggatggattcatgaacagatatgttttcgtaggaatgttattctatcagtatatttggatatgcataaaaccatgcacttatccgtcttcaagggttattgacaaaattgctccctaaaagttttctattgtctagtattgttgattacgtgtataaattaatggtatggctcgaagtgatacgtgtcaaatacttattgtatgtctacgaaatgtcgatttgtctatatcgcagaaataattgttgggttttttactattgacaaatcatccaataaaagtccttcattgtcctcgacgatgtaagtataacaataatatatcttatttagttccgtactaagttagttttgactttcgagtgtggtacatatttatttttatcaacacggaatactgaatttgctctagttgtaaaatcaataaatttgtccctttaaagttcatgtttttaaatacatatgttttttaaataaatatgagggcgagcttggatttggacatgtccttgtgggataaaataccaaatgtgaaaataaatcagtgttgattggatagctacaaatttttatgggcataactacataactctatctcaaactaaaccaatgttgtgtaaattgtggtatacctatttgctaaatactttcatatatcacatgatttgatcacacgaagacatttaatttgcaaattatttgatagatgcaacttactccctcagtctcataaaaaaccaatttattactggatatgacacatcattcgttgtactaaaatgtgtcacatctagtagtagatttgttagatttgtttgtttaggacagagtgagtagaattttgacaagatgatccgtacatattaattggtttccaaatttcgatggcttttttacctcacggcttggatgataaaccgatgcctgtgcgaaccaggaaagaagatagaaattttacaagctaaatatgtttatttacaacctaaatattttgctatctgcagttcggcacgcttcctgacttctattttcatttcctttgggtatcgtttttcgtttcggtgcccgggagcttccaggaagcttcgtccagctcccacccatggcaataatgctaggtgcacacggtgggatagtctgtcttttcgtttgtatctataccatgatttcaactaaatcgaaaagcttggcatgatttccatgtgtcccttccttagccgtgttaggttgcttctaaaaaccaattcaaaaggctggcatgggataaccacattagaccctgtcccaaaagaacaagtcatactttattatgtaacaaattcaagaacacaatattttcttttgtatctgtgctatgcctttttctaacaaacttaaagataccacaattttttttttttgcttatagtgtcatactccatgacaccatatatagcaggtattccactttaaaacacttctcttcagcaaactttttttttgaattattccaaaaggggcaatgcaacgtaaggtgcatgactctctcgtatcctcaaagaaaataataaaagagatatattatgactttttgtgggtgctaatgtttgagtgcaccgtgcacgatattacctaaatggtatccacaattacatagatataggtgttacaaaatgcatcttatataattattcttttgactccatgttatatttgttcgatgggtttagtggtcaaaacttatacatattatatatttatatatacagttgcggagaatgaactcctccaccagggaaccgtgaggcctccctttatgagttcggccgggggcagcgagtgagattcgagggcttggtaagcgaagctgtgtgatttgagggggttcaatcccccaaagacgatgagacaaaagatgtttatacaggttcgggccactaagaagcgtaataccctactcatgtgcttcattgattgggtgtagaacacaagtgctcggggttgcgagacccaagtgccgacttctctcactaggcctggatctccttttatacctcaaggggttaccacataggcccaacaacctaacttcgtcgagaagtattacaatctttgcattaaatggcatggtcttggttccttaacttgg

SEQ ID NO: 15032 - DNA, 12102 bp, Oryza sativa
cctttaggggagggccacgtggcattggagggccgcctcctccgactattctttgggaaggagtggccgccaccccacctcgggcctgactccccttggggagggccacgtggtattggggtcagcctcctccgactagtctttgggaaggagtggccgccaccccacctcgagcctgactcccctaaacatgatatcctcgggcccatatcaccgacaacagttgcgaagacaagcataggacaattaagagtccagccatagacctgttttcttaatcctttaagattccattgtaaatcgtatacatattaagattgttaagcaaattattagttcatccttggctttgatagtttgatggttttccgggtctttccctatctatatgtatacatcttaattgtaataaaaaagaaaaaaacaaagaaaatgtatgagtagcagtgggtagatctgttccggaagatgagtaaccccgttgtacaaacgtacagtataaatgactctctaatataaaggggatgttacctttgttttttccaatatatgacacatcagaatcttctaattcgtttatctatttatttctttagatatttatgcaaataaataaacatactaggcataaccaaagcatttttttttctgatagtatcacaagatactctattcgctattttttctaaaacaaataaaatatttcctccattccaaaatataaaaaaaattggttgtatgggacagatttatagtattaaaaatacgtcctattcaatcaaaactctatatattttaaaacggatggagtaaataataatcgaataaatatttgtggtctaagtttgagaaaaaaaaatcaaccgtatcacatcacacatctcaaagaaatggaggaagtaccgggagtaccgagtgctgtacaccggtacagtgcgcacgtatggagaacggcggagcgttggtacgcatggcatggcgttggcgttggcagggtcagcagcgcagcacagcacagcagggcgacggggggaggggaaggggaccatgcgctgcgttggcttcttctgttgccggttgacccgcgccagaaacagtcggatcacccgtcgtcgtctactaccgcgcgcgtggggacacaggctgccgctgctgctgtgtcgcgggcgcggacgcgcggtggtggacggtagcctgccggtcagaacgacgtacgcgaggacaagcagctagtagctagccggccgggccggcggggcgtgcagggcctgtggcctgtgccctggccggccggccaccgcgcggcggggcccggacaccgccaccaccacccgttccgatacgaggatcgcattcggctacaattacaaaggcgcgagggatttttttattcggtttttgaacttttctaatttttattttttactagaaaaaacgtctgtgcgttacaacgggtgaattctattttaatcttattattgttatgcggtttagctagggtaaattcactgtgaaatttcgcttggatattttttttaagaaaatcatgagctgcaattagtagtctgacttcacttcaagttagcatgtggggtttttttaaaaaggatttcttatacccctccttttgtattttcaaaagcaaacgaggttaaaatctaactcaaatatggatatgtatttccaaaagcgaacgaacttaaaaaccaactcaataccaaaatacccgaaaaaacgtggggcctcccccactgtgttatgataaaaaaataccagaaaaaacatatttaatttttataatagtagaaaattttgaaataaacctttcaaaaacttattttgatctaaacattttaaccacgccagtcgaaccggtgtgacaaaacaacgatatcacgttgatctggctagcacgagaactctatttgctcgcgtcgatctgcttgacgtaacaatattgtttgtgtggcaaaaaaaaaactgtcacacccgttgtgtgtggtgtattagtggcctgattaaaaggtttagattttaaaaatagattttgcaatagtttatttttaaaatttaaaaaataaaaaaggcttaaggaaaatcgtgaggcgacgaggggttgggtggggggcttgcccggcccgcggcgacgcaggggggcacgtgcgctcgcgtccacggtccacggcctgtctgtgtctgtgtcttgtgtctggggttggcttggagcggctgacctgtcaggtgggaccgggtcgccctgtgggggagcagatgactagacgagcggcacggcaacccgctcgtctctttcagccaggccgtagggccagcaaaagtcacggatcttcgcgttgccattgcaaaacgaatctagtactacgcctgtttcaaaataaatttattcttcattcatcttgtatataccaatagaaagttagtaaaaaaaagaagaatatcctaactttaccaataccaatacaactattctcactttatatactttcaatacaactattctatacttttataaattctgagacaatgattactctaaaataaatttattttgaaacaaataaaagaaactaaaaatgaaattattatgagacgaagtaagtaatacttttttcgttttataatatataagtatttttaaattctaaaattagaccacctctgtctcaaaataagttcatttttcacccattccacacatatcaatacaaaactaaaaagaactatttctcattttatctactcctaatacaattattacatgtataaacttggatgcaataattagtataaaataaacttactttgtgacaaataagaggagaaaaaaataaacctaatacgggatggaggaagtattataatataagcattcatgtactgattttcatggctcctaccatttcaatgattacaaagctaatcagacactcgaaaaggaaacataagcaattcaaaataaaaaaaatgacaagtaaaatgactaaaaaggaaccttttgacttaacttgagtgttcgttatacaatctaaaaatccttatattttataacggatagggtactttcccatgagaaagtattaagaaatagatttatttcgaaacaaatgtaaagtatagaaacaactacatcttagaatatgtgaagtaatatttgaaaatggtaccgaaaattactaattgacttaaatttattttctgttagtgttatattgaatttggtgctaaatagttaaattgacggatatgcatggaaaatcgatagacaaccgagaaccatttcatggtatcgttcccgacctgttttcatcccgtcctatttccgcatttgctgaaggccatgagttgcaaaatagcaatcctgcgagctacggcgagcagagaaaatggacaatggacatttagaaagcggtttcactggaatgccatctcgaaaacatgtttcgctgaaatgccaatatggagcgtgtgatcacagtgaaaatggtaaaaatagagaaaatagcaaagttttaacgaaacgtactttcgagatgtattctagcgaaaccctttttttaaacgtggtcaaatatccattttctcacggcgagcacagcgctcacggctacgggagataggaggacaacgcccggccggtgcgtatgagcgtatcggcggcaagtgctcccggccaacgacgcacccaggattgatagatccggggcagcgatgggccggggtcggtcgccactcgccaccgcggatgcgtgatgatcatcatcatcagatcaggtgagattgcattgcgacggggtggtggtagcgcccgcgcgcgagtgcgttccatgattgcgcgctactatagctcggaagtggagccagcggccagcatgtcaaccaaaggtcgtcgcgtgacgacacatcacctaatgagtagggaatctcagctaatggataacgagatgtcgctaggaattaaatttagaaatatactattcattcattttatttttagaaatattcggaattcaaaactttttacaaaaatataccgttgatctcgtacaaccattacgcgaaagtgacgtggacgtgacatcatgggcggtatcgcgctaggaaagtgcgagaccgcgcggtctcgcgaaacagaagagcgagaccgttcggtctcgcttaaccaatcagcgataccggatttcaaaatggttaattagtgattaattaccataattaacgattaattaattattaattaatcgctaattattattagttaaataattaattaggtcattagtcactaacctaatgcagtttaggacggtgtcgctctctgcttgagcgagaccgctcgtccttcccgcgctctcgcgccgtcgccgcgcgagaccgcggggtctcgcgttttctccgcgcaataccgccctcaacgtcacctctgcgtcattttcgcttaacggtagagcgagatcgatggtatatttctacaataaaatttacatcacgaatatttttgaaaataaattgaataaatagtatatttttaaatttaattcatgtcgctagccactcctatctttggtttaaataaatgtgaggtcttgggcgagttatgaaagaaaaaaaaagagaaaaaagggtcttgggcggcgtcaaagaggtcagggaggaactgatgagccaggtgagtgagtgacacgcctcgcctgagttgcagatgtggctgcacatcagcagtacaccctgggatgagatgccaccacgatgcatgacttgcatcctttggattgtagcaatgagaaaacgaaaaatgtagaaaaaacgcgagaatgattgtttaactgggccacagacaaaacgtaggaatcaaataataaaatagactgatttttttttcaatagattgaaattcttactaagttttcttcaaaatctttataagattattaatgtcataagaattttgaaggataagataggatttaatcattgtttcaaaggcttttctagtctttttctataagattaaaatcttttaaaattttatgtttgattaatcttttaaaattttatgtttttcctacaaattaaagataccttagtcgcagtcatgagtgatcggtaagcaagtatactttctaaccatttcgcaatacattcagtaagaactccacaagaacaattgagatgcttctaggggaaatgatataggtaatatgcttaactatttcttttctcctgaaacctatcgcattgcgaacaagtcatactagtatgttaactcatagtgcaaaatcttgtcatctgatcaacgagaccaacaactccgcaacgcctgattttgattctatggaaactcaaaaagggataagagtaatcgctatcatgcattcgttctccccgcacctaacaatcaagatggcaatgtaaaaccgtcaccacgcactaggaagagtctaacgatcccacgcaggtacatcactcaaccagtaaatggaccaggaaggccaattcaacatcaacacaaccaaaaggaaatgggaggattgcaattgactaatcttttcccgatgggacgatatgtaatacttgcacacatctatggacagaaaaaatggtatagagtatagacaacctttcattctgatgatatgcagggaataagcaaccgtggcctattcctccgaaacagtatggcgccatattggtgggtgcgccctcgcatttttcttttttctgatataagctggggtttagttgttttacatcccaatatacaacataacaaggaaatagaaaagaggggggtagggtacaccacatcttttacatacagaagttgagggtgtatttacctgcctaatttctaagttgacactgtcacattagtcatattagcttgctggctcaataaaaaaacaaaatcaaatgtgccgcacctctgagctgctgcatctaacatcagaaagcgatcgacaccaccaatatgaatgtgaacaaaacaaatcaagcctatccatgtcagtcatcaatatcttggacccactgtaagcctgcaaaaggataacataatgtttaccactctcataaataagaatatggtcttgatttgagatgatacatggcattggaggaatggaagtgaccagaatccacacagagtgttcaacatttaaagtgctggaaaaggagaaaaaaatactggcacattccacctctggtccttctgatttctccacaacgatttttttttctttttggcagagcccaatgaatgaaatcttactagaaaatgccatccacaaacaaatgagctgcccaagaagctccatgatataacagtagctcagtttaccgttgcacaattttatctccatagttcaactaccacaagccgtacctgattctccccattggacactaaccacaacaaataccatctgacaggaaattctgggaaatcataaccaacctgttaatactgactccacagctgaattcggaatgagtagtccaacgattcgctgattgtcagttgttgtctctaaacggacaacacgtactcgcttgtgactttgacgaacctgctcaataacagcagcaaggcacagaggcgttaaacatcaaacaatcatgcaccaattcagctaaagcataaaaatccagagagtaaatcattctgtaactttgttttattgtgagatactggacttctacttttagctttagacaaaatcatctagctcttgcttgatgggtagaaaggtcagagcctcagaggattcttttagggaaatatgtccagatcatcattattactatggtgtatgttctgtgttgatgaaggaatcattccctattaagtattggagattcaagttaacaccaaactttatccccttattttcgaatccaccaaatctctttctaactttagttaatgccctgagaagctctgtgctactgcccctgccatccagctacactcaagaccattttactgcctgtcctttaacttcttagctttgttcatcaaatagatttttttaaggtactttcaaggggatccctttaccttaccctaaagactaaagagtagagactccagagctttgagaagtttgtgtctacatggaaaaagcggatgacacaagagccaatacaagagacgcaatgccaagatcggaagatctaaaatcatatcaacccattgaatatatcggaacccaccattcaattaagatgaaaaagtagcaaccgtaagactttagaataagtggcataggagtgaacctgcttagctagggccttttctattgtaccccaaactggaagtatgagaccacccaagatgttaacctcttgcaaccttcttcccactgtacagtagcttcccactttgcatttcgatccatgcatacactgaaatgaagcaaaaagacactagataagttgtagacacagtaacagctcaaccgttcatcatcctaaagtaaattaggaggaactgtatgtggactatggaaaaatgagcttcatcctcaaagggaataaaacacaacagatccacaaacaaattgctattcacgatgaacagatgcacgtggccatgaaattacaaaatattcctgcttgaacaaaatattctatgcttcaacaatttttgcgtgtatataaaaaatcaacatcgtaaaaaggatgtgttatgtccctcagatcataatgggaaaacactgtcagcgccatataccttgctaagtactccaatgataattattatcttcaaatcttgcttaacttccaatgattacaatatgcccctttatataaagttcccccctaacaaatacagatcaaatttatctaagaataactttccctaccttataactactccattcatttcatattataagatgttttaggtttggactaagtcaaacatcttcaagtctgaccaagtttatagaaaaatgttgccgcatttccaacacaaaacaaacatactaaagaatatatattcaatggtgtatttaatgaaactaatttggtgctgtagatgttgctacatttttctataaacttgatcagacttgaagaagtttgacttaggacaaacccaaaacatattataatatggaatgaagggagtaagatacttgacaactaagggcccgtttggttgggattcttaggagcaattctagcaggaatcggttggagctgagccaaacgggcaatttcccctcagcttccaaagcgaatcaaccgggatcgattcccttttttacgaaggaagggagaatcggcggaaagcgagcttctgctgagaatcaaaccaaccaaatatgaaagtccccatatttttcccaaaaaattacccgcctgccactgggtatacccctctttccagccttccccatccacccgagcagatcgatcgacatcacgtgctagggttgcgggagccaggtgacggcgctccccatccagcgccgccatccccgccggcgctccgcatcgccgccgacctctcccgccgacgacatcgccgaccacagttcccgtgcccgagccttttcccaccatccagccaccttcgacaccactgccggtctccatcctgccactcccctattctccctcagccctgcagatccaggccgacaacgccaccagttgctagtgttgccattctccgtcgagctccctaaacaggacgaccagcactgactgggcaaggtaccatgtcctgaacttctccatttgattagctttgtatgttgtactgttgtgcaaaatagtagaactgaattgctcactgcgatgtggatttgtgtgtaaataatattgatgtggatttgcactctgatctgtgtatgtctaaatagttttgatgtgcatctgtgctctgatttgcatatgtgttatttcataagtactgcagatggcagcaacagtagtagaggaaaatcaaggtgcaaataatgctgaatggacagatgaaaacactaggatagtttgtgagttgttcgctgaacaagttaggataggaaatcgctcaaatacccatttgaacaaggtggggtatgataatgtgattgcaaaatttgaagaaaagactggcttacgctatcaaaagctgcagttcaagaacaaatggagcaagctgaggaatgagtataatctatggaagaaactgatagctagagagactggattaggttgggaccaagctagggctactattgttgcatctgatgattggtgggcaagagccaagaaggtatgctacatattaatgttgatgtttaagttgttaaccatgattttgcaaatatttgtgtcactcttctgattattcccttggtgttcctctaggatttgccaggttgtgcaaagtttaagttacgggggattcaaaatgaacatttgctccaacaaatatttgaagacctttgaaacacaggagatgaccactggaatcctactagtggaaatttaccgcagagttcaacccaaccttccagtactattaatgtagatacagaagctgtgaatgaaggtgatgatgatgatagtaacgatgatgatttctcacctcctcccaagagaggtaaggcagcagctggtaaggaagccaagaaacccaagaccagtggtggatattggttctatgaacaaatgagtcgttttgttgataaccaagagaaatcagccgcatctgttgagtctcttgtcaggagggaggacacttcagggtgtgccatcaaagatgtcatggctctagtgaaggaatgtggtgctgtatttggtaccaaagagcacttcattgctactgagattttcacaaagaaatctgagagagagatgttcatgaccttggataattcagaagaaagatttgcatggctcaccatgaaacatgaatccaagatggccaagtattccaagtagtggcctagcatggttgtgtttgttcaacaaatgtcttgctctgtatctttagacaattttatctccaagtagtgtttttatttttttttattgttgtaataattgttggatgtgttgactatcccctattttatttactggacatgtaatgcaaccaagttctcctttaattaatgtattgttgcatgcaattgtatttcaagtattgcctactgacttttattacctactgtattgctgctcgacatgtattgatgttgtcaattgtatgtgtacttctatacttgccttgatgcttgtcacttaacactttctttccatgtgccagatgtcttctagtgaaactgatggaaatgagactttttctgaaagtgatggtactgatctacatgaagatgatgaggtttccatacaatcagttattcgtcatcatcaagcattggaagccaatcttttttcagctgcctgcttacttggacaatattatatgacgtattatgataaaaataaaccaaggacgtcagtactaagtggatatgcatgggtacaagagactctgaggactccaggagagagtcaccacatgtttcgaatgaatacagacctcttctacaaattgcatgacttgctggtgagtacctataacctgaaagcaaccaaccacatgaactccatggaatcagttgctatctttcttttcatacttggaggtggtgagtccaatagaagggttcaaaataggttcaagcattccggtgaaacaattagtagaaaatttgaagaggtcttattgagtgtggttagtatgtgcaaggattacatgtcccaaagatcctaacttcccaagggctcatagtaggattaagaatgacaaaagattatggccacatttcaaaaagtgcattggagccattgatgggactcatatcacagcaaacccacctcgtgaagattatgttagatacattggtagaagcaagagtcctactcagaatgtgatggcagcagtcgactttgacatgcgatttacatattcttctattggacaaccagggtctatgcatgatactagcgtcctttatcatgtgttagatgttgataaagatatatttccacaccctccacaaggtatatactagctgaaatcatctacactttgctttatcttttatttgtaccatataacattgactcgatgcatatatcgtaggtaaatattatcttgttgatgctggctacccaaataggccagggtatatggcaccatacaaggggcaaaggtaccatattcctgaatggagaagaggtcctccaccaagtggtgagcaagagtattccaaccaatgtcactcaagtgcatgcaatgtcgttgaggcacctttggtgtgtggaagatgaaatggcggatccttttaaagatgcctacctatgcaatggacaagcaagaaatgatcgttgcagctaccatgtgtcttcacaactttataagacagaattcgacaactgacaagtattttcgtaggtgtgatcgagatccaaattatgtcccaactataccaacaagatatgcaagatatgttgtttcccaaaatgcatcagatacctctactccatagtctagtgataggtctatggacagatttcgtgatgacctagcaactgcattgtggcaatctagatgaatgttctcatataagtgctgttaggaatatattttggaagaactctccatagaaatatgtaactgtggtggttccactctccttagaaatatgtaaccatggtattttgcaataactgaatcaatttgagtggactattattataatggacattgtctttgatgccatgcaatgtacgtgacgtgtttttttaacttctcatatggaagcttggtatttttttacaagtattgtgctaaaatatttgtgcatattcagaagtacttctaacaaatattaggattgccatttcagctatatctcgttggtacagaggttatatagaccaaggacgtctttggcttcccccattaggatcttaatgtttctagccaaacacctaaattaactgattctgattctcttcagtatctgattcaggaagaatcagaattagaatcacagaatctgaaaccctaccaaa

SEQ ID NO: 15033 - DNA, 1612 bp, Oryza sativa
gacaggttatttcgtagctactgtcatttccagttctgtcatcattattatttacttttggattgattcagatgcaagaaatgtactgaaaagtaaggagatcaatatgtataccttttgcatcttcacagcagtgtcctcgttcgcaaactgtggcttcacgccactaaatagtaacatgcaacccttcagaaagaactgggtccttttgctcctagtgatcccgcagattctagcaggcaacaccttgttttcaccactcttgcggctatgcgtatgggttttggggaaggtcagtggaaaagcagagtatgcttacatccttcagcatcctggggagactggctacaaacatttgcatgtgaggagaaattctgtttacattgttctgagtgttactggactgattctactgcaagtaatgtttatttgctcgtttgagtggaactcagagagcttagagggaatgaattggttacagaaattggtaggattattattccagagtgttaatacaagacaagccggtgaatctatccttgatatatcaacactttctccatcaactctgttgctatttgcagtcgtcatgttagtatctcctccaaaccctgtcttctaatgaatttaactaaatcagtagaacacttagattagttattacaggaacataacaaattatcaggagaaactgttggaaaatttgatagcttcatcatttataactttgaagattactaaacacatgcattcatgaccactgcagcttgctaggttttatcgattttatacgtcaccgaaatagtagttatgaacttcaaatctgcatctaaataactactgttgaatagagaaagtgagactactttgaacaaataggacagaacttctgacaagggtttaaatgaaaagtaggcagcatacaacatgttttatgtggaacagcatgtttcctactccttgttaacagataatcaacttgcttgcaggtaccttccttccgatgcttcatttctcactgccaatgctgataaccagcccttgacagataaaaagacaaactcgattagcagagcactgtggaggaattttaccgttaacaagctttcttgtttagcaatgttcacattcctggcatgcataacagaaaggaagtcaatttcttctgatccactaaatttcaacatcttcagcatagtttttgagataatcaggcaagttcacatccttttttttttgtctgcccataacagaaactatggctacatcaaaattacatcactgaaaatccgaattgcctagtatgatcactaagaaccactgaaccagcataattaaatttgcaagaacatatcaaatctacgacctgtcatttttttttcttttttggttgcttacaagcaaacagaaataacgccattttatttccacagcgctttcggcaatgtaggctactcactaggatacagttgccagaagttgttgaagcctgatgccacttgcaaagatgcttcctacgggttcgtcggcaggtggaccgaggagggtaagctgatagttatcctggtgatgttcctggggaggctcaaggagttcatcctgaaatgaggag

SEQ ID NO: 15034 - DNA, 798 bp, Oryza sativa
ttgtaatattcttggtgccctaatgtactctccggaattttccgtgaattttcggagctcgagaaatagttttaaagtcacaaagatcatttaaccaattaaaataaaaagaaaacaaataaaatcctccctcctctctttgggcccctttcggcccaattccccccccttctctccctctcgggctggccttctcccacggcccgctcggctctctctctccctcaagtctgctttacctccctcgcccgttttccccactctctctccccgacaggtgggacccgaggccccacctgtcagctcctcctcctacctctggctggccggctgcaaccgccagggccgcccgagccaccccacgacgccgccgtttccgacctcctccaccccgcgcgcgagcccgccggtcgtgggaccccgtcgccccacgtcctccacccttttccccactctccccacgaaaatcgccgccggttaacctctccaccacccccaagatgccccgcctatctcgtcggccggttgccacctctctcgagcacgatcccatcgctccaagcccataaaaagcatccccggcctcccctttccatttcccccaattttcccgagcttctcgcgccctgtactgctctcccctcgctgctcccatcgccgccgctcaccggcgactctccatccgctcgccaccgctgctacagccgtcgccgtactgttccgccgccacctgcggcttcgccgtgccttgccgcacctcggccccgctccgttttccccattccatcgttggaaccc

SEQ ID NO: 15035 - DNA, 686 bp, Oryza sativa
ctactggaggcaccacttcccgatggcaaaacggatccccagctggccggagccggtggcacagcgatcgtgtccaccagcagcggtgccgcctcatcgatgcatctcaccctggtcttcaatggtgtctttggtgccgaggagtacgccgatgcagcactgagtgtgaaaattgagctggcagaacggaaggaggtgatcttcgatgagattccacgtgtgcgcaaaccctctgccgagatcaatgtcctggagctgtcgtcgcccatttccatacagaatcttcgactgatgtcgcgtggcaaactcctgctgaccgtggagtccaagaagtacccacatctgcgcatccagggacacatcgtgacccgagccagctgcgaaatcttccaaccctgctggcgccgcacagtgccgaatcctcgaccaagagcagcggtttggcgtgggtctacttgaacaccgatggatctctggcctacaacatcgaaacggagcacgtgaacacccgggataggcccaacatcagtttgattgaggagcagggcaagcggaaggccaagctggaggatctgacgccgagcttcaacttcaaccaggccattggtagtgtggagaagttgggtcccaaggtcctcgagtcgctgtatgccggcgaactgggcgttaatgtggccaccgagcat

SEQ ID NO: 15036 - DNA, 3101 bp, Oryza sativa
  unsure (1)..(3101): unsure at all n locations
tgcgacgaagcggcttggcaagcgcggccgatgggttgaaatctaaaccaaggagacaaggatagacgtctcaccgatccaaaatgatcggagagggagggatgatgacaacgttccgatagcaacacatggagacgacaacgacgctagggccaaaccagattagattaaattggatcaagacccgatggataaactacaccatgaacgacatcggagagaggaaagctcactgagggacggcgtgacgatggatgatgacggcagacggccggcagcgaggtagaggcggcgacggggtcgggtcagcgatggcggcgacgtttcagcgatcttcggtgaagaaaaaccggtggccgggcttcaccttgctcctgcgaacccaaggattcgacggcgaccgagggcgacgacggacgacaacgaacggcgcgactgaagatggaacagatcggcttcacggggacgacggtgctccgatggcttgcgtcttcgcggaggtggctgccagcttctcctcactgctgcgatgccgacagtggatacggcgaggtccggcgaccacggagtcgacggcaaagcttggttggagatcaaaacatggcaacggttcggccttcacggtgacggcgacttccggcggggttcagcgcaaaagaacgggtggccggggtagagctcgacttggcggggccgagggaagtggcggcgctgaccggcgacggccggggcgacggcgcacggcagctggagcggctgccggaggtggagagagagggagctcgcggggagagcgtttccggcgatggcggcggacgggacttgaggggatgggtagaggacgactagggggtcctttatatagccatgggaggccgggatcgagcccacatcgacgggaaaaactcgggaaagtttatatttgccggaaaaaggaaaggatcttcgccgcctcaacaaacataacaataggggacggaaacacggtgcgattttgggagtccgcatggattggtgggcaaagacccaaagacctcatgccgcttgtctttgcgatctcaaaaaacagaggaaaatcccttcggcaaggaaaggaggaggacgcctaggtgcaagattttaagcttgattcacaatcatctatcgcagtcgacctcgtcgaacagctagtcgcactgtgggaagcggtccgaaatgtgcacttagatgttggagaaccggatcagattacttggaagttcacaaacaacgggcactacacggcctcctcggcttaccatgcgcagtgctgcggggcgccgagtacaaacttcaattccttgatttggaaaccctgggcgccggggaaatgcaaatttcatgcttggctcatcatcagaacagagtctggactttagaccggcttgcgaccaggggatggcagaacaatggttgttgccctctttgccgccgcgagactgagacggcattgcaccacgttgccacttgtagatacaccaagaggatctggcacctcgtctctgcatgggtgggctatcagcagatggacccaacggaatgggaggaagcccagtcagtcaaacagtggtgggagaacattgcaaacacgcctagtgtcccgaaaaaaggacttcgatcgctcattctgttagtcgtctgggaaatttggaaagagaggaatcggcgatttttgatcacaaagaggtggcaacgaacttcctactaatgaaaatcaaagaggaggcgagcctttgggctttagcaggagctaagcggttgcgtgagttaatcccacactctgtatagtgtacagctatagtggttctccgtttttcttttcccctaagggtttgtatttctcctgctctattcgatgaaaaggcactctagtgctgttttccgttcanaaaaaaaaagaaaaaggaaaggatttgatccgcgaaatggaaaagaattccatatanacttttggggatttctttgggaaaaagaaaaggagattgagaggattcccattcccgcactaatttggaaaaaggagcaacggggaggccggattggtgggaggaggcggcggcactgtgcacgagcacggctggctcggctctgtctggaggaggaagatggagtactgtagcgatagggaggtaaatcagactttggctgggctgagaggaagggagagaatgggctgaattcggcccaagctgaggaggaggatttttattacttttccaataaattaaccaatgagatgatctttcaattgttaaaaatactttcaatgctcaaataattccaagaaaaatcttgaacatacttggacactcaaagtatttaacaatattaaaaccagaccatttaatgattaatttgttaattaaataattgctaaactattctttgtattattaaaattaaaattgagctctgagaaattcgagaaaattccaaagagtataattaatcatggagaatttaatacaaattaaatccatccatgctttatatttaggaaattttatttcccacatttaacttcacttgtaaattaatgaacatttaatatatattctattaataatttattaaataatttttaaatcctgaaacaaaaattcaggctgtgacagtgtaggctttggtggcaaggaaggagaacgtatggattgtggattccggttgttcgcggcacatgaccggtgataaagattggttctcctccctcaaaaaggcatccaagactgaatcaattgtctttgctgatgcttctactagtgccgttgtcgctacaggtttggttatggtaaatgaaaattttgaattgaagaatgtagctttggttaaggatttaaagtacaatttgctttcggtttcacaattgttgatgaagagtttgaagttcactttaagaaaactagaagtaaaatttttgattcttgtggtgattctgtgctgaatatttctcgttatggaagagtgtttaaagctgattttgaaaattctgtttcacctgtgataacttgtttggttgctaagtttgataaagatgtgatgttttggcatcgtagacttggacatgttggttttgatcatctcac

SEQ ID NO: 15037 - DNA, 705 bp, Oryza sativa
ttcctgcagccctgctgctagttgttgttcacagattctttggcttttatctactttgaaagattatggtcttacttttgaaaaagtacctctcttttgtgataatactagtgctatcaatattgctaagaatcctgttcaacactcacgcacaaagcacattgatattcgttttcactttttgagggatcatgttgagaaaggagatgttgagttgcagtttttggacaccaagttgcaaattgctgatattttcactaaacctttggattctaatctctttgcttttcttcgtggtgaattgggcataattcatccttttggcatggtttgagggggagtttgcacctcatggttttatcaagcaataatatgacaatgaaaaaaattgagaaaagagagctttgtttatgtatatggtattttcttgtgcatgctagcaatactttgaaggtttatttgtctctagcatagcttgtatgtattctagtcttttcatgagatttagattttgcttttaagggagatgatgcatgacacttaaattctatacttgaattaagaaaatatgcaatgttgatgctagcatatggtttgatttataaatgctctatatatatgctttattgacttgttattcctcaaatacctttaattgctcattgtgaaaaagagaataaaaaatataaaaaaatgaataccgaa

SEQ ID NO: 15038 - DNA, 6349 bp, Oryza sativa
ctaccttttctgaatatacatcaatcagaacatattgtctccattcaaatgataatttctacacgctgactcactcacattatccatcctgtcataaaaaaatatgcttatatataacactggtaatcctctggtttgttttacagatttcactccaatctggtcaattcgaaggtgtgatacgattcaggtatgtttgcggttgcaccatgttttggtgttcttggttaacatcaaatagcatagccagctgattcatccatgcgcaactttgacaaaatgcactttttttttcaaatctctgttagccttttttttttttccaatagacgtgctgcctcacctatttctcattgttctgttcaccctttttgttatagctgtgtttccatcactaaatcctcgctttgttaaattagacgacactcgtttacgtgtttcaccacttcaacagagttgatgacttgcaaaagcccattgaaaacccagaaaacataaactgggagagctatgcaagaggtgctgtttatgccctgcaaaattttggatatgatctcaagaaggtgacttttacatttaataattcaaagtccagaatatcttatgctttaaataatattgacagatgacttcttgtagggtattataggatatatttctggtgtgaaaggacttgacagttcagggctcagttcatctgcagcagtaagctaactgatatgtcatgtatatttgagttaaaattgctggcacaatcatctgtaatatgtagaaaactggaaatatgagtttagtgccaacctagttgtgaatcgaatatgcagtatttcataatcatgacatatacttggctcacatttgacttggagttcaaagcaaatttgtgaagctactaactttgtactagtatcttctaaaccttcagctcaccataacaaggacagaaacttccagttcttactctaggttctcaaaagaattattaatataattgatactttggttagttatgtgatcatcaaatgcctatttctgtatgctcctcatcaggtcgggattgcctatttgatggctttagaaaatgtgaatgatctggttgtatcaccagtggacaacattcagttggacaagtgagtttgtttccttttagtaagcattccatgtggactaacattatgaattcatacatgggatccagaacagttctaatttcaagtatctatgttgaagtccccacaactatctactattgccatgttctaaagcaacaatcaaatattgctacataagatttattagctcattgagtcatggtcactagcagagttcttaatttcatatccctatttgtcaggtccatcgaaaataaatatttgggtcttgaaaatggtattctggatccatcagctattttgctctcacggtatggctatctcaccttcatggactgcaaggtagtactttcccttgtattttctgaaagtctactattttagtaatatattcagtatgacttctgttttttcaaagttttgagactggtatatcattttttctgtaaaaaaggcttttttttattcacacaagttcattttttatgatattgcattgggtccatataattatttcaatccttctcgacaattctttctttgttttgtggtttcattgcgcatagttttagaaaatgtgcacttcaatgctctctgttagcatttatagtgactgagactctctttgcttgagtagaccgccacacattcctacgtctacttctcagtgttgagtaaaagtcagcaatgtcaaggagaactaccattcaagattttgttagccttttcagggctgcaacataacctaccgaagaagagtggatataatacgcgagtttttgagtgcaaagaggctgcccgtgctcttttatggtgagctttgtttgagtataacaaattctgtcaggcaaatatgcatcttgttcagtttgcagattcgtctatgatggatgttggcagattttttgttcagaacatacccaatttcaattatcattttgttgtttgaattcccagtgcttcaggctgtgaagatgcatcaagtattcttcgtaatggtaaactatttatatgtactttttgttatgaccaactctaaaatttaaggttgataccattttgttttcttctaacacagttaacccagccatatacgaggctcagaaggttgtcatttgaattctctctcttaaaatattttcttacttgtaccatattttgaatctgaatacattccatcacactcttttcttgcagtgtatattagaagaaaatctcgctaggagagctgagcactacttctctgagatgaagcgagttgtcaagggtgagcacaaccaaatatttttccgtgcgctcttttagtatttggtccactcatttaaatttctactcgatgcatatgtactttcatgaacacaaatagcaaattacgtaataattagcgattgtactacttgctgtagaccttacatcatgaagaactatatttgcacacttctgctacctctattgtctccatagatgaactgcctttactactaaaatttggcattcgttgtgacttaacttaaagccatatatgcaaaagaaagaggcaagattatgatattctttcttgtgttccaatacgcacgaggaatcaacatattgagttgtcatcttaggaatcaaaatgcttagtagagtacatatattcttcgaacctgcatctttaccaaatttgaactgaaagtgcaatgacatattatagtataacaatatccggatactctgtgttcaggaagagatgcgtgggctcgtggagatcttcgtgagtttggccagctgatctctgcatctggtcgcagctccatactgaactatgaatgcggtatgtcgatcgcacgttagacatctgagataataaccatcactaaaaactcaatggctgcttgctctcacaaattggcagggagcaaggagatgatccagctgtacgagatcctcctcaaggcacccggcgtcctcggcgcgcggttcagcggcgccggcttcagaggctgctgcctcgccgtcgtggagagcggccacgcggaggcggcggcggcgttcgtccgggccgagtacgagaaggcgcagccggagctggtgagcaagatcccgccgggccgccgcgtgctggtctgcgagcccggtgacggcgcccgcgtcatatagctcaccgcccaccgccgttctgccggtctcgccggagcagcctcgcattgccgtgcccggcgcgccgcgaaggcggtggcgtcgtggcgacgccggcgtgcaaggatggacggtggtcgcttgggcctcggcgcggcgagctcccccggtttacgcgtacggagcttggctagttccagttgagacttgagagtgggtgtaatggtaatggtataggtacgaactgtccgtgtgtatacgggtacagactacagagtgccagcttttgtccgtgtatgtgtagaaccaattgatgatcaatttttgataaatatctcagcaataagcagcgacgtagatatgtactattacatgatgactacgattgcattgcaccgatgatgaaaaggcgttatcgttcttgccactaatttgatggtgcacttgttatttttcagtccatatttctttcgcgaggattttttttcagttggtattcccaaacatgttccatggtcagaacgtaataagcagagaaaaaattgatagcgcataagcccaacgtgagatgatagcgcataagcttagcccaccaatgttacaagcaaagggttagaaatctggaatagaggggctgagacatggtagtttggaaacataggaaaagtccaacttatgtttcttaactactccctccgttccccgttacagaatataaagatttttaaggttgaacacatgtattaataaaatagatagaattaaatagaagaatgttgtgattggttgaaaagtggaggtaggtgagaaaattaaatgatggaggattgtgatttattaagaagagaacgttgatgaacaagttgttatattttaggataaaccttgagggctaaaagttgtgaaggagcatgaaactaaggtataacacggaataaaatttgaaaatatctatttttttataaaaaaattacgtttacatacgctagagtgaagaatttgtgaaaatatccctaatccgcgggtcggttccgcgggagcgcaactaaagcacgaggtggcggcgccgagcagacggccgaggcgctcgcgcggaacgaggctgcgggaccagagccgggaacgcggaaccggctcacttccgcagcgctggcgtgcggaaccgtggcaccagcatatttttactacgtgacactgtacccgacactgtttcggtactgttttacacaattccagtctccgttccgcacaatggagacgcggcaccagcgcatgaacagttccaaacagcccttgaacagtatcaaaacggtgtacaaacagtactacgcagtgccgaaatggctggccaccgcggttctgcgttttggcgccacgggaccgtcgcggttccacgttttggagctgcgggaacttgatggtctcgcggtcgtcccacgggatcgtcgctcccgtgttttgaatctgcggaaccgccgtggtcccgcatttttatttcgcgggacgggtatatttttgcacaatcttttcattcatgtatataaatataaattattgaaaaaaataagtatatttgcaaatttttttcgtataacacattccttatattttaaaatcagtacaaatgtagtactaacgaggtaatgatatgactggtagagatttgaccaaccacgtgtactcctaactcctagttggcactaaaaaaagagagaaatgaaaaaaaaaatgagtagagggatggagagctcaccgttgggagcgccggcctgcaatagtgtatttgatgtatcgcaatctatgtactatgtgttaattttatcataaaaccacgctaatgatctaaactcgaaagtcatcgttttgcgatatcttgccttaaatattttgtttcatgataaatttggttataaatttatagttccatgatacactttctcaagttttttttcacaacggttttgtataagttttttgggaatatggaaggaccgcatcttcgtattaagggggaaaaaaactttatttacatctaaaattcaataagtgaagaagacgggatacagaaatacagagatcacttaaaatctattctccggtccattgttgcgacctttcctctgtggattgtaacacaaactctggaacagccgatctggctaaccgctagagctctgccttagcggccattgcccttaccacctccacctaggttttctgctgctgattgaagactctattgtttctctccttccaacgtccatgtgactagaggtttaatataagtatttgtagttttgtaaaatttatttaaaattttacgtctaagttctgctaatttgtgctaaccaaccaatcagcactgctaatcaaatgcagcattattctagagcaatgattgcattaacgaagggagtctaagcaaggcaggttatcagagctgatcgatcggttggttagcacatgttggtgtaaatatgtattgtaccaaggacctatctgtaaagtgttatgctaatagaatagatgaggaaggggtgagctgagtaggctaaccctagaaaaattccccaaattgaataatatggtatcagagcgggtcgccggcgactggggaggttgaaccctagctggcgaggtcgcagcggcgcggcgcagcggcgcgggcgaggagaggttggcgcggcgcgacgacgcacgcgcgaggccagcgtggccgcacgcggcggagacggttggtggccgcggcaggaagcggcgctgtgccggcgcaggacgacagcgctgctaaggcgggacgtggagtgaggaagcgacggtgtcgacggcagggagcaccaacggcgacgacgcgtgcagagggctagctggtgacggcgtgtggcagaggagcaggttgttgctgctgctggtgaggtgttggtgctgctgctacttgagaaggtgaagtgggcgcttggcttgctgttgctgctgtatttgctgctgctgtgctgatttggggaagaaactgagtacttgctgctgtgctgaaaactgagaagtagtgctattgctgctgttctgttttggtgagaaactgaggagtagtgttgttgctcctattagttgatttggct

SEQ ID NO: 15039 - DNA, 2684 bp, Oryza sativa
cagaagaacaagaccaatgagagctctaacaccaccactcactttggtaacttcgccaactacgcccaagtgggcgaaggtactcaggcacaggcacttgcatctacatatagacatcctatagattggatcatagactcaggagcatcaaagcatgtcacaggattgcataatactttcacatcatacaccccttatatccactctaaaactatccaaatcgctgatggtacatccaagcctattcatggtatagggtcggtagagtgcacatcatcaatgaacttgtcttctgttctgcatgttccttcctttccagttaaccttctctcagttagctcggctattgatcaactcaagtgcattgttgtatttgatgagaagtcttgtctgttccaggagaaggggactaggaggaggattgggactggagtcaggcgtgatgggttgtggtacatcaatcatgaggaactgggactagctgcggtggttggagatgttgagaaggagatcagtttgcttcactgtcagttaggacatccatcttttgagattttgagtaagttgtatccagacctctttagtagagtggataagcatagattggtgtgtgatgcttgtgagcttggcaaacatactcgctctacatatgttggaattggtcttcgtaactgtgagcccttcatattaatacattctgatgtttggggaccatgcccagttacttctgtgagtggtttcaagtggtttgtcacctttattgattgtcacactcgtatgacttggatttatatgcttaaacacaaaagtgaggtccttcgttgcttccaagactttcataaattagtgacaactcagtttgatgcaaaagttaagattattcggactgataatggaacagaatatatcaataatgaatttgtgtcatatgtctcagatgaggggattattcaccagactacttgtcctggcacccctcctcaaaatggtgtagctgagagaaagaatcggcatttgctagaagtggcaagatctctgatgttccagatgaatgtaccaaagtatctatggagtgaggctgtgatgacagcagcatatcttatcaatcgcatgccttccagaatacttggtatgaagtctcctgccgaactgttattgggtaagcgagagttcaaggttcctccaaaggtgtttggctgtgtttgttttgtgcgagatcaccgaccttctgttggcaagttagatcctcatgcagtaaagtgtgtgtttgttggctatgcttcgagtcagaaggggtataaatgttgggatcccattgagagaagactgtttgtgagtatggatgtgacatttcgtgagtttgagccctattataaaagtaaaggagatcttgaccaatttcttgaggaattctcgactgtcatggaggttgatagtcgagagggggagagagagagagaggtgacatacatgaaaaaaatgttggtgacaagaatggagaggcaatagtgattggatcaataccatgttctattgatgatgcgagtaaagaagtagtggaagtcattgaagatacacaagatgaggatagagaaatggtccctcatgaagaggatggagaagaaggagaagtagttgttgggacaattccatgtcctatggagggagccgaaagggtgaaacaaaaggatgtgctagtttaccaaaggaggcggtttgatagtcagggggagaaaagaaaagggttagtgcaaagtcaaattgaagagttaccacacccaaaatgtccagtccctgaatcctcccagagtctctctcctccagcctccttggcttctcttgagacaattggtaatacttctccaactcttgaacatgtagaattacctcttgcacaacgtagagagactagatccaatgctggtagacctcctatacgtcttggttttgagcatcttagttctatgcatgacattgcaaactatatcacatattctcatgtttcaccagcatacaaaacatttattgcatcattacagacagtgcctataccaaaggattggaagtgtgcaaagcaggatccaaagtggaaagatgcaatgaaagaagagttgaatgaccttgtgaagaataagacttgggaacttgtaaaacttccaccagaaaaaagggcagtgggatgtaagtgggtctttacagtgaagcaaacccctgaagggaaggtggataggtataaagcaaggttagttgcaaaaggctacagtcaaacatatggaattgactatgatgagacatttgcaccggtggcaaaaatgggtacagtgagagctttggtatcttgtgcggtgaactttgggtggccccttcatcagcttgatgtgaaaaatgcatttctccatggtgatttacatgaggaggtctacatggagatccctccaggatttgggaatagctagacagttggaaaagtatgtaaactcaagaaatccttgtatgggttgacactacaccggactaggtcatctctgacgggcccaaaccctcacctttgacgggtttggtcttggtcagtgattagtggtcactgatgacaaaatcacctgtgacggatgaaacacccgtcacagataacccatctctgaccggtgtataagtcatctctgacgggttaaaacttgtcaccc

SEQ ID NO: 15040 - DNA, 12004 bp, Oryza sativa
acgtcgattttaatagttacagtctgcatgtaatctatagacatcctcgtacgtaaaaaatcgtgttttctgcagcagtggtacgtactatgaaccgatcgaaaccaccgccatgtacgtacagcacgcgcgcgccacatgcatgcatgcccgccccggtcgccgtcgcccgtcgctgccggcgaaagaaagaaaccgtccgtgacaaacccaacccacgaggcggctaattctaccgatcgatcgaggggacgaccgaccaggcgaccagcagctagcagcagaggaaaacgatgcgagacgaccgtgcgaggctagctagctactagctccaacgaaagcggggtctctctagctgcgttcgcgcgcggtggccgcgccaccgctttcacgtacgtacgctccaccggtcgacggccagtcgcgtcgtgcacacgcgcgcgcgtgcgcgctttcatacgccatatatggatggaattttcggtggttggccggagcgtatgcacgtaccggcaatccacgcgtacgagcaacagaaagagagataaaatgtccagccgtcggagtcgaccccgactgatgctagcggtactcgtttttcgcgcgcgcgtgtgtggttgttgttggatttacggaaacagattctctacagtaaatataaaaggggaactatgtgaattgtgttttgtgtcttgtgcgctactgtgaaatgcaaaaaatcactatacaatacagtagatatactataccagggtccactataaattaatgtccacagctgatcggatggttgagattctcgacttaataccctatagccctctctgcactagatagtgtctacgtacgggttctctaatctctatcctgactagctataccgttggttggttatccctttcccgtactttgtgatcttctcatcattagacccatttgaatcgtgggaaaaaaacagaacagaaaaaaaatacagaattttgatgggaatacaagtgtaaaacagaaaaaaaaacacaataatagccgtttgattggaccatacgaaaaacacaggaattgggaaagatagactcaaagaaaattttaagaggttgaaactcttactaagttttttaaaaaatctatatgtaatgagccatttcataggaatttcatataatttgaaaagtctcaatcctttgaaaatcatttgattcaaagggactctaaatcctattgttactttgagaacttgaacaaagcaaaacactatttatgttttttaatatatgatgcggttaaattttatatacacatttaaccatttgtaatataaaaaataattatcatttattttattgtgagttgtcttatcactaagtttttaaaagtataatttatatcttttacatatttctatataatatttttaaataagtcgaatggtcaaatgtgtataaaaaaatcaataggaacatctattaaaaagcatagggagtaattagtttaagtaaaagcctaaggcaagaatgaataggatccaatcatacagaccaagtcgatctgttaactctcggccgtaggtcttaaaattttttaaaaagataaaatcctcaaaaacataggaaatttgtaggctaggttaaccacaaagctctgagtaccaagtatacatttttttttcaagacaatgttcagtgttctttgtctcgctttctaaggactaagaatattatggataatctttttggcggactggcatagagaattaggaatatttgagcacatattttccaatagcacaagtctttggaatatatgagcaaatatcatttatattctatttctttctgaaatgaattcttagggtttccacaatttccatgttttggatgtgcttttgtagctcttcaggaaaagaaatgcacatcattaaagatgatgagaggtctaaattaaaagatatctaacagactgatcgaatatcatcaaagaggaaatttctatataggaagaacatttttcaaaaagaaaatcttaatctttaggagttttaaaaatatgcatgccataatctagtagttagtagctaaaaaactgggccttagtttctatccatatattttaggttcaatcattagtacacaaattttaaatattgactttgcagaaaataaaaatgtcttatagctcagaacggagagagtaacgaaatactttatcattttttcttatttactctcttcgttctatattaattattatataaactttttagtcaagatcatgaaaaccttaacttccctatatttcacttaatatgactatgtgatggaaaaaatagaaacaagcatacttcaactttctcgcatgcataagaaacgagcatttgtaactgcatgcatgcatgtagactaaatttacatgcctagatacaataatgccacacttaaatgaaaggatgattatatatgataatcagtttagaaattctggttttgattatataataatcaatgtagaattgagggagtattactctattcgaaattggatgcgatcaaatggttagtggtacgtaggacgcgtggcctattttgttgctcagccatagctcccagcctcccacgtccgcacgactatatatagcgcggcagcacgatcgatcgccggagctcatccacaagctcgccgagccagccgttgcaccggccgcgccggagcgagcacacggcggccgcgtgcgtgctccaatatgcccacgtcgcggcgcgcgctcgccggcggcgctttgtccatgcacgtcgcctacttcctcgccatctcctgcctcggctacggcctcctcggggtgctcaaggtgcgggagcccggcgccgcgccgcgccgcatcgaccgcttcttcaccgccgtgtcggccgccacggtgtcgagcatgtccaccgtcgagatggaggtgttctccaacggccagctcgtggtgctcaccgtcctgatgctcctcggcggcgaggtgttcgtctcgctcgtggggctcgcgtccaagtggtccaagctgcggagcgacgccatggacagatcccggcgcgtcgagagccacggcgacgtcgcgctcgccgacatcgacggcggcgacgtcgagaacccgacgtcgtcgggagaggaggcggcgagccgacgccgcccgatggacgcggacacgctgcggcacaatgcggtgcgcgcgctgttctacatcgtgctcgccatcttcgcggtggtgcacgtcgtcggcgccgtggccgtcgcggcgtacgtgctcgcgtcgccgggcgcgaggcggacgctgggggacaagtcgctgaacacgtggacgttcgcggtgttcacgacggtgtcgacgttctccaactgcgggttcatgccgacgaacgagaacatggtggtgttcaagcgggacgcgccgctgcagctgctgctggtgccgcaggtgctggcggggaacacgctgttcgcgccgctgctggcggcgtgcgtgtgggcggcggcggcggcgacgcggcgggaggagctcgtggagatggcgagggaggggggcagggcggcggcggccgggtacgcgcacctgatgccggcgcggcggtgctggatgctggcggcgacggtggcggcgttcgtcgccgtgctgatggcgctggtgtgcggcatggagtggggcggggcgctgcaggggatgagcccgtgggagaaggtggtgaacgcgctgttcctcgccgtgaacgcccggcacaccggcgagtccaccgtcgacctctccatcctcgcgccggccatcctcgtgctcttcgtcctcatgatgtgagtgctctctgtttctctctctgacctaagctctctcagggtctcagctcttcaacctagctagtactccatctgtctcataagttttcgcttttactatttgaccacttgtcttattcaaaaaattttgtaattatttttttttgacttactttattatctaaagtattttaagcataacttttcgttttttatatttgcacaaatttttttgaataaaacgagtggtcaaacagtgcaagcaaaaactcaaaatcccttatattataggacggaggaagtacttgtttccaagcttcctgcattgtacactataatattctagaaccatagtcttttattactactatcctagcccaaaaatataataacatagaattagactaaatacattttaatactacgaatctggataaagtagtatagatttgtactacttaaatatgtcctgtcctttctatgctgttatattgtggacaaagggagtagctagtaggtacgcaaaccatttacatcatcacattaaaatgggaactagttttaccatgcatgttaactttactctccggacctctagaacatatgttttccttttcattagttctcctaccaattttgacattgttagtagcatgttttgcgattaaatcacaaactataaatacatagaaatgtttcgttgcaacatgcatatatgtggaggtgagccatgcatgcgacccataacaatgacacaatgccaatacctttgtcccaaagtgtattaggttgtgttcgttaccggtggttgaaagcaaatttctcatacatgaaaaatggaacggtctaatagcacttggttaattcggtattagctttaaaaacttaaaaattagattaattaatatgctcttttaaagtatttttttataaaaaccatactatttaacaatttaagaaacgtgcgtgcgaaaaacgtaagagtgttgcaaagaacgcaaccttattgcattgccgagtgtagtggcacttggcatcgatgtccttgagtgtaaaatgtcaggatctctcaggtggaaactgcaaaaccacttgaattattgagtaaaatatcggatggtcatatcataatgacaaattaaattacaagtactaatagtgaacgagtgatgataggagatgtaacggccggtggcaagtgggttctcttctgcaatggaatcttcttcggttcttcccttctccgtacgtaatagtcacggacaaaagcacatcaaaacactataaactcgtcaataattcttcgtatcctaattaatttgctcatcggccacagcaagaggacacatgtttcttttctgtggtaggacagtcccaacccataacactagacatggtttccataaactctacatcatcaagaagtactagacactactcttccaatgcaaacaccactatttcatacttcaatttaatgctacttatctcacatgatgtcttggatgttgtgtagaaaccatgtctctctttcctcatttattcacttgcatattattttttgtcctaagtagcaacttatttaatgctatggacatcatcctaattattgggttgagaatggccttaggtaggtagatgcatgtgatggagagtagtttcaaacgtcaaaacactgtcccatttcccagttcgtgaccataggtaggagttgaccgtgcgttgaccctttctcctagatttttgacagatttttttttatttttgccaaagaagaaaaggatagctctcctcctagcttcacagaaaccacaacgcagcacaccacttcaacttgcaagaacaccacaatcaatttgctgaaaggtaggagtattaatattccaagtctccattcaaaagcctgcatgcatcacatgccacaccttctgtcaacctgagaatatgctctccgcgttctcagcaaatctggtcacctgggaggttgatgactattacttctaattttgttcatgtcaaaatgggaggcgcatagttgctagaatttgttccaatctttggttcttccagatgattatggctcaattttcacatgcaattccataaaattcgccatctttccccagttgatgcatggagtacaaaatagtggagcacagtagtcgtcattcgtcaacttttgcagcctggtttaggaactgggatgtgtgcctctgaaaatgacctgcatggctaaagcagggtgatatctcctgccgattgtcgtagcgcgtgcaaaggaatttcttcaccggccagcagttgttcccatattgttctctcaaggccatatgcttgtgaatccaagcttccagtcagttgagccattgttttcatcttattgtcgcatcatttacagagaatataaccaagcaccagaatgttcttgcacgtcacctgaaagatcaaaccttagacaagcagagctgcaactccttccctgaattatttctcaataatgatctgcttttgaacatccgaagatgataatccacccaagggtgactttctgatcgcatttcgttaagcagctgcatcgacatgcatgcattttcaatgcccaaaataagcaactaatcactgaaactttaattggaaagattgctgcaaattaactgatgtctgtttaaactcgtaccgtttgttgtctcatattctgcttcatcttgcctccaggtatctacctccgtacacgacgtggttcccatttgaagagaattccactactaaggatagtaatgcagagaaccagggaatcagactgctcgagagtacacttttgtcacaactctcctacctgaccatctttgtcattgccatctgcatcaccgagagaagaaagctcaaagaagaccccctcaacttcagtgtgctaagcattgttgtcgaagttgtcaggcaagtcagactaaatggtttcttacctgagaaaaaaaatgcagaccaagtaaattaacaatttatctgatgaaaacagcaaaacacaaagtaacacttgtcaggtatttctgaatcttaataatacacaatgaaaatagtaatgttttctttcgtggaatctgacggatctgcccacatttgcagtgcatatggaaatgtggggttctcaatgggctacagttgcagtagacagatcaatccagaccatctctgcacagataaatggactggtttcgtagggagatggagcgactctggcaaactgatactcatttttgtgatgttctttgggaggctcaagaagttcagcatgaaaggaggcaaagcctggaaacttagttagatcttagatgcagtaccagctgaacattgcaggtccctgagggtaggaaaaaagtataaagatgtactctttctcttccgtttgtttgtatattcattttcacatagacaggaaccttccactgtcatccttgcacaaagctcaccctccactccaagtgttggcagtttcagatcaggtgaatgaaagttcatcacaagaaatcaacataggctaattaacctgattcacttcacatagagatgcttctgtcactggctccctgcaatgaccatttattgcatccatgtaatgctagtaaaaggccggatgtcattgtgatggctgcaatacttaaatacccacatgttaaaagatatgtagatgtctatcaagtggtgatcagttcatacagtacgtccagaagtactttcttctgaagcaagggcatctagaagaacctgagagctgagatcacaaagattgaaaaaacactagattgcttatcctagtcactacacttttctgatagaaattaaaaaggacacacgtgcaaccaagggtgcatcagtgaaaaaaagagagaataaaagggaaaagggaaagaaaatctccactacacattgtgcattctggtacacttgttcccactacagaagatgttgattatatagcaataaagcaaacaatctagtatttgtggaatctgaaagataaacctcagctacatacaaaaataaaacgaggtaacaaattgtaatctgttataataaatatataaatgttcaattaagtgaatgcaaaggaaaaccaaaattagccataactttgataccagaatcttcaacaatggactgaacagcaatatgcagtagtaaattcaaaataatggttactataactaaatttcagtatcatgatacacaggtgaattctattaggaaaacagggacaaatttgtagtccaaaactagttgcacatgcaacattactgatttcagctaaagaagaacacaactaattttttacaataccgtatgataataatagattaaaaaagagtgaattattgaggcagagcaggtttacgtgtgaagacaaacagctaatctaaattgaggatattcttatgactcaaaaaatgtgaatgaaggattctaattgctgacaatcatttcactcaagaacatatagtagttaggcattataatattctaagcacatgcttgtgcatacaccaatcatgcctgggttggggccctgtacacaccatcagcatcatgattctgcaaaatgggcacatctgtcttacaccatcctacatattaagatccagaacttggttgcagtgagcaatggtggcaaagacagaatcattgaaacctaagaaacaccttccagtagccaactccagcatactgaacactatgcccacaaacctccaatgatgcatccattcagttcaatcctagttacatcacagcatctgccattagccatgaaaatcccacagcccaagttccaagtggttagggacattacagagaaagttaagcacctccatgtgtttatctccatgaggcttcgttccctctccaaatgtgcagtgtgtttcttcagacgctgtttctggtttttcatgttccaaagcaatccattaatagttcaacttgtgtacttcatctcaatatcctttgttggtttccttgctctgaagatcctcaagccacgacacaagccaactccaagggacctggatttgatgttcacttctgtgtccacagcagcagtctcaagcatggcaacagtagagatggaagacttttctaaccagcaactctgggtgttaatacttctgatgatattgggaggagaagtatccatttcaatgctggcgctgcacttcaacaatgctgagaccaacacaaacgaagtcctcccaaaaagatcaccttcgacgagaaggaatattgaatcctttgatgctgtaaatgatagcaatcaaaatagttcacaaggcttccaatcagaagcaaccatatcacttaactgggtacagggaagcagaaccatgaaacagaagtgccgcaatatgttggctcatatagtgacaggctacttcatagcagctgttgtttgcagctccttagtcattattatttttgctcagattgactcagatacaagacaactcctgaagagtaaagatatcaaaatatggacgttttccatcttcacagcagtatcctcatttgcaaactgcggcttcaccccggtaaatgataacatggcaatattcagaaagaaatccagtctataacttctggttaccccacaggttctagcaggcaacactatattatcgccactattgaggttaagcatatggatcttgaggaaggttagcagaagagaagaatatgcctacatccttcagcatccagaggatactggctacaggtatttgcaattgcagaagaattcagtcaacatggttctcactgttggggggctagttctgctgcaagtgatgtttctttcctattttgagtggaactcaagtgccttaaatggaatgaactgatttgaaaagttggtttgctcattgttccagagtgtgaaactgtgaatacaaggcatgctggtgaagctgtcattgagtccaatactagttctatttgcacttgtcatgtaagtattccctataaacatttcataatatttattattttgaagcatttatcaggactttcagaattttatcataaatatggcacaatcaccatcagtaactgcaaaggataaattaagcacataatttcagaacgaaacaacataaacaattatgagcttaaaatcttcagatattttttggttgaaattgcttagttatcttaataaaggaacacaaaactagttcacttgttgaaggccagccttatgttctcgcaagagtttcagtttaaatgaagttctagataataacatggaagtatgaacactgtctcggtgagaaacatacttgtttactacagctaagtcagcaatttgtgtactcgaaaaagaaaaaaaagcagataaatgcatagaacaaaatcaaaacaaccataaaatcctgcactatgacagaggtcacaacatggcggagaagaacagattccacaatccagatagtcaattcatcaaaaaaatagaaaagcatgctagtacccacgtaaacttcaatgacaacatgccattaacttatttgcaggtactatccttctgataattcagctctccctatcaatgctgataacaagcctttgacagaacgaggaagaaattcaaatgatcaggccatatggaagaattttatcatttcaaagtctgcttgcttagcaatattcacaattatagcatgcataacagaaaggaagtcaatatctactgatccactaaatttcaacattttcagcatagcattcaaaattatcaggtaagttcacatccttatttctaggaaaaccctcaactatggcctaggaaataggaatgatttccatcccccaactttgaaaccattactaccctcaacaatggccttccaaattaactatgtgcatggaaaagaaatatgaagaaggtcagcataaaagaaaattatgtttgcaccttccaagcaatgatgcaaaattttctttcacagtgcatacgccaatgtgggatactcactaggctatagctgcgagaggttgctgaaacctgatgctacctgcaaagctacttcatatggttcgtcggcaagtggaccgacgaaggtaagctgatgataattttagtgatgttcctggggaggtttaaaaagttcaccctcacaggaggaaaatcttgaacgtccatgtaattaaacatcactacatcagtagggagtaaactgtacgatcacgagcattataagcaaaaaagtttgaaggtgtaaactgtaaatcaatcagttgatatcatcatatcaccctaagcatggggaaacgaaattcgtctcgatatccaattcctcggtaggaattcaatcgatattacatgaatgcgatgcgagagcctcgaatgggctaagcgagaatccattccgtgatcagttcaccgaggggaaaagtacgaggaacgcgtatcgtatcgcattacgcattgggatttgatttcgctagccattagcacgagagcaaaaacacgggcacccagatcagggaaatgcagagcatggaaagaggggaactaccaggagaagcgaggttgcagaggtggccggcggcgaggccgccacggcagggcattgattgggcttgtccccgtcctcggatgcgcggcgaggcgcggcgcggcgaggcgggcagagggagacatcgtcggcggcgggaaaccgagctcccacgcgccgcgacaggatcgcgtccagggcgacgggcaccgcgcgcgccggcggcgggaagaacgccggcgcctcccgccgccgtcgtcggctgttgcggcggactgctcgccatcgtcgggcttccccaacgactgggcctaaaaaatgggcctaaagagctaatgtttggtcctcaagtgggcccaataaactgtgggctatatatcagcccaacacatttagggccctcattttttttcgccgataaatgctaacgatatgttgactgaaaatctacctccaaatcttgcagattttggtccaccggatgaactttgcgatttgtgcttcaggccttctcctccaactccggcgactttcttctccggcgccagcgataccctagactctggcaaaggaccctacgggttaggatcccgggttggggtgggggttggagggggaggggcaagaggggggagctcgccggctttagagggatggctgtggga

SEQ ID NO: 15041 - DNA, 5745 bp, Oryza sativa
acgagagagaggggaaaagggaggagaggggatcctcaccggcgagcacggcggccggcgcgaaggatgaaggcggcggcgatgacccaacgagcggaggggcagacgggcggcgattgcacctacggaggaaaatggagaggaattaggggttgggaggaagcccacggcagctagcgtggccggccggagatgggaagggcggcgaaattcaccggcgcacggagagagaggcgttccggcggcaggattggatggggatgcggcggccgaggtagctttggcggcggagaagctaacggcggcggcggattggctcggcggcggcgctagaggagatcggcgcgggcgcggtagaaggcatgcgagaacgcggcaaaaaagggaaaagggagagtgggacgcggggaagctttataggggctcgggaggggcggtcacggccgggaagccccccgatttggccggcgacgtgggggagggagagagagagagagaaagaaagagagagagagagagacggattcaaaaccgaatcccgccctctcgggccgcgcacgcggggcgggaaggcgtggggaagggagcggcgacgtgggcacggtgacgtggggcgagtggacgaggtggggcgccggcggtgcgggcggttggagctccggctccaacggtcggaggtaggagacgaccgacaggtgggccccacctgtcggcgcccgaaggagagagggagggagggaggactttggggaggggaggagaagcgggccggcgcgggaaggaatgggccgacggcccaagaaaaggaaaaaggaggaaaaagaaaagagaaaagggaaaaaggattttcccagggggatttaatattgcttgtgctcaattttaattggttaaaattatttccaaggctctgaaaattccactaaaaatcctgttagcatattttgacatgtagaacccaagaaaaattccacatgtccgctccgattattatttgcatttattaattaaggattcaactctaggttaattcaacaatttctttaggcgatttatttaacaaattttaaagctaaaaaggggaacttcagggcgtgacagctaaccacaagcacatgtcactattacaaaacatcaaatagatgccaacactatagatgtcggaagtgataaaactggcacctgtagtgtctttctcacccactcacccttgagcctgccaaaatgctatagtttttaatatattgcatgtgtagagagaagaaaaacatgctacagtttttaatatattgcatgtgtatgatagataggtcaagtattaatggtataatacatatctatacgaaactatgtacatataggctattaaattagctgtagatttttttagagctagtggttgactactcctattcatcccaaaatataaaggatttttattggattttacacattctaacttcttcagactcgtggaatagaatgttatcatattcacttaaaatactttatattttgagacataaaatatagttttaaaacttactctgagttgctgctatctatgtcctaaaatcattgtaattctaagttatttagtataactaaggtttgaggagaaaaactacgatgcacctcgttatgttgtatactcgttccgtcccaaaaaaaagacaaccttgtaatatgatgggatatatctatccagattcgttgtactaagatgtattacatcctaatacgatgttggctttttttttacggaggaaataggtaagagtaggagggtggttaagagtaaaatgtgaaaaaaaattgaatgagaagtgattgatagaacaattagtaatatatggtaacaattattttttagataatttttttggagaaaaggcgcaaagcgcccaactttttactagaaatcatatgagttcatacaacaataaacaaaataaacgcgaaaaggctggggattttccagcttatatgaggcgcaaacatgcaacacgcatagcacttagacagcgcaaagtctacacacaattaacaagtctggcaccgcggacaattctgaaggattaagacaatttttttaggctgtgtttagattggcccaaagtttagaatttggttgaaattagagacgatgtgactgaaaagttgtgtgtgtatgaaatgtttgatgtgatggaaagttggaagtttgaaaaaaaaaactttgcaactaaacacacccttagataaattttaattctaaaaatataattactatgagatcggatgtgctgtattttaggacggaaaaccgaggcggctacactggaaggccgctgaaacctcggctggtttttgcggtcccctcgcgcggtccagccgctgctcggcgttgctccgacctacctgagctccgaacccagtccaagccgggttgtacgggaaccaccgacactttctctgtcaaaactagctggaactattacatggcgctcacaccaacacaatgacaggtagcgacccgtgatttgggtggtggtgatcgcaccaacccaagtgtactccaccgagaaccagctccgtaaatgggacaaaacccaaccccactcactaaggctcatgagtggaatcactccaaaggtggggttaattgcatttggtcttgtggatatgcacgtgatttgtccctactgtttactaccactctttctgatctatgtagataagaccagaaacaactttgtaacagaattatcctatctaggaatacatttatatcgctctcttttatattataggtcatgctttaattttttttatagctaaactttttatagtttgattgaatttataaaaaaaaaatgtaacaacattttcaacacaaaacatacatattatcaaaataattaaaactactaatttgatattgtagatattattaaaatttcctataaatttaattaaacttgaaaaaatcataaaaaaatcaaagagatatgtaatataaagtagttaatacactagtaagagacatgagaaaaaactacgttcaccatatacaatatgcctcaaatcaaaatataaagattacaacttagtgtagtaccggagtcatggatgcatgaccctattcaacaggatacaaatttttaatatccacgaatataagttcggtgttacgtgtgcagtggtgtagtggtgcgcagtatccgcatatgcgtttgctgtgtgcccgcgaaaaaaaacagagtactgtttaccctgacacgtacaaagcctgtaaacaaacgtgccacgtcatatcgtgcggcgcggaggaataaatacaggaggtgcaagcggcacgctggggcagaaggcaggcaaaaggcacactcattcgcgggccgcacgtgcagcggcggcgcggcgcgggtggatcgccgacggcgagaggagcaatggtggcgcccggcggcggaggaggaggggcggcgtcgtggccgtcggagggggaggtaaggtgccccgccccagtggcattggtcgctctcgtagagcggtgcgggtgttccgatcccgcgcggccccgtagatttttcgcgtttctgcttcagtgctttgtttgatttggggggcgaatgcttgcggggctggggatcgcgacttctccggcgaaatattgctgcgccggcggcagcaccggcggggcggtgaccccccgtggccatcgatcgatggcggcgtcacagtgtagtagaattacctgctttcccactgcttggttggtggtcaatctacatctaattaccatgtttgcaaaaacattcaaatatgcacctcttttattattattgttgttgttgttgttgttgttgttatttggaaaggaatcgattttagtttttcagtttggtagagtggtggtgcataataaaagagaggaaagtatggattggcagtacacgtgagatggtaatgttagctcgaattgatgtggcaaccatggtccatggatgctagcacttattgagaattgatgtgaattttgggataagataatgtggtacctttgcttgtgctttctgatgatgtgtcgaagagggaaggggtggatgtgcactatgcttttggactatgtagtgatgtggatggcttcaggatacgatacaatgtgctgtagttttcaaacagctgtatttttttttgacaagtcatctgctcccaactaaatctgaatcttttctggtgttccagcagcatgagaccatgtttagcccaatgagtcttgaagatagttctagccaaggagcaatgagtttttctcctatcagctcgagttttgatataaccaatctgacatgcggaatttaaattgctctagtgaaagttgcatggccttgaatatccttttattttcttttaactacattgttgaacttacacgttactatacatctatgataggagtagcttagagtactcaactaggttcatcctgttatgtatggtcatcttatccttctcaattgtttctgatgatgcagcttgatgttgttcgagcaaaggtagtggagattagtggaaggggtgcaggagaggtcagggtggttgcttgcccctacaggatttgccctctgggggctcacatcgatcatcaggtaactttgtagatattatgtccttgatgttttcatttttcagaagagtgacccactgttaagactgttgtataaactgtatgtttgcaaattattttaatgtgttcttatattaaatttgtatatgtgtatagtcaggcagcaatgtaccataaatggcatgtgctttaatgtcatatcgtcgccgcataaatgtgacataattggactgttctatacatgtgtggaatgagttgatgagaccttgatgattttcagggggagtgttaagtacttgacaataaacctagctataagaattttcctctgcaaatgttggaaatatattagcactagcatagtggtggtgatttttcctacaaatagaataaagctcccacttgggtttgtatttggagagtctttggattaagtctgtaaacctgagtttatttgagttacaaagcagatccatcaatattggtggaattcaatttctctttatttctgagcagcacacgtagtaattctttaaaagggtggaagttgcataaactgctaatttacttagtttcgtgggaataaattttcaggtcataacatattaaatcagtcagcagtaagagaaaagttctgtatattggatcatcaccatctctaactgactagaatcaacacaaacatccttgcagtaactattttttttaccagttcttaacctgttgttggcggtatctaccttaggttatactctacctaaggtaatgaattagttttatcatttcaaaaattgctggataccctctaatgttaaataattcacttcaaggagagctatattagttgggtatttatggaaatgtgttcccatgaacaccttattgttacaaatatcatgggttgacttcaattcaaaagaacctctgcaagggatatggtggttggctaacttctattctgttctgcattacggcagggtggaactgtcacagctatgaccattaattatggtgtacttctcggttttgtggcctctgatgatgccgaggtgagttattgtgcttaaacacttttatctgtatgctcccctgaaattccaagttaagttctttgtgccaaaataacataccat

SEQ ID NO: 15042 - DNA, 706 bp, Oryza sativa
cttgtgggggtcgtccgaagggcccagagaaccgatagcaattcttctggccatttgcctttctttagtgcttctaggatcttgccatttgtacgttcggccgccccatttgactgcgggtgggcgaccgacacgaacctgatttccaggttaagccctttgaacatttctctgaacttatcagagtcaaactgcttgccgttgtcactaatgaactcttttggcactccgaaacggcaaacgatgtttttccatacaaacttctgtactgctgccgaagtgattgccccaaggggtcggcttcgatccatcgagagaaatattccacagctacaattgcgaatttatacccgtttcgtgccaccgggaacggcccgatgatgtccagtccccatctggcgaagggccatattggcgcaatgggctgcagatcatactggggcgtggcttggcttcggccatggcgctggcaactttcgcattcttgatttactcaacacagactttcaacacagtgggccaatagactccttgtctaaatactttggaggccacttttcttgcagcctggtgcgcgccacatagcccctggtgtatctcctttgccatttctttgccttcggcaaaagagatgcaacgaagtaagggttgaagtaccccggagcggtaaagttgacccgagaccatcttatacttcgtggctctg

SEQ ID NO: 15043 - DNA, 12376 bp, Oryza sativa
cttacattgtgaaacggaggaagtaatatttttttactgtgttttaagggtatattgataagcgcatgtaatattgtgtgtgtttgtgcatattaggtgttagaaattaaatgtttgagatgagcgtagctcaacagattagatttcttatgatttagttgattagattttttatggtggaactaacccattcgagtccaagtaagatttgatacgggtactcgcatttattttttttcagtggtaagcaacgtagtgacttatttgttaatctcaagatttgctagcccagttttttaaatgtgctcataaggatgaggtttacatgtgtgtttttatagggtgagagggtgcgtacgttatgaatctcaacattttcattgtttttctcaaaaggaaaacataactggtgagacatatcaacagggagcaattaaaacacccactcatcggggatttagatcctctaatgtaacttttctctgacgtgatggttaacatatgaggccgagaatgatagggcctactgtacacgttagttacggtaatactaacgttagatatatctgcttcctccactggcacgatgaataccaggaaacccggagttatacattaatgggttgcagtcatggccttgcctgtcggctgtcgtctccaatctccatgcatgtcgacggacggaccggccgtgcatgacgcatcgacgacaccgcctgccgatctgcctgcagcctgctcgatccatccatcgatgatccaacagcatcacgtccccaccacaaggcaggcactgccgcaattgcatccctgcaacacatgcatgcatcggatcacttgccgtggattcatatcgcagccgtgacggcgtacggtgccgttgccgtcgtctcgtacaactgtcaagccctttttctaacggcttattagaaaatagaaataaatttatagataaaacttttatatatgtgttcttggtgacttaaaagtcaatgctgaaaaagaagttacgttgaaaatatctcaaaatcaatattaaaattaagtttgaaaatttaaaatttagctttttctttgattgattaggccatccgatgaaagcctcagtgagcttgcatagctgcagctgcaagctgatctctccttcatatcgatccacactgcgtcttcgtcgtcatctctatgatcaccatgaggggagctagctgatcgatcagttaatgcaaccctgttgtatatttgctcatgctggtgctagctgtagtagctagctagattaatttgccctttgatattagcttcatgcctgattaatttttccccctttcccttataacctcctatgattgtgtcagttggtcgcagttgtaaaagttttttcttctgttaaattgttaatatatacgagcatgtaaggttttcgcgcgttggagaaaaaaaaaatactatgctgcccattctgacgaactgtttctctgcctgcttatttctggacacgagcatcagctacgggccagccagacaagacagcaaaacgtgaagatcctaaaaaccttgatgcatatatagatctctgtcatacggatgattggacagtatggccactatgtctgcatccatacatgagtgtgctatgatcatgatcatgatcagtatacgtaatattcagtatagcttggatcggagtattaagcaattcatcaaacctcagaattctaatgacagcaggagtgatctgtgatcttaatccatatatatctcctcctctgcatgcagccatcgtatcaacagcgctgacgcgtcattatctaattgcatgtgctacctgttcatcagcatttgacaggagcggttagctagctgggcatccttacgacagcaagatcgcacaaaatgtggccaacgatctggtcggatgaatggtatcagcacatttagtttttctttaagactctatcagcacatttggtttatgtttgcacttcttttcgaccatgaaaaagcattttgtcatagagctaatcttgcagagcatatatatagtactgacgaaagatatcgactattgtatatgtcgttataattagtacctctgccattttcagaaatggagcagctatctaacgtttgccaggcataatctgaaaccttgatatcttctcacatgactgttagtttgctgctataattaagccctaattggtcctacacacacatgaaacatcagctaatgcatgaatatcagattaagtgtcatgtgcccctgtatctttcttctgtaaaaccatgtgtgtatatctccctgaatttctcttcagaatgcagaaactgaggcacaaacacatccgacacaattagaaagaaaacatgagcaaaaaaattcctcgtatctcatcacatgcagctgaataacgaccattagttgcataaggttctcatgtttctgtgttattggcagttgcaaacacccccacatgtacaaggtttcctgtaaccgtggtatccatgcttagatcagaacaaacaatgctgagtggccttaaaatcaaggtgccttctcacatggcgctgtgcatggcaagagcattttggttcatgcttccatgttcatgaaacatgaaaacatgtccaacatattgcttcaggcttattaattactgttatctaaccacaggaggactgagcatggtcagttactttgcaccactgttcaagttcagaagagttgatctttctaatactacaagactttgtgcaaggagttaaggagagatgattgcattgtctttcttccaaaaaaaaaaaggtgtgatgatcgcattgccctgtaacttgatcccaaaagcttttcctgcttcaaagaaaaatcattatctaaagaaaaaggcagctcaaagaaaactgctggaacatgcatgcataaaggtcttctcttcttaattatgtcttagactttatgttctactagtaattatacagttctcgatcctgacttcaggacatcaggtcaaacactgatactatgtgagtttagttgctagaatccagaaaaaaaatgacgcatgagagcctttaacactgttgcttaagccatttgatgataagatcaactggaagattgaatttcactacagggtgcatacttccagagcaaaaacaccattgtacaccgcctgatctggatataaatttgaacataaattctttttttttctgccaaattatattaagatagtgagaagtgtttgaagattaaaaaagtgcgtttgtcgtgttacaacttataaagctacaatccggaaaactcaattcatccatttttttacatgttacttaaaaagtcatcaaaaattttaaaaaatttagtaggatagatcaatatataatatgtcacttcataaacatgcaaattcaactacaatccatcttaactaggtgatgatttgaacataaattcgttgtggcttctatcgttaggtgatgatttgaacataaattcgttgtggcttctatcgttatggagctcaattccggtaagaaagtaaagctgtccaaaaaaaaaatcaagctcgatttgagtttagctaaagacccaaagcctaagccaaagcttacgagttttaccggggcgagctcgaggtcctaccaaatcttactgtgtatagcttttattatttattcatcttgttaacttgataagctaatagataaatatatattagcacctatctacacaataaattagcatgtattggcatcatatatttatcttagtcatttttctactttttattagtgtgattacatggaaaatacttatacttataaagaggttgtcattaaaatattcgttgtactacttatatggacgagcttgcttaaaaagctcaaaggtgaaataggcttagctcaagcttgagtctaggcagagagctgacagccctataagaaaaggagagcttctgaccttctgtaattctatgaagtatggaccatttgtacgccaaagccaacttgccgtgaaatctcccattcttcttgtgcatgcgcactcccattcttctcatccaatttataatgctgtagcaagaaatctgtctgcctgtgcatataagataagataatttcaatgacaacaaagcagtcttcttctgtcacaagtcattttttcctttgttagcaactaccagtagttcgtgatgcaatgtgctgcctgataaatgcactgcaatgatctacgtacccaatgcaattatgcattgaaatgcagtcgttgggacaaaggccctgctcaaggagctggagatttagagaagcataccaagagagagtatatatatatataaggtttctcatcttatagctgctactagttcattattattttttgattatgtagctattgattgtcagaatttgagtaaaaatttgaactattattcaggaagaaactatagtcgctagaaacttctcaaagaggaactgggtatagagtattagctagcatctgaaggtacgctacgtctgtccttgcaaggtacttgggcaatggttggctggcaactccatcaatggccataaaactattgggctagccaacctacggggatgctccattacttggttgacacttcgcaacgtgcagagcacatgctactcggccgttcgctcacctttcacatggatcatggacggatggatggatggatggatggctcttggtggctcttgcaggctgcagatcgagaggctcctcatagggatcggcaagaaccctgaaaaacaagctcagatgttcagtggttgacgctgagttcgcattccaatgctcattattggacctaaagctctttatactccatccgttccctaattttgtaggattcaaattttgtacgcaatataggcctggtttagttctaaattttttcttcaaacttctaacttttccatcacatcaaaactttcctacacacacaaactttcaacttttctgtcacatcgttccaattttgaaatgaactaaacatagccataagcatttctaggacaccgatttcaaagcacgagaatccaaccattttcagccaatcggatgcttaggaggggaattcaaacaattcaaaattcaaaatttgaattttaatcaatgaggtaactcaaaggaaatattttccattattcctcatctttattaaacaacctataaatgcttatatttaggaacggaggagtacaaccctctccgaaactggacgtggaacgtggtgatgtgctgagtgagtggtcaggggtttttgttctgcctgtcacaatcttgatcttgactagcacaagccatgcattgcatcaagaagcaatgcataggatcgagaccagcgtgtacacgagctgaggtcatgttcttgacaaagcagcttgaattgttcatcacattgtcactttggtaatcgtggtggacttcaggggatcagcatctaagtttaaaatgcctcattgggttgaacaatcttgtgttcctagtcagagtttcaacctatgcttggtattcattggagtgcgaggcaacatttgatcgagatatgctagtaaattgctggattagagaaaaggtcagagaaagatgaagatataaggtcggtgagtgatcagatcgatgcatccattgcatctgcttttcttggagtaatatgggcatcacttggcatcttttaaagaggtctctccccacatttcttggaccaaaccaagttgggcaagagcaacaaaggaacaaagccaaaactgatgccaatttggaatcagttggttgctcctttctgttcataaaagcgactcaagtttttcctttttgttccttgcagaaagaaaaagttttgctttttgttcagtctcccaagaaaggaagaaggcgatcagacaatgagacaaatcagacatcagagaacagatcatctctcatagctgcattacgtaatggataaataggatcacatgagtattcctactagataaaaactgtcactaatgcatgctcacattgtctaatgaaaaccacaacataaaagaggaatccagagggcatcagaacctgaagtctgaagatattgcgcggccaaccttttccttcagaaggaaaatccttaaaattcagagtggagtgcaggacaatggctatgagtcagagtcagaatctgggagcagctgaaatctcatgcaatttgtggtatggagttcatcgagtacactcacaaggccacaagcacagtgctatagcctgaaggtactacagtagcctacaattgtttgctgattgtatgtttctttgcacttaggtgttgaacagtgcttggcaaaacaaaggtactactctgatatttttttcagaaactgatacaatgaaatttcagcgtttgaacaaactataacaaatgatccaaaagtaagcattgattccattagacagtacagcctctctccaaaaataaaaggatggtacagagacgtgcacgagcactatatagtcaagattgacataaacaatggcggtgagatgtactacggtactaccactatcactatagaggaacaatcacagcaaaagcactgaaaggcagaggtagaaattcttactgatggggcattctccatttgaacagatcaaaaaatcaccggcagaggtagaaattctctctggcacttcaacaaatcaaaacgaagatactccatttccatatcaaccataaatattttccattaatttcatccatgagggctgcattacccaattcagatcatcagctcaactcaacaaaataagaaaaaaaatattacgcagtaattctaagcttaggggggagatactatcaaatcatccctcaccatccacaacacttaaaaacacaaatcgataagaaaagaaaagaaaaagaaaaaaaatccatttcttttggatggatgaacaacagccatgctaaaaaccagcagctactacgttcctcttcatctgcacaatgggttgttgggggcgccgagggcgacctcgtcggcggcgtactcgtagctgcagtagcagaaggcggcggcgttgtccttcttgttcttctcgacggccttgaggatggcctcgaaggcgggcacctcgcaggggatgcggagcacgccctcctgctggaacccgaactcctcctccgcctcccggagcagcgccgcgaacgcccggtgcttcaggtagtccgtcgggatcacgaaccgctgcgccgtcggccccacgcacaccgccaggtgccccctcggcggcggcgtcccccccggcgacgcgccgccgtccgtgaacgacagcgtcctcttcaggaacttcttcgccttgctctcgccgccgccgccattgccggcggtggcggccgcgtctttcggcgcgacggagagcttgcgccacttcttgagcatctgctgaagccgcacgatctcggtgatcttgttcgacttcttgccgccgccgccgccgggatgcagatgctgctgctcctccatttctgcggtttcttggtcgctaacttttttggggaaatttttcgtgttttttttcttctctctttggcgttttgggcttcgtttgttgcgtttgtgcagtgatgaagctttggaggcgttcatggaggggtaatttatagggagggagcttgtgtggggcccaccttacaatagtctaattaattatttttctatgtgttttttcccttcttctgatctaggagtaactaatggtgttaactgaataattaattgattagaggtttctgcaggtaggtcagtaaagaaaaggggttgccagttcggggaatctgaatagatttctgattgctaatgccatcttggggaaaatgctggccagagtctggcttaatgcagatcttcagagcaatagccctgcaaattcatttttcttttatatataatcatagggctacagttatgtttattagagctgtatgactaattaatttggaatatatgagatgattgaacaagttaagtggcaaaaaaaacaatatgtttattagagcactatgactaattaattttgcaaatatgagatgattgaacaagctagtggcagaaaacaaatatctttgctaattgagacggtcaacattcggctttaaatggttaagcagtgaaccttttttctttatcttcatcagcttaagtagaccatgatttttaggagttatggaaagtagatagtgttacgtgattcagtcaatgaggcgattctgttcgccttttctgtttcggataactgaaaaagtctgttaagcatgggttggagattttcagatcctaagaaattggatctaaaacatatactgccttcacctgaaaatattcagtcaaacaaatctgttaaactccattgccaatcattattgcttcaaatcaatggctagttggcatttgacaattttctctgcttctgaaacagatctacagcagttcacattttcagatcctttgcagttttggacggccaggaatccagcatgtcaatggctgatggagcagaggataggtttcacatcagaacatggctgttgagccttctaacatgtgatcacgcacttaacaataatgctgtaccggctaatgcattataaactactccattttctgcatcagttcagctctgcttaaccagctagcctgtgtgattgctgctctaatcatttttcttctggcggttggcaatggcaggagcagcagcagcattgacttgattagtttttggcagggttctttcagatttggggatctacggcatcgtcctttccatctcaccgatcggtgataccgttcgtcttgtcgcctaattaacacatggattttcattcaacgtggtggttaaagagaggcgaaacgtatggtattcttcatggcaaagaggttcagagcattgtctcttctgaattatggtaggttgcaaatgtgatataggttttttttttgtggttcatgagctgattatttggttggtaagattacttgcgatcacgacaaagaaccaaaccggtagcaaatacttcttttttctgaaagatcaaaccggtagcaaatcatttgctcagtagcggcagattctctgaacttctttgttccctttttttcccattgaaattttggtctttctcttgttctgttgctcatcactaattaaagctatccttgacttgatatgcttcttctaattaaggtgactcgaggtgaaattaaaagcatatgttgtccttaaacaacagctaattaagtgattaacacgatgcacacttggttgatgacaagtggctgtttctgttagtctaattaagcttctcaggcatgtcatggactgaagcttttcgagtgtgttttttcacctgtataatactcgcaatttgccctggtatacacgtgacatacttgaaagctccagtataatcggcactaattaatgagagcatctcctgtcacttaaaccacaattaacaaacacgatgagtactgttcgacaagtacaagttgttgtaccttcatcatgaacataaactagacagtaagaaaaccataaaatctgcaatgccatctagcatctcttttggtttctagaggttgcaggttgtaacatgacacttgtggcacatactagtccactaggtagaaagaatctacgattaagattagcatggatgtattaaagaaaaacattgttcttgctagcaagctctacttggatcagaatgaacatgactaaatcacaggttatactctggggagtttctcacaaaccgtacaacttgcaggctttgtcatgtgaaaatcctcttgcattatggttttagtacagtgtcatgcgagtcatgccactgattatttaatttatttcattcacatctccgagcaaaacaataattagctgaactaaaacatgtcaccaaatttcacaaggaacattctggactatgactctaacttgatcttaaattttgagatcgagtacagcagtaaaccattgtcacattgtggaatgcaaaatgtgtttgtgatatccaacttcagctctgaccaagtggccgcccagttagtacaagtctgtcaagattttccaagtaattttcagtcaactccattgtacaagaaacacacacaagcagttcatagagaacacaagctgaattctttttaagatatttcaccggttgattgtcgcgaattatttattctgtgcctctaaaaataaattttctaaaaaaacttactgcattgcatagattccttgttctgagctatcaaactatttaatttgttatatttataatcatgttgataatatactataataatctagttaatctgcttcaacccgctagaaaaccatcagctagtatatccggtctctgccgctcacaggatcaaatgccaaaactgccaacggtcaagtcctttatatcttaagttaatctcctcgcgtgtactgtcagtaaccgtcctataacattaattaacactcctaattacggtttaaaaaaacacacctaaactgtacggttacctctgcagccctggccagaagaacagtgaaactgaagactgaagagattcgcggccggccggtcaaaagactgaccaaaccaaaccggcaatggccggtggatgcagaggaacagcgctagtagtatcgggaactgcgactctgccgatgcagcaagctattgacggttaaattagttagggaatgcttgcacagtcaaaccctacaagagataggcagatgaagttgatagctagccaccttgcaatgctttgttccatagtttcaggaaaagaaatataatttctgataatgaatttggacaagcttgaaagtttgaacgggtcgttttatcctttgtcaaatgactcaactgtcgtggctagattggacacttgtttcttccgtggttactgttttttgaaacggattttcttgtttgaagagagtttttgaaggaaaatgtctgaagagaatgtgcctgtaattgttcagaacttcagataagaagtgtcagtctccagaagaagctgatgtaagaacttgtactagtactaatcgactggttggatgctagtggaaaaatcgctaggctaaaaccaagagtaattttcagatcacatctcctgtccactggacctgaactgcgtgtgaaaccaaaccacacccaagagcgatcggcagtcatacttattacagacagaatcacagaaatgaggagctgtgcactgtgctcgtgtcaaaaataccacattttatacaggagttcatgaaatctgcaagaggtgatccactgtgaagagacaaaaagtgaaattcgatcgtttgatgcagtgcaagggctgccgctttggtgaaccattgcatgcgctttaggggggcagcacaatatcgaaatgccgctgagctttttctgcaagtccaacaaagtagagtactacggtgtactactactcctccacttgtctattgcatttgcaggtttttgcagcacgcttcataggcattcgcgtctgcttgcgagagtgcagagacacagtgtggtcactctcagagcatattataatcttatgtagaggagagaggtagaacaaagtcaaaggggttggctctcatgcaagagctagtttaacataatctccaagacaaatgcattaaatgtataagtgagaaatagagagaggaaaaaaaaattgtagctaaccttacagctaatctatctattatataattaaaggaatagaaaaaggagccttcacgttcgctttcatggcttagaaattctcacattaatcagagaaaaagaaaaaacagagtccatatagaaatacaatttagaaatagctaaaatctggaattaaaaattaaaaaataaggaatattagaagaggagactagagtccatatagaaatacactttagaaatagttgaaattcggaattaaaaaataaggaatattataagaagagtatagagtccatatagaaatacaattaggaaataatagaaattcggaactaaaaataaggaatattagaagtagagtatagagtccatatagaaatacaattaggaaataatagaaattttgaattaaaaataaggaatattagaagtagagtatagagtccatatagaaatataattaagaaaaaaaatagaaatttcggaattaaaaaataagaaatattagaagtagagtatagagtccttataggaatttaaaactaactaaaattcagaaaaaaaaggagcctccacgttcgctctcatgacctagaaattctcacattaatcagagaaaaagaaaa

SEQ ID NO: 15044 - DNA, 560 bp, Oryza sativa
ccactcactaccttttcagctcctacatcgcaccaccctagactactcccaccttcgcgtctttggctgtctttgttacccaaacttgagtgccacgactccacataagcttgcccctcgctcgacaacttgcttttttcttgggtacccggcctcccacaagggataccgatgtctggatctctccactcgccgcatcatcatttcgcgccacgtcgtgtttgacgaatcacgatttcccttcgcagcaactccccctgctccctcgtcttttgattttttgctgcagggactccctccagcggtcgctccctcatcagaggttgagcaaccgcgacctctcacggtggctccctccttggaggttgagcaaccgcgacctctcacggtggctccctccacagaggttgagcaaccgcgacgccttacggtggctccctccatggaggttgagcaaccgtacgttcccctcttcggccgacgcttgccgaacaacacccgtcctgcggcacgtgacgcccgatcagctggcacgcccttggtcaacgcctcctcgatcg

SEQ ID NO: 15045 - DNA, 657 bp, Oryza sativa
  unsure (1)..(657): unsure at all n locations
tacacggcgcaggtggattccggcgatccgtgcgtctccatcaggtcggcgtagaagcaccacagcttgagagaccgatgcagctttgtttggacgacggtctcgccgacgccggcggcgacctgcctcctgacctcgagcgacggctctgatacacatacctctagtaattgtttcatgaatttacaaaacttctaggtatgattttcatgagtttccaacatttagctcgttttcactgaatgtctgaatatgtcctcatgttaaatgggaaatatgttagaaattggatgtttgcgaattgtagttttcagcagtactattgaatacagagttatttcaggtgagcaatcttatcgataaaacagcaattagtggatcagagcccaaacttcccctagtcagagtaaaggtaaaatagggtgctcttcagaaaatattaccttcctttaaaatattggataaattctttatgtcaaatttctgaaggtggactactctgggttttcgacaataactccacagcggtttggtcagaagtatgtcggaaaggtacctcaaccactaatatgaaatttactgatgcatacctnctttatcatatactttttttttatggaatcctttatcatatactttaactggcgtattctttac

SEQ ID NO: 15046 - DNA, 20632 bp, Oryza sativa
ttcaacctgttgatgtaaagtatggtcaggtagaggcatgtcgagttcatgacatcattcttgatttcatcgcgtgcaaggccgctgaagagaattttgtcacctcattggatactgcagattttggccaagtttcggatcgcagggttcgtaggctaagtgtcatgaatatcagtgaagaccatgccaccatatcagcaagccaaatcgatctctctcatattcgatcacttactttatttgggcgtttcatgcaaactcctttggtggatttaccagctatacgtgtgttggatttagaagaatgtgaaaacatgggagacaaccatcctattcttgcgaatgtagaaacgctgctccatttgaagtacttgcgtattggaatgttgtgtccgataactgagctcccaagaaatattggagaactgcgtcatctagaaacactggacatgcgatttgcatgtcaagtcaaagaattgccatcaactattacaaggcttcaacgattggcccgcctatatgtccatcacaacactagactccctgatggggtaattggaaagattcagaacttggaagagctagaggagtttggtgtcgtctcctgcgagaaagggaaatctctgcaagaattcggtcagctacccaagctgaggacgctgaaagtaagatgcagtagtactacagatgatttggaaggaaggaagcgagccgaggacctctggaattatattggaactttgatatcttcatgcaatcttcatcatctttgtatcctccaccgacaggatgatccagatcatctcccaatgtcactggaatcatggtgcccccctagtgataattgtagcctccggaagctccacatcacacattactacatctctaagcttccaagttggatgggttcccttgcaaatctcaaggaattactactatatttctacagaatgaggcctgaagatgttgacatccttgaagcaatacctagcttggttttactcagagtaagaacactatacagcagcaatgggaggatcacgttccgtggcaacaaaggattcagatgtttgaaatatttctctctagatattgacctttgtgggacagagctggagtttgaagctggggcaatgccaaagattgagcatctcaagattaatttccctgtgcattcttggacggcgtctgtgaatggtgcttctgattttggtatccagcacctgtccaccctcaccgaagttgaggttggtcttggttgcttctttatacctgacaccagaaggatgtaccatccgacgacggaagatacggacgacagtccgatggaagatgacggcgaagctaacgttgtcaaatgttttgaaagtcgcatcaagtctgccgttgaggcacttcctaaccgtcccacatgcaaattcaacctgaacactgctattgtgccttgtccatcggtaagtttccagtcagaattgtagggataccacaaaaatatttggtgcccgtttaattaatggcaaaatttgttctaagacacttcagatttgtggtatttattttagggcactctaattttatagcatttgctctagaatactctagttactttttttttttcaaaagactactttaccttgaaccaccttctataattaaaatttgaacacactttagctgattctaaacattttgtaaaatttagaagttgtctgaaattacagaaatcaaaaatattttacaaaaatttgtttaaatttagacaatattatttaaagttttaaaactcttttggaaactttcaatgtatttgatttccgtaattaaattagggacaggtttttaatttgggtacttttaccatccttacaatggataatgagaggtatcactaattataataactttagagataccaaaattaggtacccccaagtgtgaaattttagtaccttacaagttatagagaaaatttcttatgtgcccctcaagttcttgctcaatctctactagtatgtcgggttttgctacatcctcagtacataccatttcgcttagttaactaccataaattaatcattttttttcaaaataaacataatgcccctcataaccataagcgataagtttgccccgcacaaaaataaatgcccctaaattccttagttttggaaaaaaaagaagaggtggaatgaatcaaatcaaaccatataaatatttactcatttttataattttctaaaaaaattaaaataatatatatattttcaaataatttcgatcaaactaaacttgaaaccaaagtttgatttttattttttttcaacagaaaaagaacaatggggaggtgcattaccctaatcaccattttttttgttattttatccaaaattgtaaaactaaaacttgaattctaaatgaatttaaaatttggttgaagttcaaccttatgagataagggtaacatggtcatgttgagaaaaaaaatggtggtaaactgagagacataaaaaaggatggaactcggaggatgggtgggggggggggggggtttattgagtggaaactgtaacaattttattatctcttgggcacatttggaaagaccggaaaaaaactgaaacattaagtgtacttatttttcaatcttttgcttatatatttttttcattcttcttccagtgttttgagtacaagaggaaacacccgagctttcctgtaggttcagttaaagcagttagggatgttcgtataagttcatcagcgattcaagataattccatggggcttcgccgccggcggccagcaaatcagccgtttcgattcggctgggcagggctgcagtattaagactctgcttggcatggcagggctgcaactctaaaatttacagcttcaatactccatcccatctttaagtacagccatggttttacacacccaactttaaccgtctgtcttatttaaaaaaaatttgaataaatttaaaaacataagtcacttgtaaagtactattcatgttttatcatctcataacaacaaaaatattaattataaaaagattcaaataaaacaaacgatcaaagttggacgtgaaaacttatggttatggttgcacttaaaatagaacggagagagtaatcgttaaggttcgggcacccctctccacagtagagctggagctgataatggctgtttggctataaagttttattgggacgacaaagactattcatgattgttttcacttgcatttctttcttggagctgtagaagttagcagctaacttcatgaatatggtttctgactacttgctgcaactaattatttacgtactaaaatttttagcagctataaatcttataaatagagggtcttttacagtacctcccactactatagtggtagtaaagtcgtagagatctaatctgaccgttgattataattgtgtgttagacatttaatccaatacccatattcgacttccaatttataattcatttgtgcagaacagatggctcgcgttaacctttgttgatcggcttctatcatcgctggctagctacccagcttgtggcatcgccagcgagagccagtagtacagaaccgggcatcccaattggcccatctgtgacggaggctatcggtccattacaaaggtacgcatatttatcgggccgcaaaaaaccctgtcacaataagccgagagaggatgtatcttagtcctctgggttaggcatgtcaccaatgaccctcatcggtgatgggccaaaacaaaacaccgtcactgatgagggtcatctgtgatgggcccagtgttacggcctgacaaagatgagtgtgaagcctatcaccgatgaccctcattctttgacggggtttggttgtgcttcgttacggataatccatagtataaatacccccagggtattcgaagaacagctatcctaattaacccagtgtatggtttacattttggaaaagagagcaagacgggagaatttttgctctttatttttctagaaaaaacaaaatgctcccaagataataataaattattactacaatttccgtgtaataactagctacatatacataacttttattttttttcataatttgcagatggacagaagatggatgtacaaaagtgatcgattgagcatagagtatggaaagggcattaccgattccatcaatgtcgtagagcaagagaaaaacatgacaaataatgaataaacaacttgtccatgctttgattgtaggaatgagaagatgtttaacgatagtgtcagaatacgcacacatctgatggtgatgtcatcacaacattgctcttcattaaaacaacctattccctatttctaaatacttgtcactttttttccttttttcaaatcacaaataacaaggaaacagttccagatgaagttttgggaaataaaaaagtgaccaaaattttgtacagtaatatctctgattgatcaaagtagatcaagataggcgtgaatatcaattattctctgcatgagcatatgatgtctgccatctcttttaaaaggagattggccctaacagattgtactggacataaatcaaaataaatcaactaaatataatacaacaacttgaggtcaagccactagctaattgacaaagctgctgccaaactttgtataatccaggcacattatgaccagtgacaactacaaactaaatatttgcaggtgacaaaccagagacccacaagagaaaacttattgctagtttctattatgacatgcacatgtgaattatcacttcaacaagttgcctaatagaaaatcgagacaaagatggaaaggacactttttatgattttagaaaaataaagcagctgcaattggtgtagtgtatcatcttctgtctgaatgcaaatagacaattccttttctcccttttgaaaggagtgctgcctatatcaactgaacataatcacactaccacattatcacactctcacttccttagctcgcatgtagcatagaatccagacacaggagagcaatggcggcaatgcatgtggatgcttccacaggggtgatgaacactctcctacccaagctctccaagcttcttgaagagtacacgaatatcaaaggcgctgcgcgcaaccaagcatgaagcctgtgctagagatgcttgcagatgcagatgatgggctcgatcctctgaagagggaatggcggcacaatgtgcgtgagctggccttcgacatggttcttccgcaaattgaagaagttgaaggcttgccctgagatcgctgatgcgatcgatgaactgatcaagaaatgtgcaatggagggaagcaagaggcacaaaaggtataattctgtcaatgtggcatccaattctagcacttttggtgttgatcctcgcatgctgatgctttatgatgaagttgataaacttgtgggagtcaatcgcgcaaagaaacatataattgattggtttaccaaggagaaaggtgagaaaaatctcaaggtactgacattcgcagattttggaagtcttcgcaagtctaatcttgccatcaaaatctactctcagctggaagaccaatttcagtgcacattttttttgtcattgtctcgaaatctctgtagagaaaagattttgagaatgattcatacaaacctagggatcacctataacacatcagatgacgaagggaaactcattgataggataagagactacctaaaagataaaaggtaaaccttgtaatttgtaacactgctatgtactctttactactacctctgtatttaatatgacagtatgaaactattgactttattcggtctttggtgtacaactttaaccactagttttctattagaataaaatgataatatttaacaaaattataacattgtaaaagtaattataagaagaaactattcatatgtttttaatgtttctaaatgaaatattttgagttattgatggtcaaaattttaaaagtttgaccaaataaagttgatagtgtcatatatttaaatatggtgggagtacttttctacatttcgttaaacagatcatgacatggactgcacacatttattgagcaattataattagttatctgaatatatatttacaatctactgccttttttctgttcacaaagagtgtaaatatgtgctagagactagtggcaatcctgtgcttaacttatgcttctttagtttcaaatcaagtggacttgagctagctgcaagcaaatacttttcatagaaatgatcaattgatcatctatattcaattaatttaatgctgatggcggctttatatgcttaaaagatattgatatctagctttgctaaaattctataataggtacttcattgtgattgatgatgtgagggacgcagaagcatggaaagctattgagcttgctttgttcaacaacacatgtggtagcagaattgttataacaacacgtaattccgcagttgcatcatgttgttcacatgatggtggttatgtctatcgaatggaacctcttagcctcaaaaactccaaaatgttgtttttcaaaagagcatttggttccgaggatttgccaaatcctcaattggaaaaagtatctgatgggatattacagaaatgcggcggccttccattggctattatgatcatgtctagcttgttagccgatcagaatgaagaagatgaatggaaaagggtgctaactgctattggttctgtacttgcaaaggacccagatgatgatatcatgaaaagtatattatctctcagttactatgatcttcctcaccatttaagagcttgtttattgtacctaagcatatttccagaagattacgagatcaacaaacaacgtttgataaatagatggatcgcggaaggattcattctcgaagaacaagggttaacttcatatgaagttggtgaacgctattttaactaccttatcaatagatgcttgatccaaccagttggttcaaagcatggtcaagcaaaggcatgccaagttcatggcatcattcttgatttcctcgcatgcaaggcttctgaagagaattttgttaccccattcaatgatgatgcagagcaagggcttgtttcagaaaacaaggtcagggttcgtaggcttcatgtgaataatcacaacaaaaaggaggttgccagattaacaggcccagttctctctcatgttcgatcgcttactcttttcggtgattttgggagaattcctatgtcagcattcacagctcttcgtgtgatggatcaagaagataattgggacctaggaggaaactggggcttaggaagcaaccatcacatggcgcatatcgaaatgatgttacatctgaggtacttgcgtctaaattcccctttattagattttgtgctcactgcaagaacaggagggttggagaatctagaaacactggacctactaggtgtgtcagttgtagaactgccttcagctatcacaaggcttcgccgattggcccggctttatatctctcacttagctagatttcctaaaggaacaattgcaaagttgcagagcttggaagagctaagcgagtttggtttcgtgtcgttccaccaacagtgggaatgcttgcaagaatttagtcagctaaccaagctgaggatgttgaaggtaaaatgggattttgattggtcttttgttcaagatgaggagggccttcagagttatatgcatgctttaatttcttcatgcaatgttcataatctatatatcggcaatatccacatttggccgggtccttacccactttcactggaatcttgttgccctactactacttgtagcctccagaagctgcacatcacatattgtttcatctgtaaggttccaaattggatgagctcacttggaaatctcaaggaattaaagctttatatctactgtctaagagcagaagatgttaagatacttggagcaataccaaccttgatttttctcaagctaaaaaccttttacggcaccgatgggaggatctttatccctggttataaaggattcagatgcttgaaatattttggcctggtcatgatatcttgtggaaccacaccagaatttgaagaaggatcaatgccaaaccttgaacatctcaagcttaggttctgtgttcatgagatggagtgcataaatggtgctaccaatttcggcatccggcacctctccaccctcaacaaggttgaggtccatatctatgggtgctcagttagtcacaaagactatgatccagaggctgatagggaagatagcaatgccaaaaatgctgctttcctcatcaaagccgccgttaaggcgcttccgaaccgtgtcacttgcagttttgaactagcaaaaacttatggaaacattggaactttccatgggcttatcaaaattgtaagtcacctgtaagaaatactaggacttgtcgtttgattcgtttcatcctctaagttgttactagtcctacatttctttctttcatcctgcaaattctatgtaatttgatatttaataccacatttaatatatgttatccctcacttgttactcccatgtttgggtcaattttcttatggtgtttgatgcagttgaatcgacataatggaatatcggttgagagactccttcaagaaatgcttaagtcgagggtgaagcaaatgattcaaaacaatatggcgcgggcacggggcctcttctagacagaaatggtaaattcaagaggtgagcgagagttctctcactgattccaccagtgcaatgtttcatgtcaatatgatcccacaatatcataaagaaaataactcatattcattcatttccatgtattggcacatcaaacaggatgagacgaaccaagacgaagaagtgaagaacacgttgggaatgaattgcagatggtgtgctatgaaaggtgcagtttgtgtgctagctgctagagagctggagtcagcgaatccactataaatttctacaactctattgaaatttcttggagtatctgttgaagtctttgtttgttgtggttgttagtgtacaatttggagctgctctgtgttggtttgagtcgaatggtgatttaaagtatgtacctatctgttaaacctggtgcttctataattcttcatataaataaagtgagttgggtttagtcccacatctgtaattgatgatagaggagcacgacttaaaaaggtgggggcaatcctcaccatcagactagtcttttggattgtgtaggttcaggatctaaagtcgtggcttcggttggacctgtggtggagcaggccttgacctgggtggcccatggttggtgggccgggctgcgcactctaacaagacctaaagttgtgacttcggttaggcctgtaacagagcaggccctatgtgacctgggtggcctatggttggtgggccaggttgcgcactctaacagttgttacttaggtaaaattttataccaactggtaaaaatattaaaataatagaataatgagaataaaattttataccaactggtaaaaatatttaaatattaaaataatagaataatgagaaaatatatagtgctgtttttatggaaaaggaaaaaaactgcatggcagcattaatatatgcatttgttgacatgtatgctgcttttacctggaggcaagaagcttaaatatgtctgtcttagcgttaaaggtatctagagatgccacagattgacattaaaaagtaacatgaatttctcttcgtttcctagaagaattgcctatatattatggtacaaattgttcttttattttgagaaacaggcttcaagcctaaagcaactaatcagtgcttaaggggttacagtcctcaactaacagagaagaaatacataaaggtggaactgaaaaccaggttgaacactcctcacttgtcaggcacattttggctaggctatgtaccaccttgtttgcagaccggcgaacccaaatgactttaaattcctggaacgcactacacctactcttgactgaggtatgtatgtatgtatgtctacatctcctccaggctccagctttggagcttccttggttcctctctatttcccaatcaattaatcagatcagccactgtttcactattgtttccttgatagtatgtctgtgtctcatatttcacttctgaacattatcttaaaaaagttcacttctgaaatctgaacattttcacattttcagtcgtacattatttgctcaagcaagatgaagagaaagacaatcgattgctattataacccggttgtttcaagggtgaactccactgaaaatcctagtccaatcattgcccaagatattgacccagttgatttgcaagctgctaatgaaaatgcggctacactaccatcactagaagctgaacaggggcaggaaattgtagctacagcatttgagagggacccagggaaacgggctcaaatatttgaacttcctgctgatcaacaagatgaagctcgaagattttatatatctgagggtccttttcgaccaatcttgcaagaacaagagtatcctttgaatgatgctaagcaccgtcgtcgatttcgcagcagttggtctaaacaattttgttggctggagtattcacgccacacagattgtgcttattgtttaacatgctttatcttttcaaagaagccaactgggaaggctggatcaaatgcatccacagtcaatgggtttcaaaattggaagaaagttaatgtaggaaaggagtgttcttttctaaaacacatgggggatgctagctcagctcataattattcagttgggtgctttaataatctcaaaaatagtatggctcaaattgacaaggtgatggttagacaaagtgacaaaatagttgcaatagcaagactaaggctgactactactattgattccattcggtaataacatgaattcatttcaatatttttttagaacagtgcatttataataaatctaagtatctaacgatttcttttgtttatatgataggtggctaacatttcaagggtgtccctttagaggccatgatgaacctttagattccataaatcgaggtaattttcttgaaatagaattccataaatcgaggtaattttcttgaaatagataagcttttggcatcatataataaggaggttaaagaagttgtgttggaaaatgctccaaaaaatgcaaagtatacctcatctgaagtccaaaaggaaattctaagcatagttgctcgaaaagtgcaaaaatcaattagagaagaaattggcactagcaagttttgcataatggctgatgaagctcgagatgaatctaagaaagagcagatggcgatagttctacggtttgtcaacaaagaagggcttataaaagagtgtttccttgatcttgttcatgttagtgacactcatgcgttgactcttaagaactcaatttgtgcggtcttgtctggtaataacttgaatgtgcaagatattagaagtcaaggttatgatggggcaagtaacatgcgaggggaatggaatggattgaaggctctaattctcaatgagtgcccatatgcatactacatccattgcttggctcatcagctccaattggctcttgtcgcagcatcaagggaagtacaagaggtacacaatttttttcagcatgcaaatttcataataaatgttgttagtgcttctccaaagcgcaacgatgagttgttagcaaaccaaaccacagaaattgctcgtgaaattgaattgggagagcttgatagatactggacgaggggcaaatcaggtgggctctctacaaaggccaggggacactagatggagttcccattataaatcgattcagagcttaaaaaaaatgtttggtgccacaatttcagtccttcgtagcattgcacataattgttcagttacaaagtattctaggggagatgctgcaggtgccctacgaatgattttcacgtttgattttgtgtttattcttctcatgatggaaaatattatgaagatcactgatgtcctatgccaaacactccaaaagaaagctattgatattttaaatgcattggattctgtttctaacacaaaagcattgcttgctgatttgcgaaatgagggttgggaacctcttgtccaggaggtcaaatctttttgtgagaagcatgagattgatattccgaatctgaataacaagtatgttcttctgcctaggttttaaatatgaatggcaatatgtgactgttatttttgtagatttttatttcttatttatgttcccaaatttgcaggtatgttgatgtgacaaaatctcaaaacaagaatgacaacactacagcttttcactattacaaagttgatgtgtttaatgttgcaattgatcaacaaatgattgagctagaagaccgattcggttctcaagctacagatctgttagccctgtgtgtttgcttggagtcaagacttgagtcatttgacatggcaaaggtatgcacccttgtagagaagtattatcctgctgatttctcaagtcaagaaagagctcaattggagtgccaactaccacattttcaacttgatgtctgcaaccatccagacttgagcatattgccatctcttgcagaaataacaagtggacttcttaagacagggaaaagttgttcctatccaatggtggatagattgttaagattaatcttgactcttccagtgtcaactgcaactacagagagctttttcagctatgaaaattgtgaagacacgtcttcgaaataaaatgggagacggctacccatcacatcacatccaagagttggtgcatctcaacaagagatccttcactagcatacccatgaagcagagtaccgtatgtagcactattaggcttgtggcccctcttgaccatagaatcaaagatctttctagcttccatggatcttccattcttgcagagatagtccatgagcatgttataagtgactacattcggttcaacaccatctctgcacatttttctgaaaatcccaatggcctctttgggctttcccgatgagcaatatccatgcaaaagactattgtacgtgatgcaatcaggcataacaccattcttgaccatcctagtaaggacctccctagccttttccattgcttgagccttggatagggtagcgacgattgagctgtaagtcacaacattaggcgacatcccctgatccagcatttcatcaaacaggcaataagctttgtccagttgaccctctcttcactctctctcttaattaatatagtgtcacataagctaaaagttatatatggcaatgtagttaatgccatagacaccatcctaggtggagggttgagactgcccttactccgatgttttatctggttgtgttttagttcacaccaaaattaaaagtttaattgaaattggaacaatgcgacggaaaaaattaaaagtttgtgtgtgtaggaaagttttgatgtgatggaaaagttaaaagtttgaagaaaaagttgggaactaaaccaggcctctctttttctcggccattctcaatttctcatctccttacatttcctttttatgggtatctcgaacaggatgggatggaatgatggaacagtgaagagtagcaagaggatgacgacaatgacagatcgatatcactgtgttgatgtttcaggatgttcagtcttattagtagttgggtttcttcttgttttgaagttttgatggacctctgatcttgggtcttcttgttgtagacacaaaaaaaaatttcctgttgacatacccgatatcttcatgataagatgttagcgctttgttcattctgcctggcctgggacgctgggtttgtctttgatgttaaggtttgctagcaggtaaagccagcgctgttacttgtaacacacatgattagcttaaaataaaactgggtgatgcgcatatcctctgctgaaacatgttgcaagcagtcccttactattcgccgcctcccagtcccagaatcgccggcatccaacacttgcatttgatgtttctgggacaacttttgcttagttcaacttttgccctaccagatctgacggtaacgtcagacagagtgtacatgaataccaatcaaaatgagctgaacatgttaatcgtatttttcagacagctaccatttcaaattcaagtaggccattcagattcacgggccaaaaccagaaagtcagcatccactggtttctcacgggtaaatttagtacatctcagaacgtggcgataattctaacgaaatatgaatctacatttgcaataatttacatcacttgcaacacctcccttagaaacggttcgggctgatctgattatatcgacaacataagactcgcataaacttggtaaacataacttaaatagaactagacactgcaaactgatgcatgctaaaacttgcgactaaaccccctatcttcagtgactacgagtagactgacatttacatctaccagatgctaacaccagactggacacaacaaaattgatgaccaaccaagagaaaagcatcctacacgatggacagaggtcctggagaaacgtttttgtcttccaatgtacatgatttcttgtgcactctttggttttgcgtagctggatgtaatcactttctacttgttgcgattctcggcttccctttaacctcagattcctattcaaaatgagggaacgtcagtgtaaatgcattgtgagacaaactcaggaaagaatctcaggatgataactgtaaacaactattacctgtggactgtgaagatagatggatgtctttgcagtggcagggttgtggttttcagccccacggctccagtcatagcagacctggttaacagtaaacatggttaactaaccaaactgtagtctttttcttcaaaacttggagcctcagttagaactatcacttagcatttttacagctcaacaagaacaagcatttcatttgaattcaaaatccaagggaatgcatttgacatacaggttaaacaggaccgggcatccatttgaactcaaagtctatctaatgaatggaaaacatcaggcacttctttcaccatgtttaggccctattgtttcagcttaagattattgtaatctagattattgagccagataactataagttggattataatgagccgacatagaataagctgttagctgtttgtttctctggattattagctgttagccacccaaaaatctaaaaaagcacctttagagtagattaccagattatagtaatatggcttatagattgtaatgatctatcataataagctatctgtttgtttcagcttactcctaataatccagattataataatcctaagttgaatcaaacagggcctcaatatgtgcattcaagatgtctagttcattgcagaactgtggcatgggaaacaataaaatacatctaaattcaacctggtcagaaaacatggttgcatatagtcacaaactaataaagtacaacaagatactcaagcatcacttgacttactgcataagcaaatatcgacccatcactgttgaaggtactgcaaggaataggaagagggcaccgactaaaagcctgtgtaaaaaaagtgacatgggaagtgaatgattatattctgtataaaataaagggatgcatgtgagaaattgactgcaacaaaacaaaattagcaaacacaaatgacctgccttgtactaagcacccatatgattgcaaattaggcagattgctcatgcaataagagaatccatgccatcgagtaaaaatatgagcattttcactaaaaaataattgcataacactaattacatggttgagcagatacaaacagatgattttttcttgaacactgttctgaatttacaaaagtaagttcatgagctttatcttggtttggtttccagatgtgtgcaagaatatttatgcagcacactaaaataacagataaagcaattatgactattaaaaatcactgaatactcaagggaacaaaaatacaagtgcaataaccagtacaaatggaacttcaaaagagccaacatcaaaccttcagtctttgtttgctatccttatcccagaaattaaatgcgccatctgatccagcagttgcaaacgtgtgatgaacctgtgccacgtgatagaaaatatgaaaccttaaatataactccgcaaactatgatttccagacttcaaaaaccagtaagtcggcaatgcttttctcaatgaaacatatcctagagatgtattcatcaatgaagcataccaatttaatgaaaaagatcctataactgaaaatatcataaccaaaagaagaaaaggtgttctatgatgtatgcataacattcaatagtcataatatggaattgttcgatggaatcgtaaataggacatttttggagtattttgagacatatctttatgagaattgcaacatctgcatgatcagattatatacggttgttagattaagtcttaacatttgacgttccttacttggaagtatcctacattccaacgtagaacttcaaccagtactttgtgaataactgcaaaaaaaatgtgttgccgtaggtgctaggccctgtggcaggttgacacctaacacctccaagttgggctacaggctgtctagtagttcagttgcctaggcatggtgctagtgctgagcaaagacagacaccaacaggcacactaatcaagatcatatgagagaactttggggtatgaaaccaatggtgccactcgtatatagtatatattgccagaattcattggtcaaaatatataaagttagaattgtgcaaaacatgtatactgttcaatggaaagagaattagaggtattttgtggaagaagaaactgtgtttttactgttctacaaatcaagtgatggttaagaaaaaaaatgcaccataactcagcataactctcccgcataagcatttccaataaaagcaaaagtgctatatggcattcatgtgtactccacagcaaggtaagaccattcagaaaaaatatcataaatatgctaaggtataggaaaacaagagacagacggagatcttactgggtgaaaattgagtgaattgacagagaaaatatcattcccttccctgtgacatttgaacgtgaaatttttgctttgctgtgagtcatcaatatgatgcacaccaactcttccttctatggaacccaccttgaaacaaaattagggtcagagtcagacacatggaaatatacctcttgtataatgtcagatagaaattattcttaggtaacgctgagcactctatccgaacaaggtcattgctgattatgggtaaaggtaaacattggttggttcaagcatatacaaaacctaccttgctagacatctctaggcagattataaatgggaagatgcacaactatagaaattgctaaacacaatttttcgtattgaaccttgtaccaatttttttggtgtcaaatatatactagctgaagacaataccattgggtgaataccaaccaagaaaaagaccataagtacataacaatgcattgctagaatagttatctatttaagcatttagaatagactagaaatttttacaaaaaaaagttgcattaccaaaaatccttgttgatccgggaatgcagcaagacacctagtctggtatttgagtggcgattggatgcgcttgaactccgtctaatgaccaaaacaggaaacaataaaaacactcagttcaatatgagaagttgcagatgaaaaacgagtgatccccattattcatttttaatggacatgtgcgatgttcacaaagaccaacctgaggattctgcaagttgaagacgaccagattacgatcagcagttcccacaatcataaggggataattcactgtaagtgcgtaacagcgctcaggaagttgctgaacatggacaggatttgattgccttgtgtcccaatacctataaatagcaaagtggtcagtattggattgactagaacagatcactgtaaccacaagaacagaggcctatgtgctgcgatgagattaagaaaaagttccctaaattttttggtaatgctcatacaacttatgtcacattaccaaagtttggctgtctatggtggcaaaccaaatatgggccaatataaaatgcatgcctaattgcctattaatcaaatagacagcttgaacttagatgcttgacctcaagcttcctaaatcaaatatcaatagcaattagggtctccccaacaatataagctaaaattaacaaatatttttaggaacgatcacaaggtgtatattttgaatccatagttactacttactagcgaataactatctgagtaaatagagtggttgatatgaattcgaattccatgtaaaaaggaataccgaggctgcaaggattggatttttcacaccttagagtcttatcccagcttccagagacaagaagattcatttgaggaatccaagcgatctccttgacaggtgcgtcatgcattgcaacagtctgagcctgcccaccagacaacagaggccacatttttacttgtttatcacagcctccagagaacacagtagttccatcatccttccaagctgaacagaggacctgatagaaaacaaatcaatgagcacactaaatactaggaaaatcaatactgtacattatgtgaatgtggtcttgagagaaatattgagatcatactggctggtcatgcgatatagatgcctttggttgactactcccaccaacaatctcccagcaccgcacctgcacaaaactcaaagtcaaacctggtaagaacacattgataaatgcatactgaaagtttacaggaaaaataaacttacctggttatcccaggaagttgccaccagaaggttgctctttgggctaaaactgaggctcgatacggagtcacctggattaggcagtacctgcatttacaatttaaacataataaataacttacaaagtaaatactagtatgatttattatttacagaatgtgaggaccaacacaagcacagatagaaaaggaggacaattgttgcataaagcatcacacctcaaatgacttgtttggattcatgtttggggcaagaccaagagtcgccatctccttctacctgatccttcaattcaaatttaacaaaatatcgtaagaaacaaaacaagagaaaccaactcaagctgttagcacattccaacttagaaacagcacaaagcatagagagacaatagcaatccgatctcccgcaaaagcaccacgcatgggcggatctaacatgggacatgggggttcagttgaacccccaaactttttgggaacaaattaacaaactgctactagtattaaggaatttctagaacagaagaagctagggttaacgcaaattcgatatagtgagagcgtgggtagagagagatgggaaggaggatgtgctaaccaggaccaggatgcggcggaagcgctcgctcgctcgcgggatggatgggatcggctcagccggccgcggcggtggcggcagaacgagcgccggcgccgcctttgctcgctcgagttcgagtcgcgggacggatggggatcggcgcaggccctccctacgatacgacctacggattttggttcacttcaaccatcggttcaataaaataatcaatttatactagtatattttatttatagagaattttggtttaatcaacacataaaatataatactatataattgttttgtttctaaaaccattgtagcaactaagcccaaacagtcaggtgcacatgcatggtaataatgggcgaaaatttgagggttgggtctaaaatgccatgtgcacactttttatactttttagcatgaaaaatatttaagggttaggtagggttttgaaagaacccacaagccatgtccatcggggtctcgattccagaccagcttagttttcctttggttctgcaaaaaaccatccgatttaaatgatttttctcaagtcaattacatctccatctccagactaagcaccagggtttgcaaaactgccggtaaccgcgtggttactgcgcttaccgcggggtacggtaaaaggaaaaccatggcaaccttcttaaattcaaataaatttaaaaaataatttgaaattttgataaattttacacggtttcatatggtttgccacgattaccgcgtggtaacctcggacccggtggtttaggaaccctgctaagcactggtccggtttttcttacaccacgggttcggttcgatttttacaactagactattgagatgccactggagagaataattctttgcaaatgccaattttgcatatgtagaaggacatgtcacattaccaacatggaggtggcaagaaaatgacccatttgcccttgtttgatcttagtgtacattgagtatgcggataatatacacctacaatacttgagcaactatatacaaacatatatgctagtagatccaatagatttattgtacttcaaaatattttcgttacaaatttat

SEQ ID NO: 15047 - DNA, 8338 bp, Oryza sativa
  unsure (1)..(8338): unsure at all n locations
tgcttgtgacccaagccaggctgcaagccacttatcccttctttctataaatttaaggccaaaagctcaaacctcgtgcttccacgtcatcatcaaattgtgaaccattggatgaatgcattagatcgcttctcagacgttggatggaatgcagcatagagcctaacccatcagtcaccgggcgaagtcttcgcctcctcagtgccaaatgtagcccatataaacacattggcccatctctacacacatctacatgtatccaggtcgtcaatctgtataaaatagctttatggctgaatgctccttcagttgacatgtgctacctaaattatctacaaattttggatagggctgctaaaaaaaatttcttcaaaaaagctatttgtttcttttgtttcttcttgagattatacctcctatctaacaaattgatgttaaccaagtctcgcagcaacacgcggggcatcctctagtatactcaaagttttgagccatatacgcaacgttcttactcagccaggaggaaccctgtatacgaaatcttaggtgggcccgaggccctccaaaaagggcccctattgacgtcaccctagggtcttctttttattttcaaagacattctgagcatgctgtttatttaataataattcttttaccagataaatgggtaccctggtttccatttcaccgataagagtctatgtgaaattttagttcagatttttttccctatttttttaatatgtttgaaattttgcatgtgttttttagatttttacgagttataagtaaaaattatatgttggaataattttttttgttcaattggagaattataagtaacaggttataggggagtgataactgataagaactattgaattatcacccaagggttaaaaaaatgactgaatctttttcaaacttcaggcgcctggaatcactcccaatttttcatatgaccatccctgacattttttttatccatggaaatggcagcaattacaagttgagcgacgcaaataactacccaagcaagttaattactgtagtaaatatttacacgtcttttaaattcaaattcaaattctcctcctcctcctcctcctcctagctactgctgctgctgctatcctatgatgaagtgaacacgtccgtttaatttctttcctgtccttgcaaatgaaaatgcagagaactcaaactgagccacttgagctccatgtcgtcttccccggcgagctcagcgacgacatcttgctcctcctccggtgatcgatcaggctggccgttgccggcggcgagctcagctcgctttacgccggctcgcgcgggcgcgccgcccagagcgagctgagcgcgcggaggcgctggcagtagtcgccgagcgcgaggagcccgcgcgccgcctgcggcagcgtcaggatcttgtacatgttctgcagcgtctcctgccggagatggtcggcctgcacgtcatcagcaagatgtcagccgagctctgctcgtcgtcggacatggagatgggaggtaggtggtggtgatcggcgatggcgtacatggtcgacgaacgcgacgaggttgctgagcctgcccatggcgctccccatctgcgccatgtagcatccgccgtcaccggcggcggaggacgacggctcctcctcctccggcggcggcggcggcggcgaggcgtcgcaggaggtggagacgacgacggcctcggcgagcagcgagtcggcgagcgtctgcttcagcttgtccatgccctgcgacagcgcgtcctctaggtggcgcgccttctgctggagcccctgcacgtcggcggcctgccgctccgtcatcggctccagctgcggcgcgagcaccctgatcacctcggaggggcggaacccggcgatccagaggaagaaccgctcggcgccggtgcgccacacgccggacatcacgaagaacacgtcgcgcctcgccgcctcacgcttcgccgcgaacagcctgtcgtagtgcgccagcgccgcctccaccaccgcccggagctccggcccctccgccgccgcctgcagcgacgccctcagctccgccgtctgcctcccctgctcctccacccactgcgcgtactccacctcgaacgtcaccacacctgaacacaacaaatcaacaaaattccatcacaattcttgtcgagctcgatcaatcgatggattcttggagagaagctgacctgaatcgatgggcgctggtagggtggctgggttgctgctgcggttgatgtacgcgctctgcatagctcagccatacgtcagcaatgacagccatggagaagaatctgctcgtcacaagctggttttctttttctttttcttttttttgttcttacctgttgccttgctcgggtgatctcctgctccagatgcgccagcttcatccggctcgtctccaggttctggatgtaagcctgtcacaaaatcaaacaaacctaaattaaatcatatctttgaatacaaaatcatgaacaatgagacgaataatgtgatgtgatcatgagcttgctcacctttttccgtagccggctcttgcgagctgcttctctgttctgcgcgagccgcctctggatctaatcgagaaaaaggacgaacaatcaatcgaattatagtttgttaattctaattaagctagtcgtaattagcaataatttcgggcgattagtttagctagcttgtgtcagagagattttgtcccaccttgtctcgaggcttggacgcctcctgctcgaagctgtccgacgcatgcctcggcgattcttgcagagctgcagcgttgtcttgatcgtctccatgctgcagaggcagagctagctgatccaacagcaagagcgaatcaaagattttcaagaaatacatcagcaagatgatggaggttgttgtgttaattaattattataaataaataaataattacctggctctcgaacttgggctctgttagcggcggcggcgcgacgaccatggcggcggcggcggcgttgctggtgctggcggtggtgtccgggcggatgaaggggtggtctccccagacgccggcggcgaggggatggtgccggcggtcgtagatccccatcgccgccggcgccggcgcagcgaactgcgcggccgccggcgccgccgaggtcatgtaccttggcgcgctgctcgccgtcgccgccaccaccacaccaagaaacaatcgatcgatcaattcaattcaattcaacaccgccaccaatcaaagaaacgagaagaaacaacagctccgatctctctctctctctctcactcagagctggttcggttcaatggatatggagctcggaataatcccgacgagctctctcccgctcctctccccgctaatggcgacgacgcatccctctctctcatatcgcgtagtagtatttgattgctttgttgcgtgctggcctggaccaactcacacactacactctctctctagtttctctctctacggcggcgtcgcttccaaagacgacaaaacggggcacagaaagggtgtcgccttgttcgcttccgccgtcgccgttatcactgacgacgtgatggcgtcagcggtggtgggggctgcgtttgagagttgaagagaagaaaaagaacgtcgtttttcgctagtacgcatctcaaactgctgactgatgtattttaaaaaatataaaaagttaaattaattctttttaaaatttataataattaatatttaattaattaggcactaatagtttatcttattttgcatattttttcaatgcttctcatatattttcttcatcttaaaatataccccctccgtctcgaaaaaaggcattctatagtaatggatgtgatatttcctattacaatgattctagatgaaagcttgtccaaatttgttgtatcagaaaatgtcacctctaatattatattgtctttttttttatggaatcatggaaggagtactcctataaatgatttctataaatgattttggaggtataaaagtacggctgaagacgacgcagcaagcctcgctggcgcatgggggcacagggcgcttgggtgggcccagaggcgggcgcccacgtggcaatgagtgggtagtatgggtggggccgaggtgagatggcggttgctgcgtgtagatccagtttgtggggggtacggtaactctgtcaaccgttaggtacatcagttgtgtgaattttttttttgaaaaaaaaataaaactaaggttattttagtgatgggtttgagttttgtttgtgaatgctctgactatcaagagggggatttaggattttagttaggttggctcttgcatacaaatccgtacatatacatgtttcgatttataattataagtagttactccgttcatataataagctcattttttcttctcacatctatctcaaaatatatttatttttaagtaatcattctatcggaatttatgaaagtatagagtataaagaaataaataattgtattgggatttaataaagtgggagtgctataattttttttagttctgtagtattaatgtgtgggatgggtgaaaattaaatttattttaagacgaaagaagtataatttaagacatgggagtattgctttagtggctatcattatcaaaagtaatagagacttttatgcgtacaccaaaatttggttcaatggtatatactccattggcattaggtatatcatgtgcaacctattttggattgtgtgctcataggaaaaggatatacattctaaactcttactagtactgtgatgttatgagcacattaattttctctaattcccattaatttaaatcaaacagtcaggacttttctaagagttatgtaaaaaaaaataatacgtgtagcgatgttatttccaataataatgttgaatagcgtattcatatgttagaaaaatacctattgaactcattataaattgataaatcaatgttacggcacaatcccattcagaagaagacatattttgacggaatgaaaaagacgcactagttactggtacgtgcattttttttgtaacgaaaagaaaaaaaaggaaagtaaatccatgcacgtaaaaccgttacttagaccggtaccatgtaaacaaaagaagaagttccatgggtttcatcacgtagagtaagatcctagctttccaaaggaacactaaaaaacaaaaacaaaaacaccatttttgtcttcaattgcgaggtcacatgttttgccggtggatctcatcggcaggagacgagacaacgacggagaagcgggatccgacgtggcggcatccacgtcatcccgagggtgacaggccaccgtgaaataacagcagctaagcactcaagcttttcttctcatggcgacacgtcatcatattttagaggttgaatagtacttcctccgtctaaaaaaacaatttactagatattgacacgtcataatactacgatcatatatagtattacaatgtatcaatactagcaaccccatcgtttagtttattcgtggcatatttgcaatagaaaagtaatttgtaaataaaatacttgttcttagtgatccaaaaacaaaagctgaaaaataaacttcgataaaaaaacttaaaatgaactttaaatctaagatagaaaatttaaatttccgctgataaatataagtataatcgccagcgatgaagggagtactagcttatcttgtggagtagagacagtgacggcagcggggaccatgtcgtcattgctggcgtcaccccgcatcagcacagtggggccgtacgattggctggctcactgactgtggcttggccggttggccgtgcgggtgggcccagatataataggcatcccttcgatggttaaaatgcctagttatcatatttctaacagtaaaaataagtcgatcttaaaaaaggtctttttaatatgggcataatcattagagcataactttgttcactatttattttaattgtaatatatttataaattgtaattttatggcagtttttctcacagcaaatgtatgcgcatatgattctcgtccatcgttattgctattggtatttaaatgttttcttaaacatgtagcaaggaattttacatggtgttttgaataagcgcttcatttggggtggttgtttggttaattattagttgtcacacatatattgttgacactactgagtgggctaaagcccatgtgaagaattattcttaagaaaatgataaaggtttttttaccatatgtgtaggataaagaaccttcactttcgatgtcctttactgggataaggcgctgataagttttctggaaagcgccctgggcgagtaatcgctagtctttcccaataactcatctttctctacgttcgggtattgcgcatcgacaccaacaccaggcacacattgcacatgcggtgcgtgttactccccgtcaagacaatcctcttcctgaatagaaccaggactgttggtatgtctcactcatgtttcgcatgtttaatgtgttcatgtttagatcagttgagttgattatgttagtttacatgcttattgtcatgatttatttataaataaaataaatttatatgtgtttctatttcaaatatatatggtctttgttttaatttctcccttggtccacactcaagattaaaatatgtcaaccgagtaatttattcataattaaaccggttcaaacaaagtactttctttcacactaactggttgttcggaacgtggatatctcacataggttatgattgacatgatattggtctaattcaaaattcatacactccaaaacaacttctaatataacttactagaaagtggaaatataaactttttcacacgaattgcatgcttccaaagtcataaacctagcccttttgtcagaaaggacggcaacatatataattgtcatggagtagtaaagataggaaaaatctttttctctctttttttaatggttgggaccaactttgattagttagctctgagttagttggcgatgatgcgtctctcacaacgtttgagccgtcagtgcgtcgtcagcaaattaactagcggcacttggaatctgactatttgtggggggtggaccccacaacatgccaccagggcaccagggaatcaggatctcctttgcagccactcctagtgctttctgcactattctggtcaaaatgaacctctattctagcttatagatttgtagtttgtgaaaccacatgcatatctagtaccactccaataatctagagccataggattttatgcttaattatcttgatgagggatcatgtattatctatcataaaatttcagccgtgcgatggtattcgagggcatcctcatcattttcactggaaagtatatccatattcctgactgtgacgatgataggaatgtagttcgacattttattggaggaaactatatcccttgatttatcatcatctctattttaacgtaatagttgatgtgttgttcagaagtaattgtcatgcaagttgagtgttgactcctacttttagtctcttaaagtaatcaagtgttcaccttggtttaactgttttgttataagatattaggtgccgcgctatctgttttgtgggagattatggattttgaaagaagttgacgacctagaagaccttcaatattagggcgaatcaactatttagacctccacgaatgggtctttgtttttagttcaatcaatttttcaaagtgtagatttcaaaggtaaggtgaatctccaaggacgagcatacacgtacacatgtcgaaaaaaatctccctctctatggactcccatgtagccatgttgtaccactagatgaagattccaaaagaagggcacagccccaatactgtggtggacctgacctcactttgttgtttttgtaaatagtccacttgatctgctaaagaactattagcaccaactctataatttagtgtatagagtaaaatgcaccggcggttcttaaacttgtcagcaggtttcacttaggtccacgaacttataaagcgcacatcgaggtcccctaaacttggtttattgtatcatcccggtccaaagtcgcgtttgaccgtagtcttgcctacgtggcacgccacgtgaacgatgacatggtttttttttattttttctctcttcttccttctcttttctcttttatgaaaagacgatgacatggacgatgatgtgtatgaggcattttcatcttttcgacaaggaagaaagagnnnnnnggaaggaagaagggagaannnatnnaatnnnaatccatgt

SEQ ID NO: 15048 - DNA, 16696 bp, Oryza sativa
tctgtttgccatgcctaaggttttacagaatcaccttaatttcttttgtgtaaattcaaatggaacaatgggttttttttagaacagagaaataataataaatggaacaccaattaagaaattcttacctaagtttgtggatgttgaaatggtcttcaaggtatcccgggtaaagctccatatgattcttcagttgatcaccgtttatatctaacatatattttcttttaagtgagagagagaaagattgaaaaatcaattcaacttttgagatacatatgcggtgtgccttcaccaaaaagagaactacatagatcctgaagcataatgtgtgttattggtatattttttaatgtagattattatttgattactgcttcaagtctaggatttgtagagtagtatttcatggaagtgtagattcttaaacgattttaaattcaacaaagattaggttttctcttttaaaaggaagaggggatatattcttttcccttgtttctgaatgacataagagcaaaaaagttgtcggtacgtcatctgtgaccaatggactaaagatgtgtggtgatgcatgaatatggaaaaaaaaatgctctcatgatatattagtataataccctatagaagatatgatccttaaaataggtttacatgtttgatcattctcaacctcttaggaatataattactaactggagagatggagttccattgattaggaaataccatggtctataaaaggagatgattgtgtgcatcctagttggtgcagaggctggaagtaatatttctattaattatctaaaaatattagtgacaagaaattttttacatttggttgttgacaattgatagaagcataaatacttgtggagaaacaaagatgatgagtcatgttctttttattttcagcgagctgttgctattctgaaaaaaaaaacagatcctgatgctatgatttagtttgctatgacactgtatagttttcttcaaggaagattgtgataatatactacaaggcaaaacattctacttcatgtttgccatgcatggagatgaacaatgtgatataaataaaccttaaaaaaattggcacatttctctgcaaggaaaaaaacctactagtccttcctttttctttttttcttcttttctttttgcgacgaaaaaatttctagtccaagtaacctgatattggccaaattttaaacacctccttttgtggttgaagtgtgcaaaataaaattactatactgaagaaatcaaataaaaagtcgacaactaactgtaaaccgaataaattgaacaaaataaaaaaccgagtagcaaggtagtacctttcctgtgaggatgaccagacaagaaccaaatcaaccaagcaagaaatggagcaagaagaaaaatggctcaagagctcctcatatatgcaagtgctcttgctgaggtccaaagggcaaacaccacttgcccacatgaaaccatgtaccaaggttatataaggagccacccctgcttttttccccctcagaaaggaagagccaattgcagagctgcttttgctaagaaatgttatcaccagggccttcatgctagcttaggatgcactaattattccttttagtaaactaatcaggtgcatatgtccaaagttaccagtaaatataatgcatgatcacctaactaccagaaagatggtaactttggtggtgtaaaagttaaaaaagaagaaggcttttcaagtaccatttactactggcacctgatgaactacacatatgcacactgcaaaaaaaagtgaagcttgaggttaagtagctctgtgcacacaactacacactgattaggcagaaaggcatgtataatgacagattaagaaaagatagtatatatacttactcttaacctagtcaccaaagtttaaagggaaaattagagaagcttgcttgattaagcaatccttcaaaggcaccttgtaatcattactagttttcagatttgcagcaagcaagcagccatcttattccagaatctcactgttttgattagcacatacacaatcagctagctaaggatgtgttagatcactaataaacttgaccatactttaatttgaagcaaattaaattcttcattgactgtgccacattgactgaactgaaggctcatgaagacatgcttatctacacaagattttaaattgagaaagattcatagtagtactagtatacaaaggactctcatgttacttgattccatatgcatgcatgatgcaagtattaattaatgatcaaggaaggattaactagattcaacaccttaactcatgcaatggagcttaccttttctagcatgtaatcacaaagaggcctctttacagaattacaccctcttttgtcagctatctgttcatgatactgctggtgttcttcatccatgtttgctttttaggtgccatatatagcaaatcatcatgagcaacatacctaccaggtataggttaattactgatgtttctttttaattagataacacattctaattaattaacccaaccaaaacaacataccacattgtcaacttaagatatataatgagtaagttcaacttaaactaagaagtaagatagtgccatgtacttcctctcaactcatgacagaattatatcctagaatgtatgtagccaaagcaattaactattctgatcaactatatagatttgaaccttttatatggaataatggatgtgacagagtaagtttgtcatcaataaattgtgttttttatgttattgtccctcttcgaatatataaaaagtagaatatatagtgttcaaagatatgttttgtcaacattgaaaaacagataacatcattctttatctactacaagagggagtatagattggtgcgtggcaacgaagcattctcctttgctctagctagaggctccagagaagataacacacctttggacctaattaaagaagatatactctgatgtaaagcatgcacaagggattaacaaattcatcaacagtgattagttgattaaaccacaatggttttttattatgagggctctaatgcaatgggcccattgctgattgcagcattatcaaaagctgccagctgcctctgtcactatccaacatttctttctggttcccatagttcctttaatgtcttgaatgtgtatgggttttccccttaattttcttctttcatggtttgcacaacttgattttccactccctcttcttaatttcccgctctttcgtggtacccatgattttatttgtggcttttaatgctttgagaaaagtttatttacccatgcatcctttttatcaagtgtggacctgtccatagaggcctacaagtatcctcgatgaattgtatatattttgatctaatttcctagaattttatatatatatatatatatatatatatatatatatatatagagagagagagagagagagagagagagagagagagagagcaggagaattatacattttattattattcatgtacacctcttctatcatctgggtcgaattcatgtaacctctagtactcccctgtgaattatgtgggttatttgctctttagcttatcatccacaaccaacatttgaatttcaaaacttaactttagagttgattttgattttttttaccatattttattttcagtattggctttttagatgctaacaacacatatgtaaaatttttgcccataaattatattttggtcgctaataagcgttacaacttataattagttatagtcaaaacgaccggactcatttgtaggtgcaaatttaaaagttttaatttgtaatgattatttctatatatcttgtataaatgatctagtgggatttttttgtggtacaccaaaactttgtgaaccattcattctacagtcatccaagggccaatatttttcttacctcttgggtggtaagatctcatatattatcatttatttaaaggctattactattaattactaattgaaatatggagagaagaaatgtttccttgcatgtaataaatgatcttgtgacatttacattatccaccagagtttatacagtcccatttccttactacttttttttcaatatgatacatataatcattaaaatgaagttaattccataaacactgaaattaattaacttcagccagatcagcacatgtctcattgtctggcctcacttctacagatgctgcactaaagtgcttgattggcccaaaaaaaatgtcagtaccttgtgttcaacatgaagttaaccataaacagcatggattcttctcaggaaaagagagaaaagacttggaggagaaaaggaatttgcatgggaccaaggaaagaaaaaaaaaaggtttcgaaagcattagctaaaagaaagaaagagtggagcctcaggtggtgagaggggttctatttcactagagagaagttaataaagagtggtgctgcatgactaagattctcacatcactattgtgcttgtatatatgcaatcattcatggctacatcaatatatgcatcatgcatgcatgtataccatatatgtatgtatttgcaacttgctagggaatatagaactttagacacctagattttggaccacatatatacactttgacgaatacattatacatacaagcctagctacttggaacatagatattttgcaagaagcaatgcaatattacatgatacttcttttagagagagagagagatagatagatagattttgtgtaatttgggaacacaaaatagtcagtaaaacttgggaagttagtcaatatattctgtcatttcaattggagtcagtgaaattagaggaatctccaaattgataattgtttccaaggtataaatgtagcaggatctaaattgggtcttacaaaggaaaatgagaaatgttatagtacttatgaaagaaggtaacatatggtatcatcttttctaatataaatttggttcattatgatatacaaggtcctggaaggcttcaaattttatgatgcctctcaaatattgtaaaatcactcaaagaaaataactgaaaccataagagtttactattatatgcacaagattaatgtagtgcagttttcttccatgtaatcgacaaaataagtagtgcatgcagtttggtgtgtcatcagcatggagtagggaccgcctcatcaaacatggcctgagttaggatcaaaagtgtcatacaatgagcaagctagagtgcaatttgataatttattctactaccaaaaagaggccaagaactagttaaacataacaattactcaattaggtcttaagataatgctggatgtctcattgtgatggttgcttgttgatcaatgactagatgcggcctcagaagccgacgcaggcagatgagaggtgaacatttttttctgtgattttggtgatgagatttcgtgtgcaaaagtgataagtgctgagcacaatagaatttggccatctggctgcaccattcggcgattccttgcatttgatgctttataaattttgcaacttgcgttactgaagaggcaccaggtgacagattcaggaaacttgcaaattctcgcatgaattaaactgttaatttaacctttcaaaaattcaccagtctccagtggcagattcagggaattaaacatattaattgtgtcgagtgatactatgattggcattattttaggtcaaattagcaaagtatatgtttaatttagcctaacattcaattttattttttcttcagaaggttattttttttaaaaaaaaacgcttgatagttatacaactgcactaattggttgtagcttcgttgaagtaaaggccagaatatccattttattaaaaaaaagatgacgtcacatgtgtatgagctcccactcagataaaaacagccttttacactgtaattaatcaccatttgttatcaccagtccgtgattacccaagagcgcaacacgtagtcatacacttagattggctcacgcatctactttgtcgaatcaagcaggtagagaaaaataagacacggagatgagaaagagaggcgaagtcttggataacctcattgccaatttgccaatataataatttatcagttgcaaagcttcaaccttgttagttaaacgctgatcattatgaggaggacacttcgtgcactcaagtctgaagccaaactctttgacaatatgtgccagaagaataattggcaccacttgttttgtcatccagaatcagagaagcagtctattttttttattaatgaaatggttacttgcaaagatctcgagattatatttgcatctctctctctgaaagatactattttaaacagtactattaattaacaagaagcaagatacagtcaggatcagaggctagctgagcagcagtgacatgcacatgtcaatgagataggcgttgacttggttagtgatcatcaaatgatggcctagcttgaaccaccaagcaattgggttctaggtagcaactagtggtttttttgctgaaaaaagtgcaggttttcatctgtagatgcagagaaggatgatatgaaacagtgtccttgcagacacataggatgagccttttgtcccactcacaatgcaataattggccaaagaatacaagcaattaatcagcaaacataatgcagcaggcaatgtcagttgtcaaggtgtcatctctgcctcacctttactttccctttcttgatcctttgcatggacaggtatagattgggtggtagctaggtgccaatttgtgccacacaatgtaccccatcgatctcagaaagacttcatttctaagtgctccaactcttgtccccaaaagactttatttttatcttttaatctactctagttccgtaaatcgaaaagttttatctcttcaataactcttaatttcctcttacctattactccgcagcactattttcttattaatgaggggcattttggtcttttaccctcatcactaatttgtcaacttcgtcttaaaattgaagtctttgtgagacagagggagtacatatggaggaccccaaccacaaaggcacgctgctttcacaagcttggttcaatctaaggggcctaaagttgtggaggaatatgtaactgaataacactgctatgtgcctcactaagacatgactttcagttgcttatgaagctttaagctgactggggcttgcaggaaaggagaggatgcaactcaccaaagtgcagagaaagttgcaaagattcactatctgtgtgatgcttttgacgatgtagagatgtatgttattctcatgtagctttcggttggtgcctggcttaattttagaatagtgccatgtatttagatttgctatatttgccacttgcataactcttcacttatttgttttcataccaaaaaaatgggctcttgatggtattgaactatcaccatattatcaaggctcctcatactatgctttgctatatttgtagcataagcctgaatgtaacctagcaagaaatcaacagagaattgcatgcagattagtcttctgcttgctacacagcaggtgattcattttcagtagtacactggcagtcagaactgtaattttaagctcttttgtatgacacatcaccatattttgatgtaccaaaagattcatgactacaatagcacattgtacaacatacacattcatgcgcggtttacgatcgcgatacgttctattgttaccattgcataaaagtaacacaaaaagaaagaactaaaaacctctcaattatggcctttttttttacatcatttcttcccagaagctgttgggtagatcctcctgaaagcccaaaggattctgcacccaatctgctgctgctgcttctccttgatgctcacctgatgctcatggcttcttgctgcactgcccttgtgtcctctctgctgctgctgttgccctttgagagaactggccacagctgcttcgtacaccattgctgcagacaaaaactgctgtttttttccccttgtcttcttgtcaagaacagattgccaaattgcccaaattgcttgcctgcttcaggtgactgaaaaaaagaggatgtgatgtctcatatttgtagtggttgatgatgcagcagagaggaatggctgtcttggcagccaaggaaccgaaactggcatgtgtctgaatttctaaatttctagcaggtagcagccaaggaactgaaattgacatgtgtctgaattatgaatttctgatggagattgtggtcaaagtatggctcattccactgaaccaaatgacaaatatttcctatgaaaactctggttttggcctcttcctggaagcctgggagaggaaggtacaattgaaggagtctaagtagatgaattgatggatggtttctttgtgcattatttattattcgtttattcgcttattcgcggaataagcgaaacaacatatttccaaacaaaaagtaatttgtgaataaaatttttatatacgtgttcttagcgatctaaaagcaaaaggctgaaaaataaatttcgatgaaaaaaacctcaaaatcagctccaaatttaaggttgaaaattcaaattttggctgataagcataagcataagcgaaaagacgaggccctcagtctcttcaagtagtctgactgtctaccttcttgttattgtattttttacaagaaattagatgccgcctatccgtttgtaggagatttttttaaaaaaaaatcgaaacaatgtatgtagacacttatatacccacgtatatattcatccctataaaaataaaagaattattactcataaatatgatcatcagtgctaagtaaaatacataggtgaacaggttccaccccccaaaaaaaataaccagtatctacgctcagttcgtggagatttcaagattttgaaagcaggtgactgcttagatgttgggagtgaatcaacaggctttagaccccacaaataggcttttgtcatcaatttgatcaatttttcgaagtgtcctaaatagttctccaaaaaagaaaagagtcataaattccaaagctaaagtactctgtgacgcaaaatatctccctccatgaactcccacttagtcactactccctccgtcccaaaaaaaagataaaccctggtttctgtgtccaacgttcgactgtccgtcttatttgaaaaagttatgaaaaaaataaaaagacaagtcacgcataaaatattaatcatgttttataatctaacaacaataaaaatacaaattataaaaaaatttcatataaaacggacagtcaaagttggacacggaaatccagagtttgcctttttttttttggacggagtgtagtcatgttttgccactggatggagattccaaaagaaagggcatagcctaacactgtagtggacctgatctcactttgtggtttgtgcaaatagtccacttgctctgctaaataactattggcacaacatattgtggcatcaaaatatcaaacgataagcttccgttctgtttgctttgtctaaggctttttacagaatcacctttcttttgtgtaaattcaaacagaacacaatatatatatatatatatatatatatatatatatatatatataatggaataataataaatggaacaccagttaaaagtggtcacctaagtttgtgcaaatagtccacttgctctgctaaataactattggcacaacatattgtggcatcaaaatatcaaacgataagcttccgttctgtttgctttgtctaaggctttttacagaatcacctttcttttgtgtaaattcaaacagaacacaatatatatatatatatatatatatatatatatatatatatataatggaataataataaatggaacaccagttaaaagtggtcacctaagtttgtgcaaatagtccacttgctctgctaaataactattggcacaacatattgtggcatcaaaatatcaaacgataagcttccgttctgtttgctttgtctaaggctttttacagaatcacctttcttttgtgtaaattcaaacagaacacaatatatatatatatatatatatatatatatatatatatatatatatatataatggaataataataaatggaacaccagttaaaagtggtcacctaagtttgtgcatgtgcaagaagagattatcatggcagcaaaatctggaaagttagggacaagcacaaacatgtaaaccattcccttaatttgcagccatttcttacatttgcgatcatccccaattgatggcacatccttgaagaatatgactgttggggatgctgcaagattaaacagtttgtgagttgttttacgtgaacaatggcttttgcattcaccaactcgtgagataaatatacaggcttatacaaaaggacggctgccaacaacgtggacctcgcggacaaaatatacaaccgggcccacactggggtaacattttgacaacaaaagaaatttgccgttacaagaaccactccctcagcaatctagaatctaaccaagctgagaggtggagccaaaatggcgcggaaataattatctacctggcattgagactacaattagctcaaagtttggggaaatgaagaaaccgctacccgcgccgcttccacagcacgaacacctagcaaaggaaaacatgccagagatcagaaaacaggagagatggttgatgttttttaatacaatgactcgtgcagttcttcaagaccctagtgtgcataagcaatccctaaagtcacaaatatttgattttgatgtagaatgagtatcggtcaaaacattcaaaattatggcaatcaattttataccatagcaagtttgtaaaatctaacaagtttatgatattatgacagtacttttcgaggcagatctatgtatatcattcgttttgtttttaaactaagtatttgagaaattattaatggtcggaattttttaggtttgacttatgttgtcctaaatgtcaaatatttatgactggagggtgtaaaatcttgccatatgcataagccagcgtttgggaatatgttaggactaggattaaggcatacctgtacagtaactttacaaaggggtaagaattttctgcaaaagctaccagcctaatttcaacatcatcctggtcctgaatttgaaggatgagcatacacactgccttgaacagcaggcttctgctgctgttgctgccgagattgcagctgctgcctctgcccaccaataccatgcccatgtataggcacgccacctgacatttgcctttgcaacatgccttggctagacactgacaacagcatttcatttccaacaaaggtatcttgaggcgagctagctaactgcgaggttgatggaactgtagttggatcatgagatgactcttgtctccgctggtttatagatgaaacaccacctgggctacctgaatctgtactctttgcaatggatgtggagggaattgcctgattatgttgaacttggtcaacaggtgattctatcctaccatcagtgttcatatgacggttttgttgcatcaccaatctctggatgttgttatgtgatggattcatgtaccgttgttgctgctgctgtgccaatggagatgacgaatgaagtggagcttgttgagaagttaacatagtctggttaggagaaccctgcattgagctttgactacctacatctgatgtttgtattggtgaatgaggcatctgagacccatatatcttgggttgattaccaggttgaaccactgatggaaccaagcccttattaccagcaaaataccccgggccctgttgcaccatacttttatcagaaacttggtttttagaggttgtagaaataccgcttgcttgagtggcatcaactggtgaactctggtgcatcatattccctcggcctaagctcttcataagcttagcttgctggctaccttgatttctttgctgctggttttgtctagactgctgctgaccctgttgcttcttctgcttatgcgatgtattaacaggctggttgggaggcactgagctatctagtgaattttgtgccggatgctgctgtttatgttgtgactgcgaagatgggatagcactggaagctggcccttggctctgctgttgcatttgtgaaccattctgtacagtcgacactgcactggctccagaaagtgggtgctgttgttgggtcatcatgcattgttgcatgtgtctatctttagccaagcgcatagcataagcctgctgctgtgggcttgactgggttgttccttgaatatgggggtgatgtgtatttccaagcacgtgtgattgttgtggcatctgatgtggttgggatgactgaactggaaaaggttgaccaggtgaagatgctccgacattggaaaatggagtaccactgaaatgaatggactggttatttccctgcgatacttgcatctgaaactccctgcatcatctgcctatgttcttccatgttctggccaggctacatcaaagaatgcatagcatcagcaaccacataacagcaaaaaaggacagcttctagctttttactgattaaattaagctttggatatcgtaagtatgtccatgagctaaaaaatggatagatcgatgcatgcatcattaactatgggatgtaataacatcacaaaaaagcaacatgcgtgctctagctatgattctttcagatttgtaatatgatactttaaaactatcacctgctaaccatccagcgattgatatttctaaccagaaaactgagggagttggctacagtattttagctttcagtaggcctagccaatgaagaatgtgcgacactaatgattaaccaggtttgtgcataggcccatcctaagtgggacctgagtattaagtgaattttgggcctagagtttgaaaataatacttgaataattatataaattcgcagcaggaaggactcaaatttccaggttccatccagtcttcccacaaagcatgtataagcaatggactgcatggcaaatgtttctgcttgttgtacgagcagtttggtcagatatgaaagtttaaaataacatatacatcagatctgaatagaatctaccgcttaaagagagaagttggtaatggatgcggtgcatactctatggtgatattttatgataaatcaatgtaggcaagtgtgtcgtattgatgtattgtaggacttcctaaaataaataaataattgcgtccactacacatgcatacgtgtagatatagcctgttgatatgattgtttaattggaaaattaagataaatacttttgcattttataagatcagagtatgtgatacttactaatctgaaaaccattgcagcagcacacatgcactgctagttaatagaataacattagaatattaaattgccagttagatagaggaaccccgcaaattgaccagtatcaccgattttcacagcagctaagtttgcttgcccacaacacatacaagccagtagcttgaatgaagttcatatatgttcagtcaatcagtacatattataactacttaggactggttttgaaactatgttatcatccatatgattagaacagaaggtaggcggaatacacgatattctatgcctctagcacacacaccagccaatggagagcacaagacatgatgaaagatatatatcataacacagaatggaaggaaatgtttacccgaagcatctgcattggatcgcgtggcctcaacatagtatttccatggccaggtatggtaccaggatgaacattcaccgtgttttgcatgccttgcccattgttgggaagcatgtttccaggtgaaaccatatttagcattcctgaggaaccaagccttggaaagggcggcctggtcactggagtaccacgatttagtccagtcatcacccccataccatgagcaccaggcatcatccgaacaccacgatcaactccagcaggcgcaccaggaacaggcaccccaggttgctgaagacttctgctgttgagcatctgattgtactggattctttgttgctcatcaccctgcagagaggtaggtctaggcattccgtacctctgagaatccctgcaacaaaaattttacagaaacgaacattaaaatgtaaaattaattttataagctagagaaggaaaataggatcatttacctaggagtatttggtgttgaaggtgatggcaaagtattgcctaaaaccataccaggagaccctggtagcctagtattcatattaccagtaggaagggtggggccaatggaactgggatggtttggaagcattaaaccacttgcatgagatcccgagtaaccaatagaaagtgcatccgggtttggagtcattgcatcacaaagatcaagcggcctattggtagttttaaatacgagcattagataaagtataaagaagactggcagggactgtggatacaggaaaagaacatataaattgaacacagcaatgctcatacatcaaaatgactccaggtgcacatgcttgagaaagtgcatgaagatgagaagaatggagtgggtttatctgcttgagctcttggctctcaccctgcatgaccaaaaaagtgaaaggggacatagggaaaatgatcagactaacgtgggtaaacatgtaaattcagaaaatacacatggtttaaattgcatatacagcaacaaatataacactatttaacataaaataatttggcctaacaaaacttaagcgagagataccacaaatatcataagattttatatccattttaaatgagagataccaaacataaggaaagaccactccacaattcatcatgacaacccaagatgaaatcagcattttcaatcattttcttatacatgtcaaactgtagcagatgattgtcgttactgccagtaatgagataccatatgatgaagcaagagcgtataaaacaacatgacagatcaacacattaacattgaacaaagaagaataaccattatgtactacacgccgtaggaaaatttacaattctaatatactaatacaaagtcaagcctgtaaaaggcttttccaaaaaaaaactaacctttctacgattcggatgcaacttttgaccaaggaatattattttctcgaagtgtgccttaagagtctcttcctcgaacggtccttgaaggcgctggaacaggtgtctagcactaccctgatatatttacatggaacagatcacaatgttaactgttaaaaagatgacatcctttgagcatctatatgaacactattggacaagaaaaactagcctcacactctgcaggtcaaaacaaaaactggatactaaatcaacttcagaatttgaaacttctaattctaaatcccatttacatgctaagagggataacacaagaaaacataaatgggagagcaaacctttgggatgccaggcaatgtggactgatagtgttgtgatgagcccgagtcatctgcgctatccgcaccatcacctgaacctttttctgtgagaagtttatggcgatctttacactcgttaggccttctatatatacactgcatatacgagatgccagaatccacaattaaataaaacaaataaaacatcaatgtactaaaacatcacattatgatgatcatatttgatatcacataagatccaatgtacaagcgaggaaataaacaaacaccaattaaaaaagaggattgacaaaaaagaatacaaaatgctaaagaagtggagaaaataacatggttttcaataaaatgatttctacaaggcagacttgccggtactgggaaaaacaaaggattgacatggcaaaaaaaaaagaaaactttgaagtcctaaataataatatattaccttcaattgaacaatgctgttcagtgcgtcactaaccagttcccagttttgacccatatcatgtacaagcacaacaagagcctaatataataaaaatgttaggttatttctgcacgatatagcaagatagaaatgatcaattattttaacagccaataacctgatcctcaaagctcgaccatggacttccagggcctgagtgactagcagccatctggcaaaaggatcaaaagttttagaaaacaggtatactagtgaatgtgcaacaaccaagaataagaatggagtacataagatgttaagaaagcaaaaaaggtatgaaagacaaaaaaagagaataatatgacgagttttttttccctttattcctctgtctcaaaattcaactacctatatattttggtcaagcggacagaggaagtagtaaacttccaattttcccccatgctgccttcgataaaaccatcacagagccacttttaggcaatgatttcagataattctttttgcacaaaatgtccaaaaactacacccttttgaagcattggacccccccccctctacctcggcgccggactcattggcgaggtccactgccacggcaccactgtgtccccctcgctcagagcagcggcggccgctcgcaccgccgctgcaatggcaagaacatgcagcaggagttcatacaacggcaagttggagatagaggagcgatggatgg

SEQ ID NO: 15049 - DNA, 563 bp, Oryza sativa
cggcccaagggggctcgcggggaggggaggagagagggagccagtgggccgggtccaccttgcgtggtcctgggtggacccgcttgtcggtggctcggctcaccgtgagcgaggtgcacgcggggcgtgctagggtttgggaaggggaggcgcggtgcacgcgcggctcgcggtgggtgcggatgcggcgggcccacacgcagcctcacggctcgcggtggagcgcgcgcgcgagcggggctgaggggagcggctgaccggggttgtcttgacccattcgcggccgaggtggcaccgacgtggcgccttcgtggcagccacgcaggccggcgagaggtagacgacgatgtcggccggaacggatggcggacggcggctacgaacggcggggcgaaccacggcgatacaggcgaaagcgagcacaccgggtggtgtacgagacgaggggagacgagtcaacggctcagattcaccggagggagttcgtcggtggaggattgcggcggcggccaccggcggcgagagaagaggggaacgacgactaggcgaatagggttcgattc

SEQ ID NO: 15050 - DNA, 652 bp, Oryza sativa
caaccggcggcggaaaaagggggaaacggcgacgaggtcacgagggcccgattaccggcggcgagagcatctacgcggctacgggaatccgtccctagcgttggattaggaggaaacgcatcgagggaggccggcgacgagaggcgcttccgagctcgggcggcgatggcggcgagcacatggcgagcggcggcaacggtcggggcggcgccggctagctacggggaggctactcgtgctactacctgagtctaaggggaggagatggaacgaggtggaagaacggagagaggcactaccgtgcgggcgggcgcagtgacgagagccgacggcgcgaaacgtgatcgtttcggcctcgggccgaggaagaggaggaagattgcgcggccaaagtccccttccgcgtccttgctcgtgccggctcctccgacacgcgcaacgacgaacggcgatggcgaacagggcgacagtggcagcgagagacgaacacgagggagattggagggggggagcttgggtttaaatgggcgacaaggtcggtttgggagagaggaaccgacattggacggtcaagccgcgagctggcgctccggctagcggccaaaacggcgacaggaggtgacgccggcgagagggaaaaaaagggggaaaa

SEQ ID NO: 15051 - DNA, 717 bp, Oryza sativa
tttttttgtcatattacatttgtagctatgttttgcacgcttttttgtctccaaaattttgttgtaagttgatgagggagaaaatttgtgtggggaagaaagaatatatagaaatttagttgatttgctaaagaaggttttataaaatagttgagaaggaaaactattgtgaaagttaatcttgaatactagaaaaaaaaactaaaatgaaaattaaaagaagtaaaacacattaaaattagtttaaaactttagaaatagtaaataagaattatttggtgtaatattttatgatttttgtatgaataaagatatgtcattattgtatgactgttgaaacagtttgtaattatcttataattattgtatgactatcattattgtaagaataattatttttgtacgattttttttgactcatgtagatggatcggcaatggatgtacgctgaccggcggtccaaagagtttattgacggcgtgcactattttttgagagtggccgaagctaacaggcaaaggggttttatttgttgtccatgcaataagtgtaagaatcagaaggagtattctgcatccaggactattcatttccacttgtttgagtcggggttcatgccaagccataattgttggacatcccacgaagagcaaggtgttgaaatggaagaagatgaagtggaagacgacaatattccggactttgctcagtacgttg

SEQ ID NO: 15052 - DNA, 678 bp, Oryza sativa
ccctggctctgcttgatgagggtaaagttgttttgggtgtattggcttgtcccaacctttctttgggatcaataggcaaccttaatggtggctcctcgggagatcaagttggtgctctcttttctgctactattggttgtggagctgaagtagagtctttacagggctctccagcacaaaaggttacatctccttttatttcatattataactttgacttacttttacctatttgagaatggaactaattttttaatctgcttttggttattttcacttccagattagtgtctgttccatcgacaatccagtcgaagcttcattctttgagtcctacgaaggggcacactccttgcgtgatttaacaggctccattgcggaggtttgtcctgaattattctttgcctagtacaggtccacgagagttacttgggtaatctggtgtttgaatgctggcagaaacttggtgtccaagctcctccagttagaattgatagccaagcaaaatacggtgccctagcccgaggtgacggtgccatttacttgcgttttccacacaaaggttacagagagaagatctgggatcatgcagctgggtcaatcgtcgtgacaggtatgaaagttctctttttgaacattgaaaacatagaacccaacaacctgaaaaaaaacatagaa

SEQ ID NO: 15053 - DNA, 9119 bp, Oryza sativa
gaggtctcccgacgtggctgatccccacgggctgggtgatccgggttagtaatgtcgtgtgggtaaagtgtaccccctctgcagaggttaacaaactgttcgaacagccatgcccacggtcatgggtggatgtgaggtgattcctagcgtagttttgtttgactactgtttgtgaaattgctgttgtggaaaggagatcgatgtttggaaaaatctgcaactgatgggatcagctaggcccgggtggccgtttgaaagctgttggccgggtgccaatcttgatctattttaaagattgatacattgcacatactccgaccggacgagacgcactgtcttaaccgtgtcgtttgagaagcactcacttagttgattttttttaaaagagttcaaataaaataaattgcaaaaacaacagtccttcccttgaagcctgcattaaacactatttcccatggcttgctgagtactcctgtactcacccttgctctatataaataatcccccccagttgctgaagaagatgaagcggatctcgctgacgaggagtttttccaggagcaagccggctacgatgagttttagggtttcggcctagttcccaagtcgcgcctgtgttgtttggcccaagtcttggcttccgcttcccttttataatgcagttgtgagcttgggatctgtccgcagcccaacatgactgtactcctactctataataaagagacctctgttgttgtgatattccgtcttcctgtgataccagcactgtttcctgggactggtatcgattaacaggttaatttagagcgtcacgggctagttccggtcggtactagttcggggcgtgacaaagaacgagagggaaaaaaaaaagaaagaacagacaatctccgcgatttgggtatggtactagctagcaagattagattgtggggaagaaagagtaccagcacgtagcagcaacaaaccgattcgatctgctttgcggtaaatccagggagcgtccggcctgctgcaggataaagatggtatcacaacttcacaagttgtgcaaatatcaaagatgaacaacgagaaaatgaagaataaattggctttccaacggagaggataaagatacaatcagatgtagcagcagcggacctggggcgctcggttggaaggggcacggcgtagctccccagtgcccggccggagaaggagatggggatggatttctaggtctggacgtctggagtttggacgcctcgggactatatagtaaaaaacacagataaggtcatcagatgtagtaaaataagaagagggaaattaagattcaatgaaaacgagaggtggcctttgcgaaattgtgagcaagaagagagtacctgtaacctgtcactactactactacgtacgagcacagcaccacgcagcagcaaattaaaccgaatcgagcagcaagcaaaggccgtggctctcaccggtggccggcggcaaggatggcggcgcggaaggggcgagggagatgggtataaacgaacgaacacgttgtccgtggggccgcccgagtgggcctgggctaagtaggttaaaggaaacggcttcatgggcctttttttttttttctggtttcttagggtggtggtccgtacttttctaacctggttgggaagaacagataaacgactagtatatatgcttttgaagtgtactggagatacgttgaaacaaaaaggcaacagaactaactatatagtgatatcagtctagttattgccaagagctgaatgctgatatgccaacttggctcagagcaatcttttgctattctaaatttctaatctgtactgccaatgatgtcttattttctttgtacgtttccattagctgtggagctaggcaggttaaatgtacgagtaataactgactaattattgtgttatgtgggacagatccacaagtgaatatatagctgagctacatatagttagtacccccaaccatgcaagagattgagacattggcatgtaacaaaaacgacgacaattctcgagccaattgctgtgcgatatgaaatcgtgatcgatgttggcgcaagcacaaaccgcttgggttttttttttctgggggaggggggggggggcagaaataatgatcagcatgactttatcctacagtactcctgggcatggaagacgtcggaaattcagttgccctcgatcggatgccatgctgcttggcgttgctctgcttggagcgccgcgcttcaacagacagcacagcttgtgcaacgtctactgcttcctgggtgtttcagctcagcttacctgctcgtgcatcacacgcagagcactgctagttacgtagaatctgtagttcgctgtctgattctagcggagtatggctccctctagagatgatgaagactctagctctgcttggggatgattggatcattggactgatctgatggtttgttctatctttagctgtattttgactgttatgtttctcctgttgagtttacacgacggagaaaataacaagagagacgttgaaatgggaaaaaaactaataaagcaagttaagtgaaattaatttgaccaacaacttttaccctgatatggtagtaaaaatgaaccttttctcttgaacaattttatttttctaaaaagaagtactgaacaaattagccgatatgtccatttgttctcgctcatttgttacattccagcttttttttattactatgcataagaacagcgtgcaataattgtgctacccatatgtaatataaaccaacctaagccaccaacaaggaaaccgagagcttggaatatatttgggcctgttcagcaagctggctgcggctgcggctgcgccgccgcgtgcgtgtggcattgttggtgccgtctgtgccgcagccgtaaaacaggcagctgaacaaacccatatatagtatactcctcaaatttacaccaacagcaaggaagcatgcaagtttggtatgagaagcatcaggagctccattacgccgtgtgcttgtttaggttctcgtgatcacggaagcaagtgagctgcggaaagcatgaacacaaccgccgaacatcttccagcgtcttctgaaccctgacagacagcagtgctgagagctaagcatctgagcttcgacttgacccaaatgtccatcctttctgctactccatcagctgctatagtcctgatcagtcgcagccgtgttctatcctcccattccagttatagcctacaggcgagatgacaatttaatttggctaaagctggagacaatgcaccaaaccattataacaaactttttatcttcaagggagcaactttttacttgttttcttttttggcagtcaatctcttccttaatttgacttctgatcgacgatcgagaggagacaaagttagccactgtaggtaggtaagcaaaaacaaaagctcgtcgtctaaaaatgattgcagttttagtttaaagatttataattaaaaagttgtatttttagaataggtctacttgacctgtttaatactatattatctttttttaaaatcaaaggtgtttttgattattattctatgatgaacaattgggcattggagattattggttttgttatttggaatttattcacgaagtggttttggagatgattggatttacaggtgaatcatagatactgttatttcatgtgaccggtcaaaccgggcagtggttgccggtcagaccggcgtgtattgcgcggtctgaccagccgacgctgtgtcaatttcggtttcgggttgtttatttggatatccgtgattattttatgattatggcttctagatggatactatacgtatgtaatactgttgtttgctactaatgagttaagttggagatagcttggtctcggaatatggtttctttgtttgttccatgtgtaggtgactcgatgtctcgggagagtatttgcggtgatggaccgggagtcggcttggggataagacgatgttcgtggtggtcagagatcatgcgggatactaaggctagagttgatgcacgtggttaatggaggttccatatggcatacaatggagttattgtgtgcgtatgggatgtggagtcgaatttggaaggagtccaaatttggtacgattggttatgtaaagtttctttcttgtactagagggtttcctaaggtgtttaagactcctagtatgagtttggttcgtggctttaggctgcctacctcgggtataaatagagggggagcgtgaggcttccctatatcgcttttgtatcgcttttgagagcaattgagttgagttttgagttagggtttcgagtttagtcgaaatttttgtaaggagtgctgttggtgcactttgtaaacatagagagaagtaataaagtcgtaatccactttaagagttcttagatttgtgtttcatcgggtttcggcggtctaaccgactatatatcggcagttagaccggcggcacgcggcggtccgaccggcggcatacgggcggtctgaccggcggcggcgacaggcgcggcaggcatctcggcggttcgaccaatcgatctacatcggtcagaccgacgtgttccaggtggtcagaccggcgcaacaacttcggtcagaccgtgatccgtcgatttcgagggtaacttttatttccgctaaaagttttcggtttttgggtataccaaccattcaccccctctggttggtttagttcttgctattcgatcctacgtttttattatcgttttatccatccaactagtactatactgccatgtaaagataaccattcattgatttaagactgtctgtgtgagttgcatcttattttttaagtttagcatacaattatgcgaattatgtttggttcttttttaccttttcttaaaatttcaacattgacatttaatttggactgctaacagtaaaattatgaacgtctaggctaaaattatatttctttgtttcagtcaagtatatttgatatataagggtgtgtttgtttctttgccaaactcaagcgtaccaaaacattgatgttgccaataagaaaaaaggtattgccaatatttttggtttagctgattttgtcaagcacatagtaacactcttgcggagcaaaccaaataatagcctaacctttcttgccaatttttcttttgtagcaatatccaaacatgcaacttgactaaaattttggcaatagagaattgttgccattgacaaaagttggcaagcgtaaacctcaaataaaccaattaaacaggttcatccgccacaatcattaaagttgtccaataatataagtaaatgttgtttgatggcagacaacactacatatgttgtgctataccgtggccataaaaggcagtagaaaatgatgggccagcaaaaagataaagaagaatgggtttatctagctaagtgatgaagtggagaactacctagcaaagtaacaaaagaacaaagcgagataagtgccatgacagaactccacaagtagaacatcatctctcttcatacaagtagaactcattcatacaagtagtaacacatctagctagaaaaccagaggttacagaaagtgaaaaaaatgctcaatccaaatgttgggcgatgacttggtgataagagctagctgggttctttaggaaggtgtgttttcgtcgcgcataaataatgatgagcaggatgatgaatttcctagactcctgggggcatgtgagacgctgggaatgtagttgccttcgatcggatgccatgctgcttggcattgatcggcttggagcaccgtggatccactgacggcgcaccgtccacaacttctacagcttagaggttggtgttctgcatcttatctgctagtgtgccacacgcagagcactgctagttgtgatgcaaatggtcatcttgttccatgtccacgattccaaccaagtatgggtctctcagtctctgtatagatgttaaggagcctagtcctactacttggcgatattggactgagctgtcagctgttctatcttttggtcaattgctcgtattctgtggttgtattctggctgcatttgtttcgtattgatattacacaacggagaaaataaaaggaaaattgagcaataattttatggttatttggaagtaaaaaatcaagcttttctctagcacaattccaacaaggatgtcgaaggatggccattttgtactaccatgtatacgtactccccttcttattggatatccgttagttgatactaataaatagtttggactgaaaggacaggaagaaaatgacattcctttattttcaaatttctgcatgcatgcactcggccggtacatgcggtcaggtttttcctgtacaaaatctaaacgggtaaatataaacaccgtttgatcgggcttgggtttgatggatgttggatgagatcaggtgtacgggtgtacctactcctaggagaaattttatagtctttaaaaaagtacctcaaggtttctaaattttattctaaattttttatatctcaagataattagtatttggaggtaccaattttatagtataaagtgtacgtagtacctcatggtaatttttaaagaatggtaaaattatctactcctaaggagtatagaaccgtattccttcgaacatgtccatttgcaatcgtgctgcctatatgtaatatgaaacgacgtgaaacagaagtatcttgaagcttgaagcttaaagtggatcagaactcagaaaagacatgtaaaatagactctgcccaatccacagtaccacgagaagacgccaacaataaacttctcaaattagagatttgctccgatccaacaaaaaataactcgaggtatcggtacttcacggtacactggtgaagaaaccctttgtagtcccggttcgtaacccccctttagtcccggtttccaaaccgggagtaccaatccgggactaaagatcgagctgacctttttttttgcatgcccctgttgctgcatggtttatatatatatatatattatattatatgtatatacatgcataatatatatgtatttatacatatatatgttatgcaaatgcatatgtatatagatatatatatgaacaaaatatatttacattatagaaaatgtgtacacatgcatatagaaacatatgtagtcatgtattaattacaatccattatatgtcctagctagctacgatttcgacgtagtagtactcgctgctagctcagaagctaaggaccggtaaattgtgtttccgtcgtagtagaattcacccttgggatcaaggatttcttcgttgatgaatcccatgagttgttcttgaaccgccgtgataaattccttgtgtgtggtcaggttatccctcatgcgaatatagtaatgcgaataaactatatgaatgtatgaaattgattagtaattaaacaagaaatcgctacgtaatgaaatttgaatttatttgtatgtacatcgagctctcttgtggtgatgatttggtctgcaaggcagtggcaatactcgcacacgtaatagccgcacaagttagttccctgcttttgctttgcgcactacaaataaatgacaaacaacgagagatctaattaaatacacttgtatgtatttgaatcggagaaatataaatgtagagcatgtgtactcacaggaaatttgaacttccgcctaagtctttctctccatttgccgcggaccaaatgacggaaccgataccaagccctacatggagtttaaagctatgattcgtagtagcaattaacataacaagattttcttaattaacaaaggaacatctgactaagatcatccgcaacgtcgttaccatcagcagctatttcctcctcgcccgtttgatttccttcaaatccaacgtactgagcaaagtccggaatattgtcgtcttccacttcatcttcttccatttcaacaccttgctctccgtgggatgtccaacaattatagcttggcatgaaccccgactcaaacaagtggaaatgaatagtcctggatgcagaatactccttctgattcttacacttattgcatggacaacaaataaaacccctttgcctgttagcttcggccactctcaaaaaatagtgcacgccgtcaataaactctttggaccgccggtcagcgtacatccattgccgatccatctacatgagtcaaaaaaaccgcacacaaataattattcttacaataatgacagtcatacaataattataagatatctttattcatacaaaaatcataaaatattacaccaaataattcttaaaaactatttgtaaagttttaaactaattttaatgtgttttactttttttaattttcattttagtttgttttctattatttaagattaactttcactagagttttccttctcaactattttataaaaccttgtttagcaaatgaactaaatttctatatattctttcttccccacacacattttctctctcatcaacttacaactaaattttggagacaacaaaaagtgtgcaaaacataggtgcaaatgtagtatgacaaaaaaaaacattggaggatgaagttgcaaaccttttaggcacctccgatttgtatgtaaacaccaaaataaattcaatagaaattttggcatgacctcccctcttttttgaagtaattttgaagcttgctcgggcagctggaggaggaagaagacatatatatataggggtgggactttagtcccggttggtagcaccaaccggggctaaagatcaccgggatcattagtctcggttggtattaccaaccgggactaaagttaagatctttagtcaccaaccggggctaaagatcaccgggatctttagtcccggttggtaatatcaaccgggactaaagttaagatctttagtcccggttggtgttagcctgacaggtcctgacagcattcgaaccgggactaaagatgatctttagtcccggttggtaacacaaaccgggactaaagatcaaatatgtccgtttcccttttgaaccgggactaaagatcatctttagccccggtttttattgcatccggga

SEQ ID NO: 15054 - DNA, 805 bp, Oryza sativa
attgacctctaagtgtgccattagatagatctgagatttgaggaattttggaagttgaacggagtcaaacggacttacggttggaagatgttgaatttctaagattattggatttttgatctaaaggaaaaaggatttaattaaacccttttgaaaaagaaaaaaaagagggaggaggaacggacttcacgggcggcttgagcgcggcccgagaggggttggcgcggcccggccttgccatcgggctggccggcctgaggggcagcccaagggggctctcggggaggggaggaaagagggagccattgggccgggtccaccttgcgtggtcctgggtggacccgcttgtcggtggctcggctcaccgtgagcaaggtgcacacggggcgtgctagggtttgggaaggggaggcgcggtgcacgcacgtgctcacggtgggtgcggatgaggcgggcccacacgcagcctcacggctctcggtggagcgcgcgcgcgagcggggctgaggggagcggctgaccggggttgtcttgacccattcgcggccgaggtggcaccgacgtggccgctttgtggcagccacgcaggccggcgagaggtagacgaccatgtcggccggaacggatggcggacggcggctacgaacggcggggcgaaccacggcgatacaggagagagcgagcacaccgggtggttgtacgagacgaggggagacgagtcaacggatcagattcaccggagggagttcgtcggtggaggattgtggcgtcggccaccggcggcgagagaagaggggaacgacga

SEQ ID NO: 15055 - DNA, 9153 bp, Oryza sativa
agattcatctgatattttagagcaactttcatatagaaagttttcgcacaaaacgaaacgcaccgtttaacagtttgtaatatttttaacacaaagcaaacatgttaccaaaatatatttaccattagatttataaagttttttttatgttatagatattactaacttttttcataaatttgatgaagcttaaaaagtttgaccaagaaaaaagttaaatgacctgtaatacaaaatagaggaactacttgtaaggatcggtgtgcacacatagcattagcggctctctctctctttttagcgaaaatcgacccgacggactctccctaggattccaggcatgggaggagtcggcatgggttgctccaaatccaagcgctcgcagctgggcggcaagtgcggtttgcatatgcctgcggcttcctcactcactcacgaacaactgcagccagctggttggccctggggtcgattggtctggtgtttgaagtataaattgacaaattgtcccgttgaaccgagggaaatttgggtagtgaaacatccacaagtcatcgtcaggtgatgagtggtttgctaccatctcagcgtagaaggttcgttcgtggagatacgggttaaacatcgtgctaaacagttctaacaatggctctatgaatgatcagttgtttgctttgtttctaacgactgaaagctaatgcagtatcttctgttaaaaaaaaaaggctggtcaatttacgtttatgttaccttccatggtttagtttagtgtgaagctagctataggtcaccagcggttgcctaatatggattgtagccttacgactatgaatgaaaaaagatcgaacaatatatgtgtgtatggaaaattatgatacatattttcactgatttaaaaatcaattatgaaaagtaaattacgatagaagtctcaaaatcatcttaaacaattaagttctaaaaatttttttacagcgacttattagttgtagggaaaatgattagagtttttaggcaagtaaattaacactctcacatgtgtggaactgagtaaaatagtactgatgtctttacaggtagaagacatagatgtactattcaactattcacatgtgagatgatagcaacatttcaagctaatctaccccatctgagtcaggtcgaaatgagacgtgtcatctatataatataatagtacatcgtgtatatttacatgatgcatgacaggtagatggcttaatcaactataaaggtggtgtgcacatacgtacatagcgtctgcagctctagtggccgctctctgttaatttcttgaggcaaattaaattgaccaagtaatgaacctccacagggctcctaggcacgagaggcatctgcaattactcagccaccttgaggtcgacaaggtcagccagctctccgctggtcgatcgctagctgtttgctcctctcgactagtcggggatgtatgatcgtcaattcaatgccctctctacctcttcagtttttaaggctttcatgagctgcagccttcgtgcaatcctctgatcattctccgttgttacgaagagcacagcatcctggatgccgtcgagtggcccgggctttctatcttttgcagtgttgatctgatgtgtcctgatgtatcacccggagtctaggtgttgtgaatttctttttttaatttctgagtggattgtttcatggtcgaggttaattacactgccgagcttaagcctactcttggataaaatttggaaacaatacatagaatctcggctttgaaaagattggatttaaacgattagattatttcaatataataatacatgcaaaccatcgtcagttgatgaagggactagaaaaaagatgcagtacgatcaaatgaatttgacaaaccactccatctcactcaacctaattattcaaacggtgcctaactggtggccgtttctgaaagggaggaaaacagagaagcaaagcacaatgaactttggcaaggtaacgttttgccgtagtctctatggatggtacaagcaacgtagactttacatgttttcttattgaatgggccatttgtatgtacgctgccaccttaactcttgataaataaaacaacttttttatgttagtagcaaaaatcacaaataaatactagcttacatcactttttacttataataaataagtttagtattgttgtacaagtagagaccaccaaaaaccacttagctaagcacaaaagcaacatgaaccaacataaaacagaaagctaggagagtcacccacacaagaaccgctcagagctagcttacctagctggttaaaatggatagtaaagagaaggaaaggaatagcctctgccaaccagagagcgcgcgagaaaagcaacatggactctttggttatgcagaggcagggctgggcatgggaggtttcaggcacacaaccgcgtcaccgtgggatcatgtctcggaggccggcgcgtttgatggtggccttgtgccgtcatgtcgggaacgggtgccctgcctgtgtgctcgtcttcaccagcgaccttcgctcactaggattgctcgtggaggttcaacctggtaggacgtcctgagctctgcaaagcagtcggtgctcctttgtctgacgctaattccagcgccctatcatggcaacgcggaaaaacataacacagagcacagttctgcggtgcgtatgtgggcagcggacacattgttggtagtgttaagttagttgtagtttaattaggataagtatttgattaaggagttcgtggtatacattgtttacgctggccagattgtacatacagatacgtaagggccggagtttgagtcgtatgtagctttactaagttgagtcctacttgttttatgtagtttcagtttgtttaattagcaaacctatataagaccatgacaggctatgtaattgtggtacgtgagttgagaaaaagaaaatggcgatagttgtgtctcgccagaaaagttcctatgtttttggttctagttttcacgtgtgttattcgattctggtgaaatcccaacaattcttttgttactcagaattaatcgaattttcagctattactactggagatgggaaagctcccgtgtgttgccaaatgtaaccgtgtgttttacgaaacacacggtaagttaccgtgcgcttcgcaggaacacggtaacaagggaatataccgtgcgtgaacatgttgcacacggtaacgttgctactgaaccagaaatccatccaacttccgttttcgcgccctgtgcttccgttggcgcgcccgaatttcgtggttggcgcccacggtgcttctaatgccgccgaccagatttcttttttttttgcacaaccaactatatttcgttggtaatggagtgaaaaatcgtaacaccttcatacgaagtcggatcgagataaattttatatgaaaattgtagcccttaatgagatctagaactttttagatgaaaggtttttcatttaagattgtttatgggttcaaatatttattttttctctcagatctatttttgaaattatgttttgagttttcaaaatgatctccgatgaatacatgttctatgttaaaatagagagctatatgagaactataattttgcagaaaaatttaaagatttgttaaaatataagaaattcaaattttttttggtagtaaatgatttcaaatgaaaaagttgtcaacaataaagttgtataactcatcaagatctataacttttactttggtcttttttctatataacattttctgaacagtttgaatttgaatttaaaaatatgaaaacttcaaacagtattttcaaatattaaataatttcaactgaaaaaatcatcaacaacaaagttgtataaatcatcaatatctataacttttattttggtcatttttctatataatatttttttgaatagtttgaatttgaatttgaaaatatgacaacttcaaacaacattttcaaatactaaatgctttcgactgaaaatgtcatcaaaaaatcaaaaataaagttgtataactcatcaatatctataacttttattttggtcatttcttcatccgacaaagtgatactaacattgttcacaaaatcacatatccctcatctggttttataaactataacacagatttgtgaatcttgtgaacaatgttattaacactttatcggatgaagaaatgataaaataaaagttatagatcttggtgagttatacgactttgttgttgatgactttttcagttgaaatcatttagtatttgaaaatgttgtttgaagttgtcatatttttaaattcaaattcaaactgttcaaaaaaatgttatatagaaaaatgaccaaaataaaagttatagatattgatgagttatacaactttgttgttgatgactttttcagttgaaatcatttagtatttaaaaatattgtttgaagttgtcatattttcagtgagaaaataatcttatttcctgattttaggttcaaacattgtgtttttcagaacatccatgaataggagtgaagcatctgtgctggtaatgattgctatacaaacttctttgcaatctcaagcctaaagtatttacttttcctttttcatttatgctcttttcagtgtcattgtgccttttttattgacattctaaaaagttgctcaagttacattgttgactgttcttgaccatattgagataatgagaaatcagagatatatagtaatgtgtggcttaatttggcttatattagagcattgctactggtaaaagtacctagcgacaaaaattgctcatggtaaactacctgcacaatttcactagtaccttttgtgatgcagtagttgtttgtgcactaaatggtggcctctgttcctgaagatccagtcctatatttttgctaggttgatccaaatatgctcatgttcttatttccatctatataattgagcatttggtcttatttcccattaattgtactatgtttgggtttagcatgtaatatagtccaatcttgatattaattcagtttctagctatattgatcttccagtttcttacaagcttatcacaattgcaggtataattatacattcaagcatcaacttcaggatctgtaccatccatttatatcatctttctattattgattgatcaaccgaataatatgttcctagctattgtaactttggttattgctttaactgacatgaaccatgaattgcttgtatgctaattattaattgtaacctctttactgaaatatatatttatgttggaatgtgttgtgctcttgtgtgcttgttggtggtttatattgtgatggaaataagctttgatggatatagtaaacaaattgcaaatagcatatttttttattaacacgttctcttaccgggtgcttcaaacacggtaacgcaccacatgttaccgggtgtgaatgaaacacggtaacacaccaaatgttaccgtgtgtgaaggacactcggtaagccaccgttccgttagaagctccgttacacaagagtccagctacgcacggcagccttaccgtgtgattcagcacacacggtatgtgttttggccttcccatgcgcataattgtaaaacacccgggaagtgcgcacggtaaactgatgaagccgccgagtatctgttcccatgcactagcacccggtaacgtcgttaccgtgtgtttttggcctgttaccgtaggttttgagcacacgagagccttacagtctccagtagtgaaatttatatctctgttaagacccacgttatgtttacggtgtggcactgaatcggaacgattttcgcaggagaacttaccacattcaaagcagggtgggaacgaatacgttagctaaatttatttattcgttctcatatgtgtgtggacatatcccattcccatcacacaatagcatgagagtgctgaattatgagaaggaaaatgttacacgatgacactgaagacatatacattccgtacccttctgaagttgtttttttttattaagattaaagaggtagatgaaattaaatgagacatgattacgattggtggatataaatatggtgtataccgtcgtgtgcgcttaattaatgcgatgatcacaagatcaatcttttcaaaatggagggagacaaccggcaatggtgtctgctgcttactgtttttagacgacaacaatggcggctacatatatagttgatgcaaagcctaaaccaagtgttcaacccatctaacccgctgaaacagcccaactcaaacacaggacttgggggctgtttggatgacggtactttgccacaaaagatttaacaaagtgtgacaactcatatatatatatgcgtggccaaaattttattggtcatactacttgtagaaagcagggtaacaaatcctatggtaagtggcttatttagtcaaatagttaccatcctcaaccaaataaccccatagatactcacagactggaaatcctaatcggcgatcgatcgcctgggatgggggtagcgatcaattcccctccccctccctccctccactggtttccttttttggcaccgcattactttcttattttcgtaaatttatgcacctaaagtttatacacctcaagtttacacatataaagtttaaagacccaaagtttacacatataaagtttagagacccaaagtttacacatctaaagtttagagaacaaaagtttatatatccgattcaaatttgaatttgaattcaatattttttatatatagtatttctatacatctaaagtttatagacataaagtttatagacccaaagtttataagtcaaaagtttacatacccgattcaaatttgaatttgaattatatctgatttaaatttgaatttgaattctatatatagtatttttatgcatctaaagtttatacacctaaagtttatagacctaaagtttataagtcaaaagtttacatacccgattcaaatttaaatttgaattatatccgattcaaatttgaatttaaattcaaatattttctatatatagtatttctatacatctaaagtttatacacctaaagtttgtagacccaaagtttataagtcaaaagtttacatacccgattcaaatttgaatttgaattcaaattttttatatatagtatttctatacataaatttttctaactttttgtttttttaacaaaaattgtatggtttactgtagtaggaagaaaagaaggggaggagaaaggggggagaggagggaggaatgtatcgagtacagggggagggaggcggatatcattcgaatggcatccttacaatattaaaaaaaaccggtggcaagtttgcaaatgctctattattttaagcgacaatgcaacatttacgatgattcggatctcggcgtaaaataatacctttttcaatagtatacatttttattttttgaaaaaggtactggcaaagctaacatgtccattctggctcatttttgccttcttcaaaccagcgttacattctcgctttattttttattttattactatgcacacaagagcaacttggaattgtgccgcactgctattcatattagctctatgaatcagttgtttgctttgtttataaggactgaaagctaatgcactatcttctgtaaaaaaaagtatatatggtcaatttaaattttgcttaccttccatggtttagtttagtgtgaagctagctagtttagatcaccagcggttgcctaatggattgtagccttacgattgtcaatgaaaaaaaaatcgtataatatatatgtatgtatatgtgtgtgtatggcaaattatcatacatattctcggtgatttaaaaattaatataaaaagtaaataacgatagaggtctcaaaatcatcttaaacaattaagttataaaatttagtttttttacagtgacttattagcagtatgtaaaatgattggactttttagacaagtaaattaaccctctcatatgtgtgggaccgagtaaaatagtaatgatatctttacaggcagaagacatatagagatactattcaactattcacatgtgaggtgatagctacctttcaagctaaactaccccatcaaaggctggtccaaatggcgtgccatcgttcatattcgcatgatgcgtgatagatagatggctaagtcaactataaaggtggagtgcacatacatacgtagggcttgcagctctagtggctggtctctgttaatttcttgtggcaaattaaatcgaccaagtaatgaacctccacaaggctcgtaggtgcgagaggcatcaggagttactcagccacctctctgctgctcgatcgctagctgttcgctccactcaactagtgtgggatgtgcgattgccactgcaacgccctccctacttttccagttcttaaggcttttacgagctgaagccttttgtacaatgcgcggatcattccctgttgctacgaagagcataccatcatggatgccgtcgagtggcccgggcttgctatctttccctgttgctacaaagagcacaccgtagatcatttcaatataataatacacgtagaccatcgccagatgatgcagggactaggaaaaaagatgcagtagggataaatgaatttgacaaaccactccatctcaaaaaaggcttctgttacatgtatctaattattcaaacagtgcctgactggtggccgtttctgaaaggggaaacaacatagaagcaaaatacaatgaaccactattggagaaaccatctttggtcagttacccaaaaaaacacaatagtcccggttgctcaaaaatccgtgactaactttggcaaggaaatgttttgccgtagtctctatggaaggtacaagcactgtagacttcacatattttcttattgaatttgccatgtatttacgctgccaccttaactattgataaataaaacaattttttccgttagtagtaaaactgataaataaatactagcttacatcactttcttgatgataataaataaggttagaattgttgtaccggtagagaccaccgatcgaaaaaccactccactatgcacaagagccgcat

SEQ ID NO: 15056 - DNA, 2629 bp, Oryza sativa
acctggtgacgaagggcgtgctgccgccggcctccctgcagcgccgcggcgtcggcggcgggggatgggtccagctccagcctccgcccccgccacctccgccgccgcagggaaccctggcgttctatggtgcccagaatggccggcggcggttggatgatgatgatgatggtaatcctaacccccgctcgcggcggaaccgcggtggtgagaacaataatgatgacagtagtagtagctacaatggtagagggaagaggaaattcggtgcttacagtaggcattcggattgggggagggacaaggggaggagtagggggaattcggatagccggagttacgatgatgaggatgatgacgggcctcctggttataggagagagcggcgaggtggtgggagatttgatgatgctgggagtagcatgtcgggggtggcagcgtctaagacggaggccatgggggagtcggagctggaggatactgggtcgaaggtgggctctagcagtaatttcaggaaggatgtcgatccgccacaagaagtggagggcgttgataagttgaataagattaatgaggagagtaatccatcaaattcagaggtggtggagcaaatgactaatggtgagagcactagtaataatgcttcttgtattgttattgatgaggaacagacgaaggcaaaatatttgcctgtgccctcagatgacaaggtttcagatgagaagcctgacgatagtagtgttttgaatgagaagattgaagatgacgagactttagctgagaaagctgaagatgataagacttctgatgagagggtaccaggtgtgaagaataacttgcgtgatgattgtaataatttgctgagctattgcagttatccaaatgtaccgacaaggcggcgatcaatagttgcacacaggaatgcagcaccagcccatagggaagttgctgttgccgaacagattgatctggtttcctctgaagatgaaacccatatggccactgatgttacagggcatggcagctccttgactaatacccaggaaggcaacaaagatggccttgcctgcttggaacataccgatacaagcactacttgcaatcagatggtggagccagtaagattccagacagaggaaacacagattggaactgatgatttgagaggacagaaaaacattgagcaacattatgcagttcacgaatctagggaggagaatatgttacctcctaaagtgggtgttcagcagcaagttgaggaaggaatgcagatttacaatgttgatacaccgccacaagatgaagacttgattgcttcagctgataaagagaaagtagctggtgtggcattattacctagtatcaaagctgaagctgttgttgcgaaggaagaggacaagtttggtcagtcaagttcatttaaaatatgtgatctaaacctagttggtagtccagaggttgctgaattacgaaatgatcctggtttgggtcaattctcaactgctggatgttcaatggagccacaaaatcagcaacaagagtttagaaatacgggtaacagtgcagatgataccaacatgcatgcccaaattccattgcacaataaggtggttcaagttattgatcttgaagatgactcgccaattgaagctggtgcatgtgatacttcaaaagcaaagtgagttccttccacctccctcttatttgctatgtcattctgcttttatatgagtataattttttcttttggtattacggtttgatgatacagtacctagccttaaaggcttgtcccagactagttactattaggcaaccagttttgtgtagccagcgatgaatggtagctggcccagacgctcagcaatacaaaaatacaggggtgactgccttcttccagtcgctgcacaaggagaatgagtctaggcctttgctgtcttcttattgttgttgcttttcatgttctgtaggagtggcagctgatcttgctgcctaatcagcagacttgctgtcaatctttgtactcttcgctctgatcttaataaaatttctctgtcatctttatggctagcctgactaaaacagtatttgtacataatgcaccgacaaccatctaatttccacatccaacctatgcattagtttatttctgtttattttctcttcatttatttatccattgtggctgctaactacatacctttaattgtgtatgctagagaggaaaacatggcaaaccctgctgtgaccacagatgttcttcctggtatccaagatggatataattttgcgatttcagattatcttggtgctgatataccatgctaccaaccaatgcaaacagatcttcccaatgggatgagcctaaatgattcagaggtgaggttttctgatattgttatacatcatgtggaggcttaataataggaaaatagattcaccactatccagtaccagtagtgacatttgaggatttgtgaccatatgtttgcttgacatgcgtagacacatatagtcaccataagttcataatactgttttttttccatgagtaagagattccttacactttttttcctcctgttgcagggcattactgtcatggatgattcaatatatggttctctta

SEQ ID NO: 15057 - DNA, 13575 bp, Oryza sativa
tccccctacgacaccaacgtcgtcgccatcggcgccttcgccgccgtgcggaggggcatcctcgtgacgtgctccgccggcaacgacggctccgacagctacaccgtcctcaacggcgcgccgtggatcaccaccgtcggcgcgtcgaccatcgacagggcgttcacccccaccgtgacgctcggcgccggcgccggcggcgcgaggagcatcgtcggcaggtcggtgtacccggggcgcgtgccggccggcgccgccgcgctctactacggccgcggcaaccggaccaaggagcggtgcgagtccggcagcctcagccgcaaggacgtccgcggcaagtacgtcttctgcaacgccggcgagggcggcatccacgagcagatgtacgaggtgcagagcaacggcggccgcggcgtgatcgcggcgagcaacatgaaggagatcatggacccgtcggactacgtcacgccggtggtgctggtcacgccctccgacggcgccgccatccagaggtacgcgacggcggcggcggcgcccagggcgagcgtgcggttcgccgggacggagctcggcgtcaagccggcgcccgccgtcgcctacttctcgtcgcgcgggccgagcccggtgagcccggcgatcctcaagccggacgtggtggcgcccggcgtggacatcctcgcggcgtgggtgcccaacaaggaggtgatggagctcgacggcggggagacgaagctgtacaccaactacatgctcgtctccggcacgtccatggcgtcgccgcacgtcgccggcgtggcggcgctgctccggtcggcgcacccggactggagcccggccgccgtccggtcggccatgatgacgacggcctacgtgaaggacaacgccgacgacgccgacctcgtcagcatgcccggaggctcgccggggacgccgctggactacggcagcggccatgtcagccccaaccaggccaccgaccccggcctcgtctacgacatcaccgccgacgactacgtcgccttcctctgcggcgagctccgctacaccagccgccaggtcgccgccatcgccggacaccgcgccggctgccccgccggcgccggagcagcaagccaccgcgacctcaactatccgtcgttcatggtcatcctcaacaaaaccaactcggccacacggacgttcaccaggacgctgaccaacgtcgccggctcgccggcgaagtacgccgtgtcggtgacggcgccggcggggatggcggtgaaggtgacgccggcgacgctgtccttcgccggcaagggcagcacgcaggggttcagtgtgacggtgcaggtcagccaggtgaagagatcaagagatggtgacaattacattggcaactatgggttcttgagctggaatgaggtcggaggccagcatgttgtcaggagccctatagtgtcagcatttgcccaatgagaagaacagatgttagcatagcaggatcaaaaataagagcatggaaatagaaaatgacactaaaacaaagtatactacatacaactaataatcatgatcaggaatataaagagtacatataatggaaagagagaaataattctcaccaggatactgatattgcacgtgtatttttgtactctctgcttctgaattctagttttgttactgttcttctcaacgtatcaaattatttacacaagggttacaaacagagcatcaataaggagcagcttgtaagatttatatacagcaacaaccttaaaagggaattacacctgatgcactacgtttcatgcagcaaaagattaaacagaagaggaaaatcctaataagtttttctaagctagaatgagcactactaaatagtctacatgcttcagcaagatgttatatgtattatatctcttatcaacattggggtctacaaattctgtaagcgggcaatcagcaggtgataattaaggatatccaagcaattcttccagagttacagcatattcttgagctatttccttgatcaactcctatgcactactgtagtcgaaggaaaatgagatgacatgaaaagcgattcaataggatatcattaacactaatccattcaatgttgaaggaatccaaatctattgtgtccttcactccacttagaccacttgctatgcacgagtgctcagtgctcactgttcagcatgaaaacattgaaaattcatggccatcttgttgctattgtgctaccaaaatcattgcaggtcagcattactggccaccattcctatacatagcataaaatcctattcattttgtattggtatgttaggtatacgatctttctgagctgaaaattgaaaaatacctgtagatgatcatcctcatatcaaagccatctgccaccaacttggaccttcgagctcatcatgtatgatcagttgctcaacttggcagccatgttgcttctgggagtcctaccaccttctgtccagagtcccacttagtattcagtcattgcatgaaccagcattctccaggctcagtagcagtctagcagcgcaggacggtaggagcactgatgagcagatcccaaataccagctctgaccaaattgcgagcttcagtaacaaggtatatcttttgttctcttctacttgtgaggaaggggaacagctcagaatatgagatgataccaagatttcgactcatcagtctgcagctaaaaatccatcaagtcattctacctgaaaagccttcacgccaacatcacagtatatctagtgatgacaatggcaattcacccagggactagaacggccatcaatcacatatgccagctatattaactatagttggttctctctgctatcaaagggttctacaaccagtattacctccaacaagtaaagtaattcactaagatatactctctgcagggtctacagccacaaacgtctaacccaccatgctgacttagccagaaaagagaaaaacaagcaccatgggttccaagcattgcctgacttacatcatttacaagtggaatgggatccatgctttacctgagtatcagcgcttgctgcctgagtgctagtacatgcttgcgggttgccactatcatcctgatatactcatatgcaatactaggatcccccctgcataagtaccgtggaatagtgcagatccatgtagaagcgctgggttcagaagcagctcaccagatcgcatgggttcctgagctgacccgaaggtagtatttcagaagcacaaatcctggtgcaaaaaaggctaacaaatataacctgagcagaagcaacaagtacacaagattgggcagaatagctctcttagaattctccatttaattttcatctttcaaaaacttcatctcttattctcaacaaatgcatcctcctgttttcaatctcttagaaaaccgacatggagtttcatatatagaacctatctgattgattaccatgggtttattttgccagttgattccagagataccgcagaggcacagattaacgagaaaaaaaatgtggaattaataaccacaaagtttaatagtgcataccttgtaaagctacttgaaagagaagtgacataccatatgagaagaaaaaccttcagctgattagctgcatctgcatgcataaatataactgtaagaattgtggaatctaaaataataccagatatctacagcttcaataaatagcactaaaaattaaattgataaaggtcataaaaaagcaaccaaacaacaccacataaagaagagtggaaaattaaggaaaatattagtctcctttcattcaaagatatttctaagggcttaaaaatatgctgccctgttacacatcgatgacaacaattatgcattacaatctttcaagggtaaaaggaaactcagtattctgttttctcagaagtacatcaatatttacatgttacactgcaatcgcctagcaaaatgatcacggatgctcctaggcaagaatcccatattctaaactctcagaagtccaactttaccttcaatactttctgcaatactcagtagtgattaatcaagacatcaagtatactggtacagtggaatataaatctgaaccagaacacactatgaagtatctagccgaattgatcattgctctgagtctgagatagatttctcaatggctctcacataaacagccttcggaagagtcccagtaatgctatgcgttttctctccatccttaaagagtaaaacagttggaatcctctcgatgctgtaagatgttgcgacttgtgggtaatcatcagtgtcaagcttatagcattttatccttccagcatattcttgtgcaatctcatcaacaattcggtggaccattctgcagggtccacaccatgaggcccaaaactcaataagcacaggtatatcactgcagatcacatattcattccaagaacatgccgtaattgttttggctgtacaaacaaacaaaacagagttgtaagataactcctctatatttgaacgtaaaactaaacaacaaatgatgttatatgtcacaacagttgctacactcaagtaactacaaaagatgctaaatataaccctgacactatccgcttgctgagagtaacagttgctatccagcagccctatgctcatgtaacaaagttaggaaaattgaacatcttaaaatgtgttgtagctactagtatttacggaggtgaatatgagccgagttaattggtttgcctcaatggtgcagtttgcaggaacagaagcagcggccaatatcctggaaatgaacaactgaacggtagagctgccgaaaactaagagcagccaaagaaagaataattgaagaattgaagtttagtgatatttcactacagctccaggattttttttcgaacgaaccggcactacagctccaggatcaatcatactttactagtaacgtgtttatttcaagctttcgacatgtatcaaggtttcaacttttctgtggtactgaactggctgacccatttcttgtacggttacactacccgaaaaaatggtatacccctacattgcattctctagcaagtaaaattaagctgcttccttacggcttctcccttgaagagtgcatccatcataccactgttcaactacattagactactacatggaactggaagcaatgaacatgagaattgtcactaatttgtcaaccacacaacacaccaaagggggcaagggcagttactacacgacaccctaaaggcagcagaaatttttggcacaagcaaacggttagcttcagggggagggggggggggtggatcatcatcaaccagcgaggaggcacactccctttacctccgcgaggagaatacgcgcagctcaccgtgcggatccggtgcgccgcccagcggcgccggcagcccggccaccggcgtgcggcggaggaggaggcgccgtacccggccctccgtcggccgggcgccgcgagcgccacgccgcggtagaggctccgcggcggcggcggcgcggggcaagcggtggcggtggcggccatggttgttggtgttggttttgggtggagactcgtgcgtgcgtgcgtggcggaggatgcgcggtaggtaggaaaatttacgaggcaaatccgcacgcgacgcgagcgagcgagcctagcgcttatgatgatgaggacgacgctgacttggaggtgattttggagtgtgatgcaattcactcaaaccttattatttcctccgtttttattatatttatcaatagttttaactttttttacaaaaaaaatatattaaagttaatcgattttataaaaatatatgatagtgatttgaccacaaagcaaatatgttatccaaatttacattgtttaatgaaactaatttggtctatcttaacaaagtttgactaagataaaagttaaaaagcgatatattgcatccctgtgtacaacaatgttcaactaggccttcacataacaattccattggaccatgtgtacctcatcattctcatccttcaaagaccaaaccggatgggcaaaaactcatctcgccctgcaatcccctgcatgactgaagatctgaaagttggtagggcaagaatgtctgaatctcctacattcttcagggaacaaggttctcgcagcaagcaacgcctccatatccaagaatctcacttacgtttgcacggtagaaatgatgaaaaaccaggagcttttcgcaaaaccttgatttgttcgtctcgagctgcccatgctgctgcgtcccggtgtatcgtaccatcagattcagagagagcacacttggtttcttgtctccctgatcaagactcatgaaatggaatggacacatgacgaacaccagagaacaaaaccgcataggcaacagctacaaagtcagagagaaaacactggaggatgccgtcctggaagatcttcatgttctgcacctgcagaaaatggttgtgctcatataaaacttttgcgacaaaatctgtaaaatggaaaaatgcatgtggtcatcggttcacatacacatctatatttgagtgcagaaagattatttttaaaacccattttttataaaactgagctcttcgtacaaaagtcaaccttcactaaaaaaaccaagtggagtaatttttttatgggataaaaaggcttagcgcccagcttttctgggaagctcaacgggattttttaaaaatatccggcatttgacacttgaaacaagacaataagatgacaccagctttgccacctcatcatcaaactacctatcagcacccaaaaaaaaagaaaactccatcatcaatatgtgactatgtgagcagtgttagatgctacaccaccagatgacaaaaaaaatccattcaaatgttttgtttggtagttcagactctctgaaaaagaaaaaaaactactccacaaaactgatgtttttcctattggattaacaactaactggagatcacccaacgttagaaataaagggctcgtatcctttaccataatgacatttttatcataggcattgacatataaagcaatatgaggatggaacctacatgccactgactgtaatgttagtgcaatatgcgatgtttagttcccaaacaaaaacttttcaccctgtcacatcgaatgtttggacacatacatagaatattaaatatagacaaaaaaaactaattacacagattgcgtgtaaattgcaagacgaatcttttaagtctaattacgccatgatttgacaatgtgatgcttcagtaaacatttagggcaaccacaatgtggggtcttaagcctctaaagtggtccttatacattgtgaaagtagtccatatagtagtctttagtatgaactacccatatgcataatgcctacccataagaataaaataggaattgtcagggttatggataccacatacctaatagtagttgactaaatctcggcagggcccaccacatatcatgtcctatacggaaacaacctgcggatgtaggaggagttccggataaggaaagacaaccggagttctacgtggaaacgataaggactactcggattgtatccatattggtttccctaattctacttggacaaagggactcctatgagtataaatacaaggccccctaggaggagaggggggacagacaatcaatacccaacacaatcgacatagaagccacaacatacaagccaacatactccaagacaagacgccggattttgacttcagggataggcatggctattcccctacggtgtctccggataccgtcaggagagacgaaagcgctatctctgatctcgccggacacggattcgaggagcaaggctaccctgttgtcgactacgagtcagaccttcagaccgccatgtcgacaacagttagataggctaccccacatattgtactggtgtgattatggtgaataaaaagcaacatcggcttagggctacctgaccgctcagggacccaaacctgtataaaaatcttcgtctccatctcttttacctcagtctcacatgacatacaacacatgacatacaattgagtgggacccaggctaatgccttctcttaccatatacattatagcaaacagtataactaatgccgggtcccaccttattacctaagtagacattatacattgagcatgcccttactaataacgatttacaggcgaaatttataatttattttgttattagactatgtttaatatgtgtcccgtatattcgatgttatatgcagaaactttacatccctatgactaaacagggccgcccatgattgtaaagcatcgtaattcgtaaatgaagtgaattggatcgagtgacccaggtgggccccacgcggcagcgacccaggctccagtctctactccacgtcgacggctcgttgacccccaccggctcgtgcgttggcggttttgtcggtttccccctctctctccctctccctctccccctcgccgcgctcgcctcgcgtacgtacgtacgtcacgtcacgtagccgcctgcctcgcctcgccccgcgccgcgtcgccaactcccccacatgccgccgcgccgccgcgctcccgagcaccacccacccgccacgcccgcgcccacgcgccaccagctacgaggcggaggcgtccccagtgtagcaccaccactatggcggcgcggcggaggcacgtggcggcgggggcgggggcgccggcgccggctgcgagggagtgggcggcggtgacagccggtggcggggctgcgtgggcgttgtcgccggtggaggaggtcggacgaagcaggagctgatgcggcggacggggctgccgccgtgggacctccgcgcgctcgacccggcgctgttgtcggcggcgtcggcgtggtagtgccgcccgtccgccatcacggggcgggaccgagccctcgtcgtcaacctggaccgcgcccgtgccgtcatcaccgcgtccgaggtgctcgtcccgtccccgcgcgaccccgccgtcgcgccgctcgtccgggagctccgcgcccgcctcgccctcgccgcctccccaacccccgcgccgtcgccgtcgccgccgcaggtgacacatgcatgccccccaccctaccttccttcttgcattgcatcgtacgtcttcttcttaagcaaaagctctgatctctcactccttttcttttcttttttgaaagcatggcatggcggtggggatggacgggagcatctcgccatcgcaggcgagccgcggcggcgaggaggccgccggcaacggcaaggatggagaagctctgggaggaggtgacaaggctctgccgttcgagttcagggcgctcgaggtgtgcgtcgagttcgcctgcaagtctctcgaacatgaggtgtgtgttcttctaccttgtctccatgctttttacctgcagtgctatctccatctccaattctccattcagaattggatggaaatgcaaccaatacctgatctttaagtgcagtgtagctatgcataacatgcattaaaaaaaaagagatttgaagagagatacatccctccaaacatttttcaagaagaaattataagcgtattgaaaattaaacacggaaccttggagttataaccacttactcattgctactgcactatcaattgcatctcaacatgcaatttgcttgggttgaatttaccatgaatagtgagtggctcaccaaactatgcaaaaagttatgcattgttgtatatttgtattaggtttgacattgtaattgtagacatatgttcaattcctatccacattgatttttctaggtatgtcatatgatcttttaacactcaactagacgtccactatcagtatcttgcacatgtatatgtctttccttgctttggtttatatcaccttcagaaggggaaaaaaagaagtggatttgtaccttgctacatttcgacaattctttagcggcatcccttctaatccaaccttttttattatatgaaaatgacttttgttcttctgccctgcaaacatgcttctccgattttcatggttgttgagatgatgctaagtatccatgccgtgccggtaacattcagtcatgtgtctcacccttttttacttcctgatagcactataacaatgtgaagacaaaattcatttctcgagcacattaaaacggtagtgtgtttagcaacttagcattcaggcaattctgcactgaaattgcagttcctaagaaaaatttgcttgatacatgattgcatcagacttgcacattggagaaagaggcatacccagctttagatgaactcacctccaaagtcagcaccctcaatcttgagcgtgtgaggcaaatcaagagccgactcgtcgcaatatctggcaaagttcaaaaggtcagcttcagtatatataccacaagcatatgtgaaactgaaattacttcctccgtttcacaatgtaagactttctagcattgctaatattcattaagatgttaataaatatagacatattaaattcattaacatctatatatatgtgggtaatgctagaaagtcttacattgtgaaacggagggagtaacatttatgtataccatggatcagatagtccattaggagtaattctgaagtgtttaagtaacattgccatgtgtatctcgtctgacaggtcagggatgaactggaacacttgctggatgacgacatggacatggcagcattgcacctaacggagaagctcgcttaccagtcatcaagattcgacatcgataaagaagcaagcgagctcgaagatcacaggtaagaaatttttttcttccataggttgatgacacaagtcgatatgcttcatccaaccgttgtcaacatgctacagatgtgtcgtctgaatgtctgaagctctgaatgcagcagcagggatgaagaaggagtcgagggaggcggcggcggcgacggcgacgacgagacgatcgccggcggcggcagcttcagccccaacaccgacgagctggagatcctgctggagtcctacttcgtgcagatcgatggcaccctcaacagcctctccaccgtgagtagttcctctcgccgatgaacgtcaatcatatctggacgtccacccatttattgtatgtcaactaaattattataatttttttttaaaaaaattaataagataaatcaatatataatatatcattccacgaatatataagctatcaattgtaacaaaagtgacaaataaaactcaaattagcagttaaatttgtttttttttacaacttatagaagtagaatttacttctataatttaaacttatatgtttgtgaagtgatatattatttattaaactatatgttaatttttttataaacatttagtggacatgtaataaacgggtggacgtcccctagagtgattagaatccatctcgatttttttataaccactaaatgacctgcattaaacgggtagacatccgctcgagtcattaaaacagattcccctctctcgccattgctaacgaaggtgaaattaaccatctgaatttatctctctctctctcacggatgaaactgaagctgagggagtacgtggaggacacggaggactacatcaacatgatgctggacgagaagcagaaccagctgctgcagatggggatcctgctgtcgacggggacgctggtgtccagctgcgccatcgccgtcacgggggtcttcggcatcaacgtccacatctccctctacgactcccccgcctcctccgccgccttcccgtgcgccgccgccggcatcgtcgccggcagcctcgcgctctacctcgccgccctcctctgctacaagcgcgccggcatcctccagtgacgttattactagtactacatgtaaaagaaacattgtttttagtattaactgtgaccatgagtgattaagaacgagtaattatgcgtgtgatagtgtgattacggtgttctaggcctctttgtttatatttattattactacctctatcccataatataacccataaaaaatgcatggtcaaacttaacacggtcactaatactaatttttgtcttataatttctcatatattataataaggattatagtaataaaattataaccatatgaaagtaaatttaaatatcaattcaatgatataatttttagcaagtaaaattcaattcatactatacacaaaatattttgaagataaaatctcaaaatgtgaacacctaggatggagggagtagttttttttttaagtttactacttcctccgtcccaaaatataagaactttcggttagatgagacacatcctagtatgacgaatctggacgaacgcatgtccagattcatcgtgctgtactatgatgtgtctcatccaaccaaaacttcttatattttgggataaagggaatatgatttataagccgacgaatttaaaaccatgtggaatgacatctctatatttgactatcttacgctattttttttcaaactactactccctccgtaccaaaagaaaacttaacttatggagtttgaattttgtcccacaaaaaaccaacttctaccatactacctacccttagcaatgctttattacttcgataccatttacctattttaatgatgtggggtattttgatcatcttcactctttactactgttgcattgggatgttagggttggattttacatgggatagagaaagtaacttttagaaagtaatataaaaatgatttatggctttaaataagaaaatgctgtttatctgtttagatgacttttcggttcataataaaccgatttataagtctaagtctatacaaagagtattcagggttggtttggtttatggcttaaataggcattaccaaattttgtcagtgccaaattttgacaagttttggcatgattaattttggtaaggcaaagttgtgtttggattgaagccaaaatatgctaagtttactattgaaatggcctattttcttaggcatgtcaaatttcgggttcaaaccaaatagacactaacactattgaaattgtcaaatattgataagtctaatttagacctcaaaccaaaccaacccttggtgtacaggagcttaatgatgaacactctcactgacaaccctggcccagacgtgtgtgccccaactgtcagtgtgtcaccaacaacccagcatctacggccccacgtgtacattccatttttctcctgagcgcagcgatgacgacgaccaggagctgaggagcagcaaaaaagaaaaaaaaatcgattagttcacgcaaaacccaaaaacgaaaaaaaaaaaatcttcattgagtgttaactacggaaaatatctgacgaattcgtcgcgaaatttcgtcctctttttttcgtcagaaacgaactaagcagcggggatctcgggatagcgaatccccagaaactcgttcggactcgatctcgctcccctccgatggtccgtctcccggctgccggcggcgacggcgacggcggcggcgactgcggcggcgtcctcaacctgacc

SEQ ID NO: 15058 - DNA, 1152 bp, Oryza sativa
caaatctgacagacagaccttgcaaaggcccattaaagcacaattaactgggcctgaaaagcccagcccgtccactctgacgattctacccctctaaccctacaccggccagcgactatataaaagcggacccgtctcgagccgctagggttcttcgatttctccctcgcgccgccgcctcctcctcaccctccccgccccaggcgcaccctacgcttggagctcgtccgatccgctcggcgcccgccatggtaaacgcgcgaagctctgaatccatcctctgttcctcgcggtctcgcgtgcgtgccgtgctgcttgctggttgatgctaatctcctcactcgcgtttcgcctgtttgttgttgcagatcatcccgaagaagaaccgcaatgagatctgcaagtacctcttccaaggtcagtggttcttggtccctatttgcacctcgtaatcgtactagaggcgtagagccgccgccatgtttagtggagattgttgttttaggtttgcaaaacgaggagattcgtgttgctccgtacaggagcacggttcttagtgcaggaactgccctcttgttaaaaggagaagcttggtttagatgtaggatttgatatgctagtgataatttttcattctaggaacccaatgaactattggttatatactagcgaaatctgtgcacccatgaacatcaacttaaattgattgtttcggtcctggtgttgtgaaaatctgtgtgtaaaaatttcaagaaaaatgatatcgctgttggtgtatgtcagtacagcgttcgcatgccaagaggctcaaactgaaagtgattgtaggtgctggttttaacttggtgtatgctgttgttgcagagggagtgctgtatgccaagaaggactacaacctggcgaagcacccgcagatcgatgtgccgaacctgcaggtgatcaagctcatgcagagcttcaagtccaaggagtacgtcagggagaccttctcctggcagtactactactggtacctcaccaacgatggcattgagcacctgcgcaactaccttaacctgccatctgagattgtgcctgccacactcaagaagtctgccaggccacctggccgcccatttggttctggcccacctggcgaccgcccaaggtata

SEQ ID NO: 15059 - DNA, 4889 bp, Oryza sativa
tttagttttggccgtggcatctactatctgaaagtgctttattgcaggtttgcagatgtactgcttcccttcagttcgcatatggagtaagtaatgcaaatgttatatgatccgaggttaattagttgtactaaatcatactttttctgtatcgcatcttgagaaaactttagtatggaaatgaaaaagactaacgtatttcttattaatatttaatagagaaatagtagtagtggattggttaagatattgaagagataaaacttatcgatttatgggagataaaagagtaaaaatcaacatgttttctaaaaggaggtgcttatactcattgttcattttttgcttaatttaagtggcaagagtactagtctgaattttggcaaaataagacaaaacaggctggatttagtactagtctgaattttggcaaaataagacaaaacaagctggatttccagcaccactacttcttaacaacgaacgctatgtccccagagttctgcagatttgtcggcattttttaacagatatatcacccattggaagtcaacgacagatgcattagtatttactactatattcctattataatgttagcaaatctgaagggaaatataataaagagaagagcgtgagcacgtctatgtattgtattggtgcgcaattcgatacaaccggctaacattttatcaaatataatcaaaacaatccatccagttctcccggcaaaaataaaaaataataaaatatagaaatttaaacaatcaaatatttaacaaaaatatgaagtgagcgtaacttaacgagttagtttccttatggtgaaaccaacccaccctaattcaagacctagatttgacgttggtgatctcatttacagttaattattctttttagtgataggcgacctacccgtaatggtttcgtcgatctcaagatacccaaacttctaaattgtacatttttgttaaatatttttatataaatttctttcaagcaatcattttttatttttaaattttataaaattaatattgaattaattatgtacttcctctattttataatataagactttctagcattgctatgaatgtggacaatgctagaaagacttatattatgaaacggagcaagtactattgattaatctcgttttatatgtcactaaaaattttagccgattagccaattcgaacatagctgaatttcaaggggtagaaacttgcatggttttatggattttgcagcccatatagcacctttcaagaaggcccagagagcttccacattgcttgtgtggcccagctccgtgccatggtcatcatggccttttttcttaaaggagactcaacaccatggaccatgtatcagaatgcatggaatattattattgtttaaatttcatacaacctcagatattattatggtttaaatttaacaaaatcataagagtttttatatgtgatacctcatcatgggtattataattttaagtttacgcaaaacatgccgttagcccatctcacttaacattgtatcaattttttaaaaaaattgattaacttgcatggctacaacatatgtacggtggattaaacaacccatgaattctggatataggtttacagctcatgtatatagtatattaaagaaaaactagttgatggtgtagttttttcaaaatgtaggaccaaaaacacctgtggttatatgcaacgggccaaaactcatatggttttatgcaatttgaattattataatatcttgattttttgtgaaatttatataaaaaaaataaatgacctttttttctctcagtttgccctccaacaaggagatgtaaagcagcttttcttatgctgaagattcctaggagcacgattgacatatatttcttagataatacgattgacatatatacctccttttctttttcatgatagctgtggcatatatgctacagttgggtattgtcatcaacacatttcatatgatcttgagagagaagaacaagaataaaaagccttttttttctatcattccctcacaatgaagattgtaaacatcttttcctgtatgctagtacctgggagcatggattgtaattgcacttgcacccattaccctatctttttcttttctttttgatgagatgcattaccttttctttttgatgatcataactatggcatgtactatattatagtacagtttgctagtgctgttagttaaccagatgggcccagacaaaagagagagaacacatcttgggcctaccctaccaccttctattcctttttccagttctttttatggcagaattgtcatggccaagacaaagaagataatctgagttggaagttgattcattacacaatcattcatgttctttgataacattggcatcaaattaaacctttttttggtgtggtgttcaggaatctttaataagctttcattaggttctttgaaacaaagtgatcgcctccttttctttccttctccatgccatatatctctggtctccatgacgagtagtaaaagagccgcacgcttgatccaccaaccggctatgagtaattgagcccaagaaagtactaatcatcactataatctctgcatcatgctgccaatgttgcttgcttgacatataatgatcatataataccaataattaatcaccattggaaaagtatttgccaggacaagcctaccttccaagccttggcaagtactttcttctgcttaatattcgagtttcatattataagttattttgggttttttctaaggtcaatattttattttgggttttcctaagccaatatttttaagtttgattaaatttatagaaaaacgtaacaacataatctctaacatcaaattagttttattaaatccaccgttgaatatatttttatagtaatatttattttgcgttggaaatgctactgtatttttctgtaaacctggttaaactcgaagatatttaacttaaaacaaacctgaaataacttataacatgaaatagagaggaagccacatttatgaagtttgatatatccaaatggcgacgagttggcgggaagcaagttcttgagtgcagtggagctgcaagatcgattatcagatggagtactcaaccgaaacttaatggaacaggatgagaataatgctagctacacgatatggtgtactaaactcaatgtttccagagattatcctgtctttgatgtgaagctcacatcaagcaagatcagtggtgcccccacaaacttttacagttttacctgatgattgctcattgctgcagaaatgtgcagggaattttctcatcattgatagttttcaggctagcgatcgtcgtcaggaactaaaatccggcacacggccctgaaggctgaattcagtttggcgtgcaacctgaactattattatctctgcaacaattttctccagtcattttcgtggctacagtcaccgtcagctttgcagtcaacccccggtcgtcttcctcgtctccatctccgtctgcggcggcggcgaggagagtgcgcgctgcgcatttgcggcggcgacggcgacatgcacgcgcgcggccgtggagcacgaggccggaaaggagcacggaatgggtggaggcaactcggcacaaagactgtgaagcagccaagcagcagcagctcagcccagcctgagtgcagcgtccaccaacacagcctgtgcttcttttttgctcttccctgctgcaatcagtttcatgtggtcatatcaccaattcatcaccaagataatatttatcccaaaagcaaaactttacctttcgaacagtggcattgcttgactcgccacagttttacacaacctattcttcattaattaacgagtacattattaaaaaaatgatattgcttttgtttttttgttataacagcgagagcaacttttacggtggtctaacattccaacaaacgtttctattataactagcaaaatatttcgaacagcaaccacaaactaaactgggccacgctgttcgtgatacgaaagcgaggataatttgctactactactagtatatgaaatggaggcacaccgaacacgatacgtccgtgcgaagcttagtgttcgaccctgtgaaaatgattgcaatgtcgacgaacatgcatgccacccatggatcacactggccatggcttattagctagtagctcactgtcttttcacttcctttttcttgctaaactattattatcatttatcttaagaagattcttaattagtgtagctttatgtcgatcgccttcgatcaaagagcgagctcaaataccatggcctccatcgatggacatggacgactccaatatgtatataatgtatccggtccattgccaccatcgccatgaacgagtgcaatccactcgtgtcatccactcactctcgttgctcttcttaagaggacgaagacgacgacgtcgaacacgaagacatcatgatggcatggaggagcttgtcgctggtggcgttcatggcggcggtggcggcggcggccgcggcggcgggcgatgaccggaggccgtacgtggtgcggatggacgtgtcggcgatgccggcgccgttcgcgacgcacgacgggtggtaccggtcggtgctctcgtcggcgtcggcgagggacgcggcggcggcgccggcggcggagcacctgtacacgtactcgcacgccatgaacgggttcagcgcggtgctgacggcgaggcaggtggaggagatccgccgggcggacgggcacgtcgccgtgttcccggagacgtacgcgcggctgcacaccacgcgcacgccggcgttcctcgggctcaacgccggcgccggcgcgtggccggcgt

SEQ ID NO: 15060 - DNA, 602 bp, Oryza sativa
cagcccagggctgggtgtaccagatcccagtcaacatctgcgaggcgctcaagacattcggctcctgcggtggccggtcgctctgctcgccgtctcgcgccgccggcgccggcgagcgcggctctctctctgccgccgacaagaagcgtcggcgcccgcctgccagcgggagctggctctgcggagccgccgtggccaggtgcctcttggcgatccaggaggaggaagacgatgagatcggcaagggagcagccgtcgtgccggccgaggatgtaaaggcttcagaggtcggtctcgtgatgcaagggtgggacgtggaggaggaggagagcacggtggtagtcggggaggtggaagtggagaagaaggacgagatcttggtggttgggaaggaggaggaagggagggtcagcgtctgcatcccgccgcgaaacgcgctgctgctgatgcgctgcaggtcggaccctgttcgtatggctgcattagccactcgcttctggggctcccctgcagcggcaaatgtcagtcaggttgacaatgtcaaggatgaaaacgaaaacgacgacgacgaagaggaggaagaggatgaggaagacgaagat
